United States Patent Application Publication US 2006/0123505 A1 - sequence listing, part 11

SEQ ID NO: 18183 - DNA, 1897 bp, Oryza sativa
  ref <308>: DATABASE ACCESSION NUMBER: AK068590
  ref <309>: DATABASE ENTRY DATE: 2001-12-06
gactcctgcacatcacaggcaggcaggcaggcacaggctgtgtccccaacacaacacaagactactactcccaaatccccaatttcattctccttgatcccacccagccactcaatcccagatccgaatcccacctctccgtctcattctccggcgccggccagaaatgctgccctcctcctcctttaggcgttggggggagctagagctctagctagctagctaggtgcgacgcgacgacgtgatggctggtattgctaaggagaggcggctgccgccggcgctgccactcgccactctcatcggccgcgagctccgcgccgggggctccgagcgcccctccctccgctacggccacgccggcttcgccaagcgcggcgaggactacttcctcgtcaagcccgactgcctccgcgtccccggggacacctccaccgccttctccgtcttcgcggtgttcgacggccacaacggggtctcggcggcggtctacagcaaggagcatttgctcgagcacgtcatgagcgcgctgccgccggacatcggccgcgacgactggctacaggcgctgccgcgggcgctcgtcgccggcttcgtcaaggccgacatcgacttccagcgcaagggggaggtgtcggggaccaccgcaacgctggtggtcgtcgatggattcacggtcacggtggcgtcagtcggggactcgcggtgcatcctggacacgcagggtggtgaggtgcagctgctcaccgtcgaccaccgcctggaagagaatgccgaggagcgggagcgggttaccgccagcggtggggaggtcggccgcctcaatctcttcggcggccaggaggttggtcctctccggtgctggccaggtggcctgtgcctttcaagatctatcggggacatggatgtcggggagttcattgtgccgattccacatgtgaagcaagtgaagctctcaaacattggaggaaggttgatcatcgcatcagatggtatatgggatgcactaccctctgaagcagcagcaaaggcatgccgaggtttacctgcagaactggctgcaaagcttgtggttaagcaagctctcaaaaaaagtgggctgaaagatgacaccacttgtgtggtggttgatatcatcccttccgattatcgtttgacatcgccgcagttgtccccaaagagaaaccagagcaagttcaagtctcttcttttcggtagaaggtcacacagttcaattggaaagcttggaggcaagtctgcctcttttggctctgtggaggaattatttgaagaaggctctgcaatgttggaagaaaggttgggtaggaatttgtccttgaaagcaacctcggcacctcttcgatgtgctatctgccaggtggaccaagaaccatttgaaagtatgatgactgagaaaggaggcagttactgctcttccccatgcgccccctggggaggtccatatctttgtttggagtgtcgaaaaaagaaagacgcaatggagggtaaaagatcaagccactctacagcgtgcaggtgaaacagagcaggggattctggacaaggttgatgttgagtgtaaaaactaaagatggaataataagttgctggattgaattattattttctgaaactaactgcatcctcagcctggtataaactatgtctggctgctgctaaccggtttatcgtctgcgcacaactctgatggattttttttcttttaatattcttgaggaaatagctcacataacttggagcttgtagttttggattgtatcctctagtgtgtattgtgtaggaatgggcatgcctaatgctgtgtgtgactttttatttgagctagtataccagaaggctctttgtaatggatgaattaatgtactttgctggaatc

SEQ ID NO: 18184 - DNA, 2757 bp, Oryza sativa
  ref <308>: DATABASE ACCESSION NUMBER: AK068591
  ref <309>: DATABASE ENTRY DATE: 2001-12-06
ggacctccccaactgtgaattgaaacggagggaaatggtggagcagcagcataaaatccaacgtgattctctcggctggctgtgcctgtgtgtgcagctaagctaagcttgcttgctctctcttcttcttcgtgttgttgtttctctctctgtctcgctgtctgttgccaccattaatggctggctccgtgggtagctgagctctttgctggccgagctgagctagcctacctagctggggggagagagagagagagagagagagagcataaggatcttggaggaggtggagatggagtacggcggcgggcgggaaggaggaggagggatgaacggcaacgggacggcgtacgcgggggcgctgtcgccggcggcgaggtacgcggagtcgggcggggcgagcctgacgtgggagaatctgacggcggtgctccccggcggcggcgggcgggcgacgaagaagctggtgcagggcctgtacggctacgccgtccccggcagggtggtcgccatcatggggccctccggctccggcaagtccaccctcctcgacgccctctccgggaggctggccaggaacgtgctcctgacagggaaggtgcttctcaacggcaagaagaggcgactcgactatggcgtcttggcgtacgtgacacaagagaacgtgctgctggggacgctgacggtccgggagacggtgacctactcggcgctgctccggctgccgtcgaccatgtccaaggcggaggtccggcgggtggtcgacgacacgctcgacgagatggggctccgggagtgcgccgaccggaacatcggcaactgcacctccgggggatcagcggcggcgagaagaagcggctgagcatcgcgctggagatcctcacccgccccaggctcctcttcctcgacgagcccaccagcggcctcgatagcgcctccgccttctccgtcatcgagacgctccgccagctcgccgtcgacggcggccgcaccatcgtctcgtcggtgcaccagcccagcagcgaggtcttcgccctcttcgacgacctctgcctcctctccagcggcgagtgcgtctacttcggtgacgccaagcttgctccacagttcttcgcggaaacagggttcccctgtcctagccggaggaacccgtccgatcacttcctccggtgtgtcaacgccgacttcgacgacgtcgccgccgccatgaaaggatccatgaagctgcgagcagaggcagattttgatccgttactcaagtactccacgtcagagatcagagaacggctggtggacaagtacaggatctccgagtacgccatgatggtcaggaacacgatacacgagatcagcaaaatcgagggagtgatcgaggaggtggtgatggggagccaggcgagctggtgcaagcagctgacgacgctgacgaggcggtccttcaccaacatgtcgcgcgacttcggctactactggctccggatcgtcatctacgtcctcatggcggtgtgcctgggcaccatctactacgacgtcggcacgagctacgcggcgatccaggcgagggcgtcgtgcggcggcttcgtgtccgggttcatgaccttcatgtccatcggcggcttcccgtccttcatcgaggagatgaagatgttcacgctggagcggcagaacggccactacggcgtggccgcctacatcatatccaacttcctctcgtcaatgccgttcctgctcgccgtgtcctgggccagcgcatccatcacctattggatggtcaagttcaggcccgggttcagctacttcgccttcttcgccctcaacctctacggcggcgtctccgtcatcgagagcctcatgatgatcatctccgccctcgtccccaacttcctcatgggcctcatcctcggtgctggcgtcattgggatcatgatgctgacttctggattcttccggctgcttccggaacttccaaagatcttctggcgatacccggtgtcctacattgtctacggctcgtggggtttgaaaggagcgtacaagaacgatctgatcgggctggagttcgagccgatgatgccggggcagccgaagctgacgggggagtacatcatcaccaagatgatggggctgagcctcaaccactccaagtggctggacctctccatgatcttcgtcctcctcttcgcctaccgcctcatcttcttcctcgtcctcaaggccaaggaggccgccgcgccttacatccgcgtcgcctacacccgcttcaccatcaaacgactcgagcgccgcgcctccttcaggaagacgctcgccatgtcgtccatgtccaagcggcacaaccagccgccacaccccatggccgtccaggaggggctcaactctccaatgccatactgaagaactgttattacaagttacaactactactactgatgatgatgaagatgaagatgatgattgatcgatcgagcaagaagaggccggtagtttgggcgaccttgcgacgacgatgacaacaaagatgatgatcatatagatggtgttcgtgtgccacgaatcgattaattaatacttgtgtatgtgttgcccttggattgttttcagctcgttggaagctggaagggttcataaactgatagcgtattcttttttttaagatcttgtattttactgtaagaactcggtctctgtgaccaatacacatacaaaaaggatgctgtgtagttgagtgtttgttgtttcttgtttttttccctgatt

SEQ ID NO: 18185 - DNA, 2620 bp, Oryza sativa
  ref <308>: DATABASE ACCESSION NUMBER: AK068592
  ref <309>: DATABASE ENTRY DATE: 2001-12-06
gggatcgatctaaactcttcactgaacccagccgccgccgccgccgccggctgcccccctccgccgctcaccggcgaccagccatggctcgagccccttccttcctcctcctccccttactcctcctcgtctcctcctcgctcacgcccgccgccacggcggccgcgtttgtcggcctcgactccttcctcgcggcggcggccgcccgcgacccctccgccggcaacgacaccttcggcgccctccccgccgcgctcctccgccagctctcgaccccgtccccgctcctccccacccgcctcctctccctctccgcgcaggtccccgtcaccgtccgcctcgccggcgcctccttcccgcccgccaccggccgcctcctcgagtccttcgtcaactccgccgtctcctcctcgcgcttcctctccagccgccgcccgcaccgcctcgcgctctcccacaagatccacctcgaggtcgccgcctcctcctcccagctcgcgccccgcgccgccgccgccgtccgcgcgcacctcgactcctccgcggcgccgttccacgccgccgcgctctcctccgtcccttactccgtcgtcgacgacctcgtcgccgaggactaccgcgcgctcgtcgacaccggctccgccccgtcggtgtacatctacctgctcaacctcggcccgcagccgcggccgtacgcctacaccgcggcatcgtcgccggccgatgcgcattcacctggcttctcccgctgcctcgcccccgtctgggctggcaaggagcggtacatttggatcgacctgggtgcagggccggtggactatggccctgcgctctccggtgaaggcgtgctcccccgtggcgagttccaccctctcgccgcgctccacggccggccgaggtcggagaaggcattggttgctgatcttgcttcgctggtgctcagtgcttacaagtcattgctagtgccttcgctcagaattccagtgcattacgagagctcgttgctggttcaggtctttcacatccatggacacgagagggatacgtccgggcttgattggggttcgatcgaacagtcgattcgtgatgggaatctggcatatgaagggcagaggttgaagtttgatttgaacaggatcaggttctctgactgcccaatttgctcgtttgcggttgcgcggtcgacaacctcgtttacgtccaggttcttgtttgataattacacgctgattgtgagtgaatacttggactccaagcggatgaggcaggtgctgtctgactcgttggaagagttgcacaaggtggctggtgttcatgataatgatgactatgacaaggttgtgccagtttttgtgtttgatttagattatgataagcttctgttgctagataggtatcaccaggcagtggcttttcgtgatatggtgatttctgtgaggacaaggagctcacagacggtcagcgactacagctgtaatggtcgacatgtgattacaatgactaggaatcttgaccggccgatcatcgcttcagttctgcagagcatgtggggtgtgtcaccgacacaccagtcatggagccctgagcacaatgctaccgtcgttgactacacttggagcactggacatacaccatttggcccattctcagagaccaaatcgctttcttttgtgcagaaagatgcagcccgtaggaatgttcttctaaccactctgaactacacaatcacaagcgctattgatgttttggagtcaatggctgcgcatggtggagagagtatactccttagaaggaaaaggcgtgttgaattcattcaaagatggaatctgctcacttataaactggagaaggtggtctcagccatgtcccgcctcgactacaataaagcgatgtactttctgagatcgtcagatcatgatctgtttgccgtccacactttggtgtatcaggcgtctcaggagttggaggcttctctggtttgcttcaaagatccaccatttccctggttgtcagtttccatgtctggaattttcgtttttggtttcttttatgtttactcgaagagagataaattgttcaggagcaaaaggaaacagttttgactgcacttcagttcacggatactgtttgaatgctcatcttgataccatagtcaggattcagaaaagttgcatccttgcataatacatggagatgtcactggatgcatgaaacgggtgcatcttgttttaaacagatgaattcacttgtacgagatatactggatttccttaggaagcactacttccactagttttgtaagttgcatgtgcccaattcactcggtacatactgttgatctagattctggagacatgcatatatgttttctattcttgactagcttaattactgtcatacttgctgggtgcataacctatgtgggatgctgtgctcaattgatcatgtgtaatttcgagatgtcaatttttctaaacaatgcctttgcaggatattttaagctgattctttaagaactatgattgtggcttatattcgcaaagttggttgtaagtcaatagggtttttagtccagttcctttgtagcactctttgttttttatctgcttgttattctccc

SEQ ID NO: 18186 - DNA, 2090 bp, Oryza sativa
  ref <308>: DATABASE ACCESSION NUMBER: AK068593
  ref <309>: DATABASE ENTRY DATE: 2001-12-06
gctctcatagtcctcttcctcctcagttcatccttgcctgttgcctactccctcctcaatcctgcagaagtttctgaagagatcaattaccaagaaactgagaggaaacacacagattatctgcacacaaatcatcaccatacttgcatctgtcgttgagagaagatgatcccgttcacaaagcagagaagcaccaagatgaaacgtgccctgcactaagctatgctgttcggcaggagctcggtgaggccagtgatggaagcacgccgccgcacgccaagattctgcaaggcggactcggagtcggagcagaggaagctacggcgtgtcaggctccccttctggtcgtgcccgccgaatcggccgccgggcacctgacctgacctgacctctcttcctcttcctctgcatcttccacttcctcttcctcttttctcggtgtctgaatctctcctgagttgttgaacagcctgaggaagacacgggctacgatccttgtgccatcctgatttgtccctccctgtcgcctcactgtttcacgcgtcctggaagcaagcaggcaaacgacatggcggctctgcttttcttgtgatctgggttggaagcttctgctccttcgatcttcgccatttctgaggcgttcttgggagcagggcccttggtcttgctgctgtctgccaccactctgccctgcttgcccctgtgtgttcttcttgctggctttctcgtccttgtctgaatcttgcaggttcttgtctgtgacatcctggagacgcgtttcaggtgttcttgatcttggagcttatgcctgcgagttcttgggtgcaggaggagttgttagttgttacctttgtctccttcgttgatccattgaaagaggcagtggctgtttgctctttgatctgcatgtcctttggccttcaccgacgacgagatgggctctgctccgttcggtgacgccgtcgccggcggtgggctctatgagtaccaggggtatcacggtggcttcgccggcggccatggtctcggccaaccggccggccgagcgcccgcgttggacgacggtgaaactgaggggatggacgcatccgccgccgccgcagtcgccgccatggagatggcaaagaggaattgtggaggcggccgggaggagaaggcggcgatggcgctcaagagccacagcgaggcggagcggcggcggcgggagaggatcaacgcccacctcgccacgctccgcaccatggtgccctgcaccgacaagatggacaaggccgcgctgctggctgaggtggtgggccacgtcaagaagctgaagagcgccgcggcgcgcgtcggccggcgcgccaccgtcccgtccggcgccgacgaggtcgccgtcgacgaagcgtccgccaccggaggcggaggagaaggccccctcctcctcagggcgacgctgagctgcgacgaccgcgccgacctcttcgtggacgtcaggcgcgcgctgcagccgctcgggctggaggtggtcggctccgaggtcaccacgctgggcggccgcgtccgcctcgccttcctggtctcgtgcgggtctcgcggcggcgccgccgccgccgccatggcctcggtgcgccacgcgctccagtccgtgctcgacaaggccagctccggcttcgacttcgcgcccagggcggcgtcgctgctgggcagcaaacgccggaaggtctccacgttcgagtcatcgagctcctcgtcttgacaagtttcagagaaaattacgccaaagtcaaaaagatctgatcggttgcagtgatttttgcttctgataaattaatcgatcatggttgtaaaagaaagatacaaagctgaagtgagtttcttctttaatttctttctttctttctttttggcaagattaattactgaagtggcttctcaacattggttagcacttagcattttgctgctgcttatcttttcgaagagcgttgtgctccatgcatgattaattaccttgcatttgacatatatatatttgacattttcacatttcactgcaacttcagtttaactagtaactaggagctttgctccttcatgcatgatgcatg

SEQ ID NO: 18187 - DNA, 1948 bp, Oryza sativa
  ref <308>: DATABASE ACCESSION NUMBER: AK068594
  ref <309>: DATABASE ENTRY DATE: 2001-12-06
gttaccactcgctcttcccctcaatcaatcaagcttaagctaagctgggcgcgacagcgagagagaaacgagggatcgatcgcgtccacgcacgcccgatcccggccgcgagatgagcttccgcggcgaggagagcggcggcgaggatggggggcggacggcgtcggcgtcggacctgcggaagccgttcctccacacggggagctggtacaagatgtcgtcggcgggcggcggcggcgggatggggtcgcgcctcggctcctccgcctactccctccgcgactcctccgtctccgccgtcctctgcaccctcatcgtcgccctcggccccatccagttcggcttcacctgcggcctctcctcgcccacccaggacgccatcatctccgacctcggcctcaccctctccgagttctcgctgttcgggtcgctgtcgaacgtcggggcaatggtgggcgccatcgccagcggccagatcgccgagtacatcggccgcaaggggtctctcatgatcgcggcaattcctaacattattgggtggctcgcaatatcttttgcaaaggactcatcctttttgtttatgggccgattgctggaaggatttggggtcggcgtgatatcctatgtggtgccagtttatatagcagaaattgctccacaaacaatgagaggagctcttggttcagtcaatcagctttctgttactattggcatattgcttgcctacttgttaggcatgtttgttccctggagaattctctccgttctcggtattttaccatgttcaattctgatacctggattgttctttatccctgaatcaccaaggtggctggcaaaaatgggaaagatggaggattttgaatcctcgctgcaagtattgcgaggatttgaaacagacatcgctgtagaagtaaatgaaataaagagaacagttcaatcatcacggaggaggacgacaatacgatttgcagatatcaagcagaagagatatagtgtacctctaatgataggaattggtctccttgtactgcagcagttaagtggtgtgaatggcattctattttatgctgctagtatcttcaaagccgccggtcttacgaatagtaatctagcaacatttggtctgggggttgttcaggtggttgctactggagtgacaacttggttgactgacaaagctggtcgacgactcctcctcattatctctactacagggatgaccattactcttgttgttgtttctgtgtcattttttgtgaaggacaacataactaatggttctcatttatactctgtaatgagtatgctttcgctggtcgggcttgtggcatttgtgatttcattttctcttggtttgggagccataccatggatcataatgtctgagattcttcctgtaaatatcaagagccttgctggaagcgttgcaacccttgcaaactggttgacggcttggctcattacgatgacagcaagcttgatgttaagctggagcaatggaggaacatttgctatctatgctgctgtgtgtgccgggaccctcgttttcgtatgcctgtgggtgccggagactaaaggaagaacacttgaggaaattgcattttctttccggtgaagctcaggccaacgttgtctggcgatcagcctggtgcacgtcagtcggcaacagatttggctccgtgagctatcggattaggcatcaagatttgaattcttgagttcatgtgtatctaaggcaagcgtgtattggttgcatttgtaattttgtatcatgtgttcatgtatgtgcaatagaaatatagaatggagcagtagcaagagacaatataatggaccattgcaagttgtcacgcacgccatgtggatggatggaacaatgaagatgccaatatgtcatgccgtatgatgaattttgagcaaatatatagctgagggttgttagtcc

SEQ ID NO: 18188 - DNA, 1104 bp, Oryza sativa
  ref <308>: DATABASE ACCESSION NUMBER: AK068595
  ref <309>: DATABASE ENTRY DATE: 2001-12-06
gacacaacacacacacaaacgcattgacgcatgcacgccatcatggcgaggcgatgctctggtgactactcgactgcaggccaacgagccggcgaggagggcggcggcggcggcggcgccgggctacggctgttcggggtgcagctccatgctgcggcggccagctcgccggcgtcctacttgcacaagagttacagcatggattgcctgcggctgcaggtttcttctccttcctccttgcagtcgtcgtcgtcgtcgccgtcgccgttgacgtcctcgttgttgctgtccatcgacgagggctgcgagaggccagccgccgacggctacctctccgacgggcctcacggcgcggcggcaaccatgcgggagaggaagaaaggagttccatggagcgagcaagagcacaggctgttcctggcggggctggagaagctgggcaagggcgactggcgaggcatctcccggagcttcgtcaccaccaggacgcccacccaggtcgccagccatgcccagaagttcttcctccgccacaacagcgccgccaagaagaccaacaacaagcgccgctccagcctcttcgacatggttcaggattgtgacagtggaggaagatctctcgcctcatccgatcctgccactcgctgcaacaacaacatctctgcttctctgtctctccaagtttcgcaccacaaatcaggtgacagtgcgtggccttcgtcagaaacaccatcagtttcagaagcacaacaaggtcatggatacggcactagtcaccattgctctccgctggacctggagctgggcatgtccctgtccaccacgccatccatcggaacctagcaccatcagttgccgtggtcatccatcgactggattcccaagatgcttaacaaattttatcctcagggtcaagttccaaccatcttgctgctgaatctaattgacagccatggggacagtgttgtagacaaaagtttggaatcttgtaacattgtctcatgtagccacccattgtatggtcacaagcactgtgcatatctgcaatgctaccatgcttagtattctctgctgcatcaatagaattttttgttgcagcgatgt

SEQ ID NO: 18189 - DNA, 1276 bp, Oryza sativa
  ref <308>: DATABASE ACCESSION NUMBER: AK068596
  ref <309>: DATABASE ENTRY DATE: 2001-12-06
gatgggtgaccacggcgaggtcaccgccacggtctctcgcctccctcagctccgtcgtcgacgtcgtcgtctgtgagatggaaaatcaggccgtgtcggagatgcatgtcgttatggatttggaaggcacgaccaagaggataccgccgatgcagacgccgagggcgcggctgctgcgcagctgcggcgagtccatcctggccatggcgcgcggggcgtaccggcgcgtggaggcgatgcggtgcccggtggggtgcgtggccaggggcgcctcccgcgcggcggccccggtgctgagcccgctacggctgaggtgcctctcggcgctcgccttcgcggacaggcagctcctcgtcgtccaggacgtcgccgcggtgctcttcccggccgccgagcgcgtcctcggcaggggcgccgacgacctcgtcctcctcgtcgagtccctgcccgccaggctcgacggcgcgatcgacgccctcgaggccctcctcgccggcgccgcggggctgttcgttctccccaagcgttgccgccgctaccgagcccacgaggacgatgacgacggcgtcggcggcgccgtctttagggacatctggtgcgacgagaaggaagccgcgtcgttgcaccgatcagcaatggaggaagaggcgcggaggcattccgacgacgtggctcggaaggaactcgagagcttggaggtcgtcacggcggacgacggcggcggcggtggcaacaccgtgcatggcgacaaggctcccgtcgacggcgaaggagaggcggcgactccggcgaaacgcggcgacgcatcaggtggccaagaatgcggcgtggaggatgtacagcgggtggagacgccagctgcagagatcacagatgccatgaaggacagcacggagatcgtgaaggatgaggaccaggagagaggaggcagcgagagggaagaagaggagaccttcgccatggcccgcacggcggagagcagggaggaagcattgctgggtctcttcgatatagcatggcagcagaagctagcgtagggtaaccaaagggcaaaggtgtaaccattggacactgtatagtatagtgttgtgaagttgtagacttgtagtaatccttgcactgctagtgtcatattgtgaactgtcgcataccggattgtagagaataaaacctgggtacatcacaacgcatgagctgttcactgcttcaaaaatgtaaatatcagcagatagaagcatgcaaacatttcaaacctcctgagaatgctttttattcg

SEQ ID NO: 18190 - DNA, 1151 bp, Oryza sativa
  ref <308>: DATABASE ACCESSION NUMBER: AK068597
  ref <309>: DATABASE ENTRY DATE: 2001-12-06
gctctctcctccctccccagcagtgcagcagtaccacgcgcggcgcgcaatgccgttccttagccctctcgctggcgatgacgccgacgactactactacgcctacgactccagattccgccgaggcagcggcggcgggaagatcgccaagaaggaaaaggacaaggacaaggacaagggcttcctctccttcctcccctgcttcctcccctgctcgcccggatcggtggaaccgacggtgcaccgccgcctcctctcctccgactccagcgacagcgacaacatcgccaccgcggacatcaccgccgacctcgcccgcctccgcgcccgctactcccgcctcgccaccggcccgcccgtccgcccccgcgacgtcccctgcctcctcgcgcgcaccgacgacccgccgctcgccgtggccgcgctctcctggctcggcggcgacctccgcccctcctgcatcctcctcaccctcctaccggcgctcttccccaccctccccgcgcacgcccgccacgcgctctccgccgccgcgcgccgcctccacgcccgcgaggccgcgctggacggcgaggtcgccgagtaccagtccacctacgcgatgaagctggcgtgcgagaagaccaaggacggggtggcggagacggcgggggaggagatgtgcaagatggcgcgcgcggcgcggcgggccgacaagctgcggtggcgcgccgtggaggccgcggtgaaggaggtgctgacgccggcgcaggccaaggagttcctcaaggccgtcgaggacgtggcggccagggcggcgcgccacggcgcgaggtggcacgcgcgcaccggcgccgtctccgtccccgtcgaggtgttcgaccgcatgcgcgccaacgccagagcagccacggatgatgcttggtgatcatcaacggttttcattcgattctccactagttttgttttgtttggacaagagattcatcgctagttttacttcagttcgaatccttctgaaagcttgggctgaaatcggccaaaattgttcatgtttttacttcacttctttgcacctatatactgtattcctgtctctacttacagagagggaactatacctgaaccattgttttcgaatgaagtttggatggattacacctttacagatt

SEQ ID NO: 18191 - DNA, 3039 bp, Oryza sativa
  ref <308>: DATABASE ACCESSION NUMBER: AK068598
  ref <309>: DATABASE ENTRY DATE: 2001-12-06
ggcagaggcagagcagcctccaatggcgcttcctcctcctcctcccttctcgctctcgcgctcttctcgcgtctgcgtaggcgtggcacacgccgtcccccacagatccgcggaaactgtaccagatgccgccccgcagctcttgctcatgcgcgcgcacgcgcgcgccggccgcatgcagcccgcgcgtcaggcgttcgacgcaatgctgccgcgggacaggtcgctcgtcgcctggaccgtgctcatgtcagggtatgccacgcacgggccggcctccgaggcgctggacctgctgctccgcatggtggagtggccgctgaggcccgacgcgttcgtcttctccgtcgcgctgcgcgcctgcgcagccgccgggagcctcggcgtcggaaggcaggtccacgccgccgcagccaagatggggtacgtcggggccgacctcttcgtggcgaacggcctcgtcacgatgtacgcgagctgccggtcgttgggttgcgccgagaaggtgttcagtggtattgccgcgccggattcggtttcttggacttcaatgctcagcgcctacactgaaaacggctgcgacactcaggcgctaatgctgttcctggaaatgatccatggtggcgtttcatgtgatgcgtacactctctctgttgcactccgagcagcttccagcttgggccatgtccgtttgggatatcagctgcattgctacatgatcaagtcaggattcgttcccagtgaattcttggagaactgcctgatcgagttctatggtaggtgcagggaattgcagctgatgcagaaagtgtttgatgagatgaatgcgaaggacttggtttcttggaatattgtcatccaatgctatgcggacaacctgtgtgatgaggaggctttggttcatttccgggatctgatgtacaaatgcgcagaatgcgatgagtatacactgggcagtattttgcatgttattactagaagatgtgcttttgattatggcagggaaattcatggttacctcattagggctggtttggactcggataagtatgtcatgagtgctctcatggatatgtatgtcaattgggccactctgcgcaagagccggtctatgttacctttgagaatgcttaagtactatttatcggtacagggaaagctggatcagttcattgtggccagcagtttgaagtcatgtgcttctgatcttgatttggctgcaggacggatgctacatgcctgcgtattaaagtttgatgtgaatccggatccttttgtgatcagttcattggttgacatgtatgctaaatgcggttctttggaggaagcacatattctattctcgagaactaaggatccttgcacagttgcatggtccgctataatatcaggcagctgtttgaacggtcagtttgaaagagcgatccatttgtttcggacaatgcagttggagcatgtacaacctaatgaatttacatacacatctgtacttacagcatgcatggctcttggggatgttgtaagtggaatggaaatccatagcaactcgatcagaaatggttatggaaccagtgattctgttctgagaagcctgattagcttttacttaagagaaggacagttcaaccaggcccttcgcttgtgcttgtcactctcaaatagtgaaatttcttggggtacgctgtttcaagagtttgctgaacttggtgatcatcttggaatacttaatctttttcatgtaatccaacgttctggtggggtgcttgactacccaactgcatgtcttatcttgagttcttgtggaaagaaagcacatcttcctgaagggttgcaagcacatgcctaccttatgaagcgtggactttcttctacaggctgtatgtgcgattaccttatcgacatgtattcaggttgtggtagcctcacacatgcatttgaggccttcagaaatacttcaggcaggaattcttcttcttggacctcaataatcatggctagtgtagaaaatggttgtccagagacagccattcgcctgtttgtgcagatgttaaggaaggagaaatcaccaaattccctagcattcttatcggtgctgaaggcctgtgcggaaatcggccttgtaaatgaagctttccagttctttgtatccatgaccgaggtttacaaaatacaaccttcagaggagcattactcccacatgattgaggttttgggccgtgctggcatgttcaaggaagcagagcatttcattgatagtgtagtcccttcagaatctggtgcttcagcctggagtttactctgttctgctgccaaacagaatggaaatgccaaaaccatgaggcttgcagcagacaggctatcaaaacttactccggatggttgttgagcaaatgctccacctggaaaatcctcacaaatcacttccatgttaatatagcactaacattatggagatactaacagtcagtttgtccagtggaggtatgaattgtcagcttgtaggtcgcacagcatccgcacattttaccagcggaccaagagagtctccactttccactcttggagtcttgctttgaaaattcctgtatatgcaattcttttttttaagggaaatgcctttaccagacagaaatttggcctttaccagtggtatcgttcgacagtttattgcaaaagattctgcagggttgggggtattgtatagtatagtggcagtagtgaacattgtaactgcaaattgttgtactcctaatttgtatatataggtactacactttagacgatgtacataatttcttctgtctttggttggaatatgattcttctagcaaaaaggggaaaagattccactgggttattatgattaaaagcaagatctcttgttgtattttgattcagtaatacaacaatgttgaatcaatgcctacagtaaaaattcacactccaagaaagttcttaagtcaaccaacgaagagatgaccattgattaggtagattgtattgagaatttatgataaataaaacacggcattaccatgg

SEQ ID NO: 18192 - DNA, 961 bp, Oryza sativa
  ref <308>: DATABASE ACCESSION NUMBER: AK068599
  ref <309>: DATABASE ENTRY DATE: 2001-12-06
gaagcagacgagcccacggccgccgacgccgcccgccgccggacttcgccggaatttcgccattctgatataaattagtgcattgcatcagaaaaatggttgtggggttaataaatgctaaccctgtagtttatgagaaaaaagagaggcgttctcggcaggcaccagaaaccacagatgaaaatgcggcagaggctattgaccagctagaaatatttgatcatattagagacataaaggatccagagcacccatactcactcgaagagcttaatgttgtaactgaggattcagttgaaatcaatgatgaacttagtcatgtcagggttacttttaccccaacagtggagcgttgcagtatggcgaccgtcattggactttgcctgcgtgtgaaacttatgcggagtcttccccctcgatacaaggtggacataagggtggcgcctggatcacatgcaactgaaactgcagtgaacaagcaactgaacgacaaagaacgtgttgcagctgctctggaaaatccaaaccttctggacattgttgaggagtgcttgtcaccaacgtttgcttgagacctgaatacaagtatacaactgggagcctgtgtgttgaaatgtttcaaaactacactgaattaccctacgacgtgtagcatgaccttgtcatttgagataccttatgtggtgcagggcgtgtgcatgaattttgatggtctgtacctttctataaggatactactgctctaccgtttcataccttttttctttttatggcctgtgacctgccagagcataattgaaacgatataaggaaatactcgtatatgaagtatattgcgctgtaggctttttacctctcgaatatgaagtactgtctggatgtcaatatccatgaaaagaaactgaaggatattccatgattttatgccatctctgtaattatatcaggttgctcttgaact

SEQ ID NO: 18193 - DNA, 2214 bp, Oryza sativa
  ref <308>: DATABASE ACCESSION NUMBER: AK068600
  ref <309>: DATABASE ENTRY DATE: 2001-12-06
ggctaatcttccagccacacacctagtcagtcatcaaagtgtgcgtgcttctccagaacagtgagagagagaggggcaaagggaggcaggataaaaagccgagctgtaggggactaaagaagaaagaaaagcatagaaaagaacggcaagcaagcagctcgaggcacccgcgctagtacataaagccaccgaggtgcgatttcgcgagctctagccgcttccacttggccatttcccatctgcctcctggagctttagctctaactctagttctagctctagctccggctacgtttgcaactgttgtttatctcctggtgagtcctcctgtcatgttagccgtagattttggccggagcacaaggtgtttttgttgcttgctgattttacaggttgcaggttgttcttctctttcctgaaatggttttgacaaaagagctgttttgatctggggctgcctcaatcatttgcttctatggcaggctatacaccacacttttaagatgttttagcctcattggtattgtttatgtttcattatgagttattacgaaagactttaattaaaacaaacgtctagggtgctgcttgttgcacaaatgagttattcgttccgctttcaatttttcattgccagaacctgatcttaactccgtgtttttccgcgttctctttcgttctcgcttagacctcagcttacgcttcgggctggtttggtgcttttctccagcctaagttgagtgtagaactaaactttttaaggagttggttgaactcctctcattgccttcaaactcttcctactattctaggtggatagcatttagactcttgaagactttgagctagttaaccttatggaagaagggtccaacaaaagagaaggacttcctcctcaactcctagatctcatcccagatgagaaggaatggaagctgagagaagcattaggtctagggagatcaagaaacgcaggcttcgacggtgaagaagacaagaagctagacctaaagcttggtcttcctggttttatagaagatgatgaggcagaaaccttaagagattacaggctacagcaagagagcccatctctctcccttagtttctttccaaagcactccaagaccaccagcagcactactacgacaactggagcaaagaggggattcatagacacagttgaggacaaaacagaaggttataacgaccagaagcagcaggcaagggcaggatgtgggaaggaacttgcagtggaggaaatgatagcagccgtgagtgagaggaagaaaggatgctgccccccaccaccaccaccacatggtgctcctgctacacctgcgcgcaacagaccacagacccagggaagaggagctgcagcaccagtggttggttggcctccaattcgatccttcaggagaaaccttgctagtagtagttcatccaaacattcccctgaaccacaaaatgataatgccaatgcaaaggtgacgctcacctgcaagaaaaaccctcttgtaaaaatcaacatggatgggatccctattggaaggaaaatagaccttgcagcctataacagctatgatgggctatcgtcagctgtcaaacaacccttccatgggtttcttcaagctcaaaaggaccaaactaatgcgcaaattgcacagcaaggtgcagatgacaaaatattttatcaattgttggatgggtctggtgaatatactctagtttatgaagacagtgaaggagacaggatgctggttggggacgtgccatggaaagtatttgtctcaactgctaaaaggctgagggttctaaggagttcagagctttcccataccctgattggagctactgctagggtctagccgtctaggagagtcaccaattgctgaaatgctgggatcttattaaccattcggaatgaatgtgtgcactcaagccagtccattctccattttaggactacccctattttgcctatatagatgatctactgagatgagttggcatacagcaaatgcaaggaaatggcaatctgttttgtaaattaggttaccttgctatgacatgttgcttaattcaattcgaagcgattttggttttatcggggagagccgcatatgtagacttgcaggtcacccatgtaaagtgccttgttctgcgtgataaatttgtattaatcgctgctgcaacccgacatgcagatctaatggc

SEQ ID NO: 18194 - DNA, 690 bp, Oryza sativa
  ref <308>: DATABASE ACCESSION NUMBER: AK068601
  ref <309>: DATABASE ENTRY DATE: 2001-12-06
gatttcccaccaacccaacccctcctcatctcgcatcgcaagccgccgccgcggatggaaggcctcatcccgcttctctacaaggccatcaaggatcgccggggcggccgccccgacggcggcgccgccgccggcgtggacctctacgacccggagcagcgccggctgtggctggagcaggaggtgcggtccccgctccacccatcggccgcggcggcggggggccagcaccagcagcagcagcagccgcaccggcggaacctgtcgctggaggagctggccggcgaggtggggctctcccctggccggcggctgccgcgggtagcgctccccaaggcccgcagcgtccgcgtcttctcctgcatcggcgccggcgccggagtggccgcgtgagtttgcgttccacttccaatcatgtcaaatcgcggcgaaacctgtgaatacatacacctgacctggtggccgccatgatcatcagttcatcgctggagctggagattgtggcgaagattgattagttgaaccggttcggatttcgtgtttttaattagttctctctccctctttttttttttcttgtttggatctggtagaaatgattcgtatgtggtggtgttagtagtagtgattgatgagtagtaaggtgtttctactgtaattacttgttgttgttatacacggcagattttg

SEQ ID NO: 18195 - DNA, 1926 bp, Oryza sativa
  ref <308>: DATABASE ACCESSION NUMBER: AK068602
  ref <309>: DATABASE ENTRY DATE: 2001-12-06
gagccgccaccaaatctctcccttctccggcgaaatcagcggccatgctccaccacctgccatcagttgaggttgtccctgcttcccgcagctcccctccatcaaatccctaaactttccacccaaaaatcactctcgatctgtacccctaaatcctctcttcaccatccccatatcccctcccatccactaagcgtataggcaaaatccaaatcaacaactagtagcaggtttcttgtgcaatcccttaggtccccaagcaaatccaggaggaggcagcacgtacgagggaagagaaggtctcgctggtctgcaggctgcagcatgctgcctctccaaaaagaagaggtgaagaaatccaagagaagagaagacacagtagatagtcaacaacagattaatctaagctctgcaccaaccgaaccttgaagatgacactttcaaatacaagaagctcaagaagaagctgatcatcttccaatagtcctgcaatttcaaatgagaacgatgatcccaatttagatgaagtggaagatgaggtgaattttcacttgcaaggttgttcagaacttccacctattatccccaacatagaagaccgtccactgattgaacctgaagggaaaacacaatggcatgaaattccaaccttaggaaagggaagaaggccagcaagtgttctatcctgcctactaaagaagaactatcctggcatagtccaatataaaggcaagtcagtgattgctacaacttggaatcactacaaagcagacaaggactcaaatgggagaagcaaagctgatgtggttgaagaaggtttttggctaaggttcaaacatcaaccaagccaagatcaggcgcgtgctgcaaaagtgcatgttcgtaagtgttgcggtgtgttgttgggatggcttaagtattatgctcgaattcaagccataatggatcactgtcgtaaggttgaaggagtgcagatctgtgacaagagagcagggctaagatacctctccaaggaagaatacttggcacagcaacctgagtggtgtgatcaaatggcttgggatgcaatggctactgtttgggttgatcctgaatggatcgaaaaatctaaaacaaaccgagccaaccgcaagacccctaaatttaagcctcatagaggaggatccaactctattgctacagtacgacaaaaactgtccaaaaaatttgggagagaagtatctgcaattgaggcatgggttcatacacacaggggatcaaatcctgaagatactaacacactgaacacagaagaagccactttatgcttggagcgatataaaaccaaggcaacggagttgaatggtccaaactttgattggatgaactcccctgttgactcaagggccttatatgaatgttcttgcggtagaccacatggaaaatgggaaacatttaatgggatggttgatgatagcgaggctatggctaagatcaagagaagatctacatcttcaacagctaacaagcgtcgacgacaagaagaagatgaccatgaaagagcaaggctgatcaaggatgctcgtatagcaaaggaatatgcacaacgagtgctggagtggagtagtggccaagacagctacaacaacactataaaacttattcttgagagtgttatccagcatactggaatgcctctacctgttgcaattccacatccaccgccgccgccgccaccacctacatacggagtttatcattctgcagatcaatctacggtgaatgtatgtggtcatgtttctattaatattgcagatgtgtcctagagatagattttttttaccttgcaatatccagcaatttcaatgtcattttagtggcgtttactatacatatgcaaccattcaagtgtagcagtgtcatatttatcaatctatctatctatcc

SEQ ID NO: 18196 - DNA, 1406 bp, Oryza sativa
  ref <308>: DATABASE ACCESSION NUMBER: AK068603
  ref <309>: DATABASE ENTRY DATE: 2001-12-06
gtgcaaaaaataatatcagtgtcactcctgagttatgaacatggcaataaattgcgtacttgttttcttatcttgcaaggtaccatacaactgtggcttctaatcaaggtggagctggatttgggggaagctattcacctcaagataacagttcagaggctctgaaaacagactccaactgcaaggtgaagtcaaattcagatgctgctgaaataaagcaaggctccaatggtagtagcaacaacaatgacatgggctccagtactaagaatgccatcacaaaaccttcttcaaacaggggaaaagtgatatcaccatcagctgtcaaagctacccaacatacatcagcattccatcctgtgcagcgtcaaacgtcacctgctaatgttgtagggaaagacaaagttgatgaaggaattgctaatggagttaatgtgggccaccctgtagatgtacaaaatagctttatgcagcaccatcatcatgttcattactacgtccatgttatgacacagcagcagcagcagccatccattgagcgaggatcatcagatgctcagtgtggttcatccaatgtatttgatcctcccattgaaggtcatgcggcaaactatagtgtgaacgggagcttttcaggtggccataatggaaacaatgggcaaagaggacctagtactgctcccaatgttgggaggccaaacatggagactgttaatggtatcgtggatgaaaatggggctggaggtggcaatggaagtgggagcggtagtggtaatgacttgtatcagaatggggtctgttaccgagaagctgcattgaacaaattcagacagaaacggaaagtgaggaactttggaaaaaaggtgcgctatcagagcagaaagaggttggctgagcagcgccctcggatccgcgggcaattcgtgcgacaatctggacaggaagatcaggcaggccaagacgaagacagataactaagaaccacctacatatccaacatggcatctgctttgacagctggagagctacgcaattcattccatagctgaaagcagctcatcgatccccacattggagtgctcaataaataaaacccatatgattattttctgtgcctgactccagatgaaatttgtgctatggagtggaccacgcatttaattttaatatggcaatcggtaacaacttagatgcgatggttatttgtgacctccagttcccttgcagagatccacttggacactttgtcgagtctaaggaggagcaaaccatctgacgtttctatcggatcatgaatgctaaatctttactctactactacatcgagctgacatcagtgagggttcaactattcattgcgagacattattttcaagtcaaatagtacatacttttctgctggctgc

SEQ ID NO: 18197 - DNA, 4296 bp, Oryza sativa
  ref <308>: DATABASE ACCESSION NUMBER: AK068604
  ref <309>: DATABASE ENTRY DATE: 2001-12-06
gtctctcgctctctcctcgtctttctccgtctctctctatcgccggccatatccaccactgctccaggctctttcccttactgctgcagttcggtgatgagcgtattggggcagcgccgcccctctgctgctccgctggccccttggagctcgagtccgcacggatcccttcgtctctccgcccccctcgcgcggatccgccgtcggcgcctggattccaccgtctctccacccttctctcgcgcagatccgccgtcggcggcaataggaggggctgatccggcgacctcttcccctctcgcacggatcccgtcgcgccggcgacgacgggaggggtggatccggtagcctcccctacggtgacgacgacgatgggtggacgctacctccatcgctccatctgccagcgacggacatccttgattcgccgtcaaccccagccactgccgcccagttggtcagtcggctgaagagctggtctgtagcattttttggtccgttgatgctaatcgaatcatacaaatagcacttactcctggtagcgaggaactcaggatgttgtagcatggcaacatactaaatctgtatcctgagggaaggcttcatatttgctaagtgagttgcgtttttttatgtgtgctattgaattgaagtgagcaaatattgctgtcgcacatacaggttgagtacaatgataacctggaatcgacattgattggaggtggcttggcaccctagaggaaaaaccttgtgatttgtattttttttgtgtgcttctattatttctatatgtatgtcttgcctgagaaatctgtaaaatcgtgatcgggtgagcgctaaaaatagtggaagaaagaagaaaaggaaaacggaatagcaagagcaggactcctggtcgcagttggggcaaaccggagtaggagtgggggtgcacctgggcttgtgggcttgtggtgcacctggacttgtggctctatgggcttgtggcttggacctggacttgtgggtttgtggaacacctggacttgtggctctatgggcttgtggcttggacctggacttgtgggtttgtggaacacctggacttgtggaggtgcacctggacttgtggctctatgggcttgtggcttggacctggacttgtgggtttgtggaacacctggacttgtgggcgcacctggacttgtagctttatgggcttgtggcttggacttctggcctggcctactgggctggcgctagagaaaagtgaaaaaccgaacaaaatcggatccgtgaaaaaagcatgtacgggcgaaaaaaattacgcacggacgaaaaaattggtgactaaaggaaaaatccgaatatttatattagttaagatgttgttaataaaggagagaaagtaaggggggagagagagagatacataagtacgtacgtgcacattcatacatacatgacgtgaaggggtgggaggtgggtattttcttttttttatattgctaagataaattaatggtagaaaataattggtctaccatatttaagttgaaatcaatgttttttttgttttttcttcgtaatttctgttattttctctaatttattagtgtgttaattgacggctaaggagctcatttagttcccggttattgaaacacaaacgaagtaatcattaagacaatagtttcacgtgacaacttcttttaattaattaaaatatagttgatatggatgtgacatttttatagataaaatacatcatatgctttataaaattttaacatggaacaactagagaaaataaaataaaggtgtaggattggttgctttctttaccgtaggtgaaaacgtgcatacatatatgttctttttttattttttttcaaacaaatagtctttttttgtttttctttagcacaaatagtgcgtagtttttccttacgtaagtttgcacgtgcgtgcatatgggctggtggggatgccctgacgtgggctgatgggtgataggagagggaggtgaaaaaaaacaattctaatggtaattaaaatggtgggtctaactatttgttaaggtgacacacggtggtttaggagtatttgtaggacttccacatggttgtttatgagtatttgtaggaagttttatgaactttagtattatttatgatataatagaagataatagatgtcaaatttttaagttgaaaaatcaaacaccctcccaacaaaccttgtactagtgtgtaattatccgatggcgatcagaaataattcagaagggtgaaccacacgcgttaggtcctgtgcctagtaacatttaagtcgccaactaccgctgagaaatgacgctattatttaacaaaatagaaatatactccattcgtcctaaaaaaaaagataaaccctaattttcgtgttcaatgtttggccgttcgtcttatttgaaaaaattatgaaaaaaattaaaaagacaagttacgcataaaatattaatcatgttttatcatctaacagtaatgaaaatacgaattataaaaaatttttatataagacggacagtcaaagttggacacgcaaccctaggatttgctttttttttttttttttaaacgagggagtaagaaacacggagtgatgtctgccaccagcaaccctgagacgtacgtgttgtcacatggagacttgttggagtgagtagtagcagtaatgacggcagcaactagcaagaacgtcgtcgtgctgttccccttccctggccatgggcacctcgccgccttcttgtccttcgccggcgtcctccaccgcgccctcccagacgtcgccatcaccctcgtctcgacgccacgcaacgtggccagcctgcggcgagccacgtcggcaggacatgactcctttctattacacgagctgccgttcgtgccggccgaccatggcctcccggcgggctgggagtcctccgacggcgtcccccacaatcgcttcccggacttcctcgaggccttggaggtgctccagccggccttcgacgacttcgtcgccggcgccaccgccgccggcgacgtcgctgtctgcgtcgtctccgacccgttcttggcgtggacggtgaccgtcgcgcggcgccgcgggtgcgcccacgccttcttcgtgtcgtgcggcgcgttcggcagcgccgtcgtgcactcgctctggagccacctccccattcgccccgacgaggccggccggatcctcctaccggagtaccccgacgtggtcatccacaggtcgcaggtgtccagcaacgtgctccacccgcccacggccgtgaagcaccgcgtcgaggcgttcttcgggcggcagatacagctggggtacaagacggacgcgctgctcatcaacaccgtggaggagttcgagcccaccgggctcgccatgctccggcgaaccttcaggctcccggtaattccaatcggcccactcgtgcgcgcctccaccaaaacaacctcgccggagacggacgccaccgccggcgccatcaccagttttctcgactcccaccctccgtcgtcggtgctctacgtatcgttcgggtcacagttctccatccaagcagagcacatggcggagctggccgccgcactggaggccaccggccggccgttcgtctgggccgtgaagtccggacgggcacaacataaacggcgagatccagccgaagtggcttcccgacggattcgaggagagggtgacggcgaccaagaaaggcctcctcctccatggatgggcgccgcaggtggggatcctggcgcatcactccacaggagcgttcctgagccactgcgggtggaactcggtgctggagagcatgacgcacggcgtgccgatcatcgggtggccgctcgccggcgatcagtactacaacgccaagatgctcgacgaggagtggggggtgtgcctccgcgtggagggggcacggggggacatggacatgagtgccattattgtggacaaagcgacgctggttgccgtggtggagacggtgatgtctccaacagcgaaggcggccgagatgcggcagcgggcgagagcgatcaaggagatcatggaagctgcacgggagggtggacatggctcgtcggcaaatcaggcattggaggagttcttcaaaacaatgaagctgaacggctgaagttggaacaaaatccaaggttacttatttactatgctagccgctgtgttattctgaatcatttgttattacttaccacatccacaatgttgcatgtaaaatgatcttaaggaataaagtaatatatttgttttacctct

SEQ ID NO: 18198 - DNA, 1661 bp, Oryza sativa
  ref <308>: DATABASE ACCESSION NUMBER: AK068605
  ref <309>: DATABASE ENTRY DATE: 2001-12-06
ggttgttcgcctccgctcgccgcgcctgcagatccccctctcgcctcctctcctctcctccccaaaccctagcgagcgaccaactcctgggtggggggatttttctccatggcgctgcagttcgtcgagtcgcagcgcgaggcgcggccggagctcgccgacccgtacgccgacctcgccgacctctaccagcggaagctctggcaccagctcaccctcaagctcgaccacttcctccagctccctgccgcgcagacgggtgacaccctcatacagctctacaacaatttcatcactgatttcgagacgaagatcaatcttctcaaacttgcgcatttcgcggtcatcgcttcgcgccagtaccccgacaaggatgctgctataagtttcctcgagggggtaatcacaaaattgcgcgagacaaaggacctgcgcatcaatgaacccattctctacgtcaagatgcaaatcgctgcgattaacctggagaagggaaatcagaaggagtgcaagaaacttttggacgaaggaaaatctactctagatagcatgactgatgttgatcccacagttcatgctagcctctactggatatcatctcagtaccataaggctcgccaagaatttgctgagttctacaagaatgcccttctgtatctggcttacactactgtagagtcactctctgagtctttcaaactggatttggcatttgatctctcccttgcagccttgcttggtgataacatctacaactttggggaattgttagctcacccgattatcaacagtcttattggaaccaaggtggagtgggtctatcatatgttacaagcattcaacaccggcaacctagctctctaccaagaactatgtagggtccacaatgctgctctcagtgctcagccagctttggtgcagaatgaacggaaactgctagagaagatcaacattctatgtctgatggagataatctttagccgggcgtcagaagacagaactatcccattaagtgttatagccgagcgcactaagctttctgtcagtgatgtggaatatcttcttatgaagagcctctcggttcatcttatagaggggataattgatgaggtggacagcacagttcacgtgtcatgggtccagcctagagtacttggaattccacaggtgaaggcgttgcgcgagcggttggacgcctgggttggaaaagtgcataccaccctgttgtccgttgaggcagagacgcctgatcttgtagctgcataacttatccaaccttccttttgctatatggccttggtcaccaagggtgcggtgcgaaaagagagatgatctggctgtggtggctgtagttttctgggtgatgaaaacatgttgccttgaacgtttccctggcaccctattgatcaggacctgtaatttcatttctctttaaatcctctggacgttgaggcctggagcttgatgcattgatcacggaaaaagcacaagcggatcaaaagtttcataccagtagggtgtcattgtagttcttttcccagtgtgatttagattgttactcagcgggtattttcatattcttttcctcatatatgctggacatggatggaggaaaatcttactgattttcgttatgttgaaaaggttatgttcccctgaac

SEQ ID NO: 18199 - DNA, 1650 bp, Oryza sativa
  ref <308>: DATABASE ACCESSION NUMBER: AK068606
  ref <309>: DATABASE ENTRY DATE: 2001-12-06
atcgatcgatcgatgagcactcgctttgattcgatcaatcgattgatcgagctataggtagccaattacaagctaattaaagcagtaaccgtattagatcgtcgatggagatgacgatgtcgtcggcggcgacgtcgctgccgccggggttccggttccacccgacggacgaggagctgatcctgcactacctccgcagccgcgccaccgccgggcagtgccccgtccccatcatcgccgacgtcgacatctacaagttcgatccatgggacctgccatgtaagccttcttcctcgatcatatcgatggatcgattgagttggtcgttcggtcaattgctactggttaattaattgcagcgaaggcggtgtacggggagagtgagtggtatttcttcagcccgcgagaccgcaagtaccccaacggaatccggccgaaccgcgccgccgggtcggggtactggaaggcgacgggaaccgacaagcccatccacgacagcgccaccggcgagagcgtcggcgtcaagaaggccctcgtcttctaccgcggccgccctcccaagggcaccaagaccagctggatcatgcacgagtaccgcctcgccgccgaccctctcgccgccgccgcaaacacctacaagccctcctcctcctcccgattccgcaacgtctccatgaggctggacgactgggtgctctgccggatctacaagaagtccggccaggcgtcgccgatgatgccgccgctcgccgccgactacgaccacgacgagccgtccggagtccttgacgacgcctacagcttctacgcgccgccgatgatcagcaccacgctcatccccaagctccccaagatcccctccatctccgagctcttcgacgagcacgcgctcgcccagatcttcgacaccgccgccgacccgccggccgaccaccatcagcatgccctcgccgtccacccctccctgaaccagctcctcggcgtcggcgacaacttcctcgcggagtgctacccgtcgacggcgtccacggccaccgttgccggcggcaagcgcaaggcgagcccggccggagactacgccggcggcggccacacgccggcgaagaggctcaacggctcatgcttcgacgtggcgccgcagtccgtggtgggcggcttgcaagcgacgccgtcgtcagtcctcgccggactcaaccaccagatgcttcctcctcagctattctgaatatattcttaactagcttaattaatggccatggaaatcgatcaaacgcagtcgatcgaatttacggatgctacgtactggcatgaacaatcttgccgacgatattaagatcggatggaagcatggacgacgatgatgattggggtacggtatagaattattgtagtattgaacaattaggcatttgtatgcgattttttctcctacgtattcatttcaggcacagtgcaaaagcaagctggagccttgatagtactttacaccgtagagagggaatgttgtacaattaaagattactagatatacagaacaataatactttactgtagccaattgatatactactagtatacaggattgtagaagatatcaaatgcaatagattctggctctgatctgggaaatggaaattgcatggatgtgtt

SEQ ID NO: 18200 - DNA, 1890 bp, Oryza sativa
  ref <308>: DATABASE ACCESSION NUMBER: AK068607
  ref <309>: DATABASE ENTRY DATE: 2001-12-06
gatctagcagcagctctagcttattactaccaccaccactgtactaccccgcacgacacggcgcgacacggcgcgacgcgacgcgaggaggtgagcgcggatgccggcggacgcggcggcgaaggggatgaagctggagaggtacgcgagcggcgcgggcgcgatgctgctgctgcggcgggcggcgagcgggaaggtcgtgtcggcgtcgtcgcacctgctgttccgcgccaccgtgctcgccacgatggcgctcgtgttcctcttcacgttccactacccgtcgctgctgtcgcgctccttcacgctctcctccggcgccggcgccggcgaggggggagccgcggcgcacgcctcgcaccggagcttgttcatgtcgtcgtcgtcggcgtcggcgtcggcggcgtcggtgtacgggggcgcggcgtgggagaaggaggtgaggcggagcgcgaagccgaggaaggacggggggatagccgtgctggtgaccggcgcggcggggttcgtcggcacgcactgctcgctggcgctgagggcgcgcggcgacggcgtgctggggctcgacaacttcaacgcctactacgacccggagctgaagcgcgcgcggcaggctcctcgccggccgcggcgtgctcgtgctcgacgccgacatcaacgacgcgctcctgctcgagaagctgttcgacctggtgccgttcacccacgtgctgcacctcgccgcgcaggccggcgtgcgctacgccatggaggcgccgcagacgtacgtggcgtccaacgtggccgggctcgtgaccgtcctcgaggtcgccgccaagcacgccgacccgcagccggcgatcgtctgggcgtcgtcgtcgtcggtgtacggcctcaacaccgacgcacccttctccgaggagcaccgcaccgaccggccggcgtcgctgtacgcggcgaccaagaaggccggcgaggccatcgcgcacacgtacaaccacatctacggcctctccatcaccggcctccgcttcttcaccgtgtacgggccatggggccgccccgacatggcctacttcttcttcgccaagagcatcgtctccggcgagcccatcacgctgttccgcgccgccgacggcgccgacgcgcgccgcgatttcacctacatcgacgacgtcgtcaagggctgcctcggcgcgctcgacacctccggcaagagcaccggctcctccaagtccggcaagaagtccggcccggcgccgctccgcgtctacaacctcggcaacacctcgccggtgccggtcacccgcatggtcgccatcctcgagaagctcctcggcaagaaggccaacaagcgcatcgtcgccatgcccagcaatggcgacgtgcccttcacccacgccaacgtcacccacgccgcccacgacttcggctaccgccccaccacctccctcgacgccggcctccgccacttcgtcgactggttcgccgactactacaagctcaagctcgacgtccccaagatcgccgccaaggtcgccggcgccggcaagccctcctcctcgtcggcctccaagaagaagaagaaggccgcggcgatgtcggcgtcatcatgatcaagcagcacaacaccatgagacaccatgcaagtgtgtattccatagctagttcttggaggctcttgtctgtataacattgtaagtgcttattgtttaagcccctattaatttcttttcttcttcttcttgaggtgtttaatttttagtgattagaaacaagggaataatggtggagaaataacactgttgttggtagataaatatgagaggggtatagagatgatgataaagatcaaaaacacttggaagccaggacagaaagaaagatgaagtcactggcttccttcgaatc

SEQ ID NO: 18201 - DNA, 1500 bp, Oryza sativa
  ref <308>: DATABASE ACCESSION NUMBER: AK068608
  ref <309>: DATABASE ENTRY DATE: 2001-12-06
gattccattccactcgccaacccgacacgtctctcatcttcacgcaacgaacagcagcagcagctcaagctaagctaagctaaagtactacgtgttctttcgtcttcgtcggcgccggagtttgattcgtcggagctagctagcaagaggaagaagaaaatgttggccatattccagaagcaggtggcgcacgcgccggcggagctgaacagcccgcggagcagcgcggcgaagcccaagaaccccgacgagatcctcagggacttccacgccctccaccccatcgaggccttctccacctccttcggcggcggcgccgccctcgcctgcgtcgccggccacgcccgcaatggcctctctggctacgagaggatgttctgtgggctggatgacatctactgcgtgttcatggggaggctggacaacctgagcagcctgatccggcagtacgggctgtgcagccgctccaccaacgaggcgctgctcgtcatcgaggcctaccgcaccctccgcgaccgcggcccctaccccgccgaccaggtcgtcaaggatctctccggctccttcgccttcgtcgtcttcgacaacaagtccggcgccgtcttcgccgccctggtaatttaaaccactactagactggttttctgaatcgaattgatgaatttgtgcttcaaattgaacttcctgtgagtgtagcgtggccctgtccccttccggctgttaggagttgtgtttagccgccgtagtagttcctaagcttcagtttctgattgttctgcttttctttttcttatatattgacgttcattcgctttgcgcgatgcagagtacggatggggaggtgccgttgtattgggggatcgcggcggatgggtcggtggtgatctgcgacgagagggagatcgtgaagggagggtgcggcaagtcgtacgcgccgttcccggtggggtgcatgttccacagcgagggggggctcaagagcttcgagcacccgatgaaccggctgaaggcgatgccgcgggtggacagcgagggcgtcatgtgcggcgccaccttcaaggtcgacaccttcaccaagatcaactccatgccccgcgtcggcagcgccaccaactgggccgccacctgggacgacgctgccgcctgatgatggcgctccgtacgccgtcgtctcgtcgccgtgcgcctgccctcgccgccggcctcctcgccgtttgccgccgccgctcatctcttcctcctcttcttcctcctctctatatccgatgtgcttctccgtccgaagcatgcagattattagagcgatatttgcagctagcgtggaagcgcgccaatctatttttctgcggtgtttttacttaattttcacctcttctttttaaatttttatgtccatctttgggctctcgcctctcggcaatgtatattctcggtcgcgggtggcatgtcatggtacatactatgaatgatgaataagaaagagtttgcttcactcaatcc

SEQ ID NO: 18202 - DNA, 1327 bp, Oryza sativa
  ref <308>: DATABASE ACCESSION NUMBER: AK068609
  ref <309>: DATABASE ENTRY DATE: 2001-12-06
gaccaccctccttccttccttccttccccttctctctctctctctccccctccctccgatctcgccgcgtccgtgtcccctcgccgccgcagccagcgtcgagggctcggcgaccggaggaggagaggccggaacccgccgccgccgccgccgcctccgcctgtagcgagatcgctcgatccggttcgcctcccgcgcgccagtccgccagcccagttcgatccgttgagggggaggggacgctctagtgtggggattgggggaatcgatggcggcgccgccggcgagggctcgggccgactacgattacctcatcaagctgctcctcatcggcgacagcggtgttgggaaaagttgtctcctcctacggttctctgatggttccttcaccaccagttttattaccaccatcgggattgatttcaaaataagaacaatcgaactggatggtaaacggattaaacttcaaatctgggatacagctggtcaagaacgtttccgaactattacaactgcctactacaggggagcaatgggtattttgcttgtttatgatgtcaccgacgagtcatcatttaataatataagaaactggattaggaacatagagcaacatgcttccgataatgtgaacaagattttggtaggcaacaaagctgacatggatgaaagcaaaagggccgtaccaacttcaaaggggcaagcacttgctgatgaatatggcatcaagttctttgaaacgagtgcaaagacaaacctgaatgtcgagcaggttttcttttcaatagcaagggatattaagcaaagacttgcggagactgattccaagactgaggatcgcacgatcaagatcaacaaaccagagggtgatgctgaggccacaactttgcagaaatctgcatgctgtggatcgtgagtgttatgttgtcggatggaagataaaatagtgatcatagtatcatacaacgcttgtaacttttatcctttgcctttcttgtgacctatcctcgtgcctcctttacgttaaaattgcaattgctggtattcggacttctgtgttcagttgtgacttacactggtaaaaaaaagtaactttgctgtagcacaataagattggtggagctgatgttacggtttccagaagttgtccatcaggagactactgggtagccatttcagttcagttattataggagtaaagggcagggcatgcaattctttcgaccattattactgggttccataggtttctttatttcttgattcgtcgtgtaacagcatatattcctgtagtgagacatacgtgccactctccgtacaaggttgc

SEQ ID NO: 18203 - DNA, 1837 bp, Oryza sativa
  ref <308>: DATABASE ACCESSION NUMBER: AK068610
  ref <309>: DATABASE ENTRY DATE: 2001-12-06
ggtggcaatcacccacatcacatgcagatcctccctaaaccactcgatcatcccgcccccactcctcctcctcctcatccaggtagatcccaacagccgatcagatctcccactccattattcgcctcgcccattgccccgtggccacgggcgaagccggagggaggggagagacgcggttcctcggtcgccatggacgggctcatcaaggggctgatcaacgtggcgatcgacgccgtcgaaggcgccggacgaggtgagcggggcggcgaggacgacgcgccgaggaggcaccgccccgcgcgggaggaggaggagggccgcggcgacgagcggtcgcggtcgacgtgggccgaggtggtctccgatcacaagggcggcgaggcggaggagcgcccggaccatcggaattcgaggcgggatgggaggcaagagaggagggaggatggggattgggagagggtggatggccggaagcagcatcagcacaaccagtatgaggaagagtacaggagggacagtagtagccgacgcccacagcagcatcagcaagcgccagcttacaggaggcagcaacaggatggagatgagagaaatgatggagggtggcagactgttggtgagaaaaagcatcatggaaggccacagcagtctgaagcatggaatgcatacagaaggccaccatctgaacaacagtactgtgaggatgctggtcagatccaccatggcctaaatgtagaaccaaccagggaggagctcaacagcttatcaagagcttgtagccggctgtgggaactcgatatgaaccgcctaacacctggtaaggactacagaatcgaatgtggcgaagggaagaaggtatatcagaagggtgatatggcatctgaaactttgttcagctggctaggcgatgatgtgcttagaaagcccacctactctcgtttctgcgcgcttcttgacaattacaatccacatcaagggtacaaagaagttgttactcagcaggacaagcacgaggaagtagcatttattgaagagattgccaggacagcgccaatcaagtacttacaccggtatttagtgctcaagggagtcgcgtctcaagactatgaggacttcaagagaatgctgacatcgctatggttcgatttgtatggaagaggtggcagttctagcagctcttctgcatttgagcatgtgttcgttggtgagatcaagggacgacgaggacagggagagaatgaggtctcaggattccataattggattcagttttacctggaagaagccaatgggaatgtggattaccaaggttacatattcccaaggaggcgtggggaatcgcctgattcagagacacagctattgactattcagtttgagtggcacggtgttctgaaatcggtatccagcactctgattggtgtcagccctgagtttgaggttgcactctacacgctctgcttctttatgggaggggaagataaccgcgttgagattggcccgtacggagtaaacatcaagtgctaccgaatgggaaacagcaaaattgggtcagcatttccaattgcagataactgaattcgttccatgcctgctcctgcgtgtatgtgattccttcagctttcagtttcacgaagttattagtgtgctgttcgatttggtcgtttacacaaaagaaccacattgttcaatttgttgtcacaatgtctctactgaaaattgtattatttggattaaccatgctgtacaagttgtagtcacaaagtcctgtaatttgtttttctcaaaacccgtaacaaaaaaatatcatctcagcacaaaaaaaaaatccttc

SEQ ID NO: 18204 - DNA, 2166 bp, Oryza sativa
  ref <308>: DATABASE ACCESSION NUMBER: AK068611
  ref <309>: DATABASE ENTRY DATE: 2001-12-06
ggactgctctccctctcctccccgtcttcctccctctcccggtctccccttcggttgccgcgtcaccaccaccaccaccgggtcactgccacgtgggccccacacccccacctccgcgacctcgcggccggtgagccgcactgcgcctcccctccgctgggtacaaaccgagtgaccgatctaccacctccacccaccgccatcccccccaatcccccccacacgccgcgagatctcccgcctcctcctccacccgccatggatctcctccgcgaccgccgcctcggcgcgctgctggtggtggtgctggtgctggtgagcggcgcggcggtggaggcgtcgatccacacctacgacagggagccgttccgggaggtggggaacgcgttcctcctctccgggggcagcgagggcgtcgtcgccgacggggccgacctcgccgcccccgcctcctccttcatcaagttcacgaatgttactttctggagaactccggaatcagctgaatcacatgcaaaaatggcacacagtacaggtctggtacaggccattttatttgaagcagctgacagggataacattgggggatctgcctatggtggacagaggtccatatgttgtacccctgaccttgctaaactagagggctgcaaacaaggggaagtaatcaggagaccatcctctgatgatcctgattggccttatgtgctagatacacacttcagtggtagtcacctttctgtgaagttagaagatgaggtagttcgcattaccaagacaggcatgtacaacttgttcttcatttcctgtgatccaaaactgagaggccttagtatgagtgggaagacagtctggaggaatcctggcggctacctaccagggcggatggcacctttgatgaaattttacgtttttatgtcactggcttatctattggtcatggttgtctggtcgagtcagtatataagattctggagggacatcatgccaatccagaattggatcacactaattattgcacttggcctttttgagatgacactatggtactttgaatacttaaacttcaacagtagtggtgtacggccaattggaatcacaacttgggtggttactgttggagccatcagaaaaacgatttctcgcctattgatcctttctatctcaatgggatatggtgttgtccgcccaaccctgggaggactgacctctaaggtgttgctccttgggctgacatatttcctggcttctgaattgctggatattgcagaaaacgttggaacaattaatgacatttctgggaaagcaaggcttttcctagttcttcctgatgcctttttggatgctttcctcatactttggattttcacttctctctcccgcacacttgagaagttacaggctaggaggagctcagtaaagctggatatatacagaaaatttactaatgcattggcggtatctgtaatagcttcagttgcctggattggttatgaggtctatttcaaagcgacagatccctttagtgaggggtggcagagcgcatggatcataactgcattctgggacgttcttgcatttgttttgcttcttgtgatttgttatctatgggcgccatcccagagctcacaaagatacgcatattcaggcgaagctgccgacgacgatgatgaagaatctcaatctctgacgaaggggaccgacggtgatgtagggatggtaaaggttgacaaggacagaagtggtggtgtcagtagtgctttcagcttggaagacgaggctgaggaggacaaaagagagtgacctgctggagcaagaatgctccaaggttcctgagctttcttcttctttttggtggtgatttgatcttctcttttgtaccttctcagttacacaggtcatgtagaagcgcaccattttatccattcctgcgaggatagtatgttcgtggtgttccatgtggagtttcacataggccaggatggtgcacattatttaaatgactacacattcacaacagtgtacatatctgtttttgttaccggttgtgcattgcctgatgtatcatggtatcatgtatgaaactggtgaacgcagtgtttgacagatctgtttgcctaattgactggaagttgcagatgaaaaatagccaaagtttttaatcct

SEQ ID NO: 18205 - DNA, 3038 bp, Oryza sativa
  ref <308>: DATABASE ACCESSION NUMBER: AK068612
  ref <309>: DATABASE ENTRY DATE: 2001-12-06
gcaggctgctctcgccctctcctccccctccccctccccctccagtcccctcgcgaaaccctaactgtctccccctcctcctcctcctcctcctcggggtagatcttcgcgcgggctctcccgctggggcggcaccgcgcgcgccccgccgtgatggcgtcggacggcgcgcagatggaggtggagcggcggcttcgcgacatcggcgcccgcttcacctcgctcccggacgccgacgacgagctgctcagattaatcgaggaggcagaaacctggttggccagggttgaccagtcgccgccggagagcatgcacaaggctctccggccaacaatgagtgctctgattaagaaggagttactggatcacagtgtccctgacataaagcttgctgttgcctcctgtttaacggaggttaccaggatcactgccccggaggccccctatgacgatgatgtcatgaaggatgtatttaccagagttgttgaggcctttgagaagttggatgatatggaaagcccctcctatgcaaggagggttgcgatgcttgaaaccgttgcgaaggtccggagctgtgtcttgatgctagatcttgactgcgacgatctgatacgggacatgtttcaccacttcttcagaaccatatccaatactcatcaagagaatgtcatcacctcgatggaaactgtgatgaagtttgtaattgatgagagcgaagatgtccagcaagatatgccatcctgcctgcttcaagatctagcatcttaccttctgaagaaccttaaaaaggaagaaaaagaaactcttccagcatctttcgaacttgcagagaaggtaattaataagtgttatgagaagttaaagccagtgtttactcctttacttcggggcactcccttggatgagtacagcgaagttgttacatcattgttcgaagatgctttagatgctggagtagccgacaattctgatgcccctggaaaggatatggtggctgatgggaaattatctcataagattgtttcagatgagtcagctcaggaatcatcaaaattagagcaagatgccaattgccctggaaaagacggtactcctccaaacaatacttccacttcggcggttagcaatggttgtgctttaatagacagggtcaagtctccaagtggaccatcctcttctgataagaaggctgaactgccttctgatgacaatcaggcaaaagacactgatgatttgatatccggtgctaaagaaataccagaaccaatcaccacagagcctgaaaagccatctgatcacaatttaaagaaaagccataaacttgatacttccactgattctgaagtggttgatcattctaaggctgttaacaacaacgaggatattttagtctctagggagttatccccagagactgatgatggggataataagctgccaccagagactgggaatagagctgctgatgacaaatcgaaacatgttgataacacacctgctggcaagggaaagcggggccggcctcctgcatcaaagtcgcatgagaagaagaatgttggaaaaggcaaagtatcaggtttagagtctaaaaaagctgacgcagttagtgattctggtggaagggctacaaggcgactagctaaagatgatgatatcaagtcttcattcaaaaagactggtgaaggggaatcttcgaagaagaagcagaaggaaaatttgaaacagcaggaagatactccacccgatgaagacactgatgaggatctcagtttaaaggatatcgtatctcccaagtcttcggccaaaacaggtaaaaacaaaggccaggcaggtgacagtgggggctcaaaaaggaaacgtgcacaggaagctgaagagactccccagcccaagaagaacaaaattcttaaaggaaatcttgttggctcaagaatcaaagtgtggtggcctgatgacagaaagttctataaaggtgttgttgagtcatttgatgttgcttcaaaaaagcacaaggttgtttatgatgatggagatgttgaacgcctacaccttaagaatgaaaaatgggaattcattgatgaggggcgagacaacaatcctgacgcatcgtctgatatgccgcacggcagaaggggtagagttagcttgggtgagcaaacaaaggaaggaaaaatagaaacacccagcagtgggaaacatcgtggcactgatgtcgctgatcctcccaagaaaagaggacgccctaaaggtgtgcgctccagcaatagttcacaaaatgatgacagtcctttgaaggggaaaagtgcagaaaacgatgatgaagatatatccaagacacctaaaagtggcagtgccctcaagaatgaaggtggaagatcatctcgatccactggcaagacaaaggatggcctgctaaagggaagcaacaaggatgagactggtaacactaaaagcgcaagcaaatcaaaaaatgatggtggcagcaaacacaaggattcaaaagatgaagctaaatccagcggatcaaatccaaaaggtgcaagcactcccaaagctgctgatggatccaagacaaatggtctttcgaccaaaagaaagcaaaaggagaaagaaggcgagtcatctgaagaggaagagcatgtgtctgctaaaatttctactggaaagaagcgcagaaggaaggctcataactaatttgctctggccttgtgcagttcttccaaggggtacttatgaggcatgcagtctgaaggtttttggcatgagcagcctagcaatttatatggcttccatcccttggctggttgcctgccaagtcttgccctaatcgaccgtcacgaaacagctggtagttgtagcagttgcagtggtagttgtaatgtaggtgttacttttgttccttgtggtcagctgtgagcctctagcaatatggtttcttgcttgctgtcgttcaacccttattagattgtattttctgctggagctatttgagacgtcaattttgcagcaagcatgaatggagagaaatgtcgtagttc

SEQ ID NO: 18206 - DNA, 1641 bp, Oryza sativa
  ref <308>: DATABASE ACCESSION NUMBER: AK068613
  ref <309>: DATABASE ENTRY DATE: 2001-12-06
ctcgtctccgccgtcgccgcgcctcctcctcctcctcctggtggcggtggcggcgacgctgctccccgaggcggcggcgctgggcaacttcacggcggagtcccgcggcgcgcggtggcggtctcgccgcgcgcggcgccgcgccttcgagaacggcctcggccgcacgccgcagatggggtggaatagctggaaccacttctactgcgggatcaacgagcagatcatcagggaaacagctgatgcattggtcaacactggtctggcgaaattggggtaccagtatgtgaatatagatgattgctgggcagaatatagtagggattcccagggtaactttgtgccaaataggcagacgttcccctctggtatcaaggcactggcagattatgtgcatgcaaaagggctgaagcttggcatctacagcgatgccgggtcacaaacatgcagtaacaaaatgccaggatcacttgatcatgaagagcaagatgtcaagaccttcgcgtcttggggagttgattatctgaagtatgacaactgcaatgatgctggcaggagtgtcatggaaagatacactagaatgagcaatgccatgaagacctatggaaagaatatcttcttctcactctgtgaatgggggaaagaaaatcctgctacatgggcaggccgcatgggtaacagctggagaacaactggcgacatcgccgacaactggggcagtatgacatctcgtgcagacgaaaatgaccaatgggctgcctatgctggacctggtggatggaatgatcctgacatgcttgaagtgggaaatggtgggatgtctgaagctgagtaccggtcacacttcagtatctgggcactagcaaaggctcctcttttgatcggatgcgatgtgcactcaatgagccagcagacgaagaacatactcagcaactcggaggtgatcgctgtcaaccaagatagtctaggtgtccaaggaaagaaagtacaatctgacaacggattggaggtttgggccgggccactcagcaacaacaggaaggctgtggtgctctggaacaggcagtcataccaggcaaccatcactgcacattggtcgaacatcgggctcgctggatcggtcgcggtcactgctcgtgatctatgggcgcactcttcgttcgcggctcagggacagatatcagcatcggtggcgcctcatgactgcaagatgtatgtcttgacaccaaactagtcagcaaagaaaagcagcacaggatatcaaaatgagacgacatcaccaacggccaacatcctcaagcaacaccgcctcaccaacggccccgtcgagctccagatggaccccatcaccacctccgatgaccacgacgacgacgacgagctcatcatcgataggaggggctggatgaactggaggacgccggagaagagggcgaagaggatgctcgaggaggaacaggaggagctggaggacggagccagatggaggaataagcttaaggaggaagcttaattaattatgtggcttagtaatttgcaagtttctttgtgatccagctatcctatactccctccatctcaaaaaaaaaaaaaacaacctaataagatgggacataatctatatcctatcctattctgact

SEQ ID NO: 18207 - DNA, 3151 bp, Oryza sativa
  ref <308>: DATABASE ACCESSION NUMBER: AK068614
  ref <309>: DATABASE ENTRY DATE: 2001-12-06
gacacgcatcatcaccacgccacgcgccgcgagatgctgcttcggcgggggcgcccaggcgtggcgcctcccgaattccggcggcttcgacgtcgccggcgacgcgcgcaagccaagcgacagttgcggaggcaagcaaccccccaagttccgtcccttttgcgcttttctgggacccatttcctctctcttttggggggcgctttcgcggtgacgacgctgccgatgcgcgtacgcctgaggagttcttccccatcacgccgcgtgggggatcgggacgtcgccatttccgctgccgttttcttctctttggggggttgcaatctcgcgtttcatttgatagggttgggcgtgggcggtggggaatggggatgggtaggtagatggcaccgatgtgaatcggacgacttcgaatcgaagccttccgatccatgtgaggaggttgaggaaccaacctaatttcgaatcgaagaactcttggtttctctacctaaaaccaaatagcatagtgacagtggtcgttatactatgaattccaagctttttgaccgaagatttcgaatcatcgagcatctttggccaagctattctaacacggttgactcagaagtctacgtttctatgcattgtgtatttgagtgttagttactatatttcgtgataaacaaaactgttgactcaaaagtctacgtttatatgcattgtgtatttgtgtgttactgtatttagtgataaaccttaggtgtacatgtgagggatttcatggataacacgtgcactacattcttgcctgttccactggtcaccatcagcaaatcgctcctgtccctttcgtgtggctatcactggagctattcaattcttgaaaggctctgccgtgcaagcaaaccgttttctttccaatgggataagtgtgtgactgtgctataatctcaggataaattcatcactaaatcgttgctatcagttttggtttatccactcattaaatcaatgcaacaaatgtggtgatcaataattagtagtacttgtttgttggtatgccgtgctgccaaactagttggataacaaagattcctattatattggggttaaccactgtattttcctaatcataattttttaggctccttattgtcattatcacttagcatcattgcataagagaaaaaaaaggggggtcaatactgcaggatggtattttaggaaggaaatgtgttatcgtgatattaacacagcctttcttccatgttgcttgcactcctctcaaactggtgtagcttcctaaagactggctcagttacacaatttttattcttaaatgctggaatcctgggaaatccttaatgcgcctggaattgttgcactcaagtaaagctttagtttgctacacccgtgacactttcagagttggacatgtcaaagtttccttccctttttgataaaatgtccagtgtgatagagatattgcaacctgtcacctccacaagagctacttagcagagacgcgcgttggattccaagacaagtgatgatcagccttcagttgcttcccacaccccaccaactcaacaagcttttctgcctgtgttgaagctataagcagagcagacttccctcccggttttatctttggcacagcttcttcagcttaccagtatgaaggtgccgtgaatgagggccaacgtggacctaccatatgggatactctcacgaaaagaccaggtcgggtgattgatttcagcaatgcagatgttgctgttgatcactaccatcgctacaaggaagatgtggagttaatgaatgacatcggcatggatgcataccgcttctctatctcatggtcacggatctttccaaatggaacaggtgaacctaatgaagaaggattgagttactataacagcctcatagatgccctgttagataaaggcatagaaccatatgtaactctcttccactgggaccttccccaagcactcgaagacagatacggaggctggttgaactcagaaatcatcgaggattttgttcagtacgcgtttacttgcttcaaggaatttggagatagagtgaagcactggatcacttttaatgagccttacaactttgcgattgacggctatgaccttggcatccaagcacctgggagatgttctattctgtcacatgtgttctgtagagagggtaaatcatcaactgaaccatatattgtagctcacaacatacttttagctcatgctggtgcttttcgtgcttatgaacaacatttcaagaatgaacaaggaggcctcattgggattgcgcttaattctagatggtatgaaccgttctcaaatgccgatgaagacacagaagcagcagcgcgagcaatggactttgagcttggatggttcttggatcccttaatgttcggccactatcctccttctatgcagaaacttgcagaaacgatagattgcggatcaggaaacttgtaatggatgatgcttcaaccgattctgctgtcataccaactgcttatagacatgggaagaaaataggagaagcggcagcatcaagttggctgcacatagttccatggggtatgttcaagctgatgaaacatgtgaaagaaaagtatggaaacccgcccgtagtcattactgaaaatggtatggatgatgccaaccacccattttctagattagaagacgtcctacaagatgataaaaggatacagtaccacaatgattatatgtctaatctcctggatgctataaggaaagaaggttgcaacgtccatggttactttgtatggtccctgctcgataactgggaatggaactcaggctacacggtgcgattcggtctctactacattgactacaagaacaacctgacgaggatacccaaagcatcagtccaatggttcagtcaggttttagcccagaaaacagctatcatataggtagagcacaatggttcaggattcaggaatgaccatgaagtgtacattattaccaccctttgcataaagctacatacattaggagttgaagtaaaaatgtaaacataagattatctgatatgaccgtcaacgacgccgttgactgccgttggtgtacgttcttgtcacagaattcaacaggaaagttgagcccatgttgtc

SEQ ID NO: 18208 - DNA, 2333 bp, Oryza sativa
  ref <308>: DATABASE ACCESSION NUMBER: AK068615
  ref <309>: DATABASE ENTRY DATE: 2001-12-06
ggtacgcagagttagggtgttgagtcgaaacaacagtcgccgaactcgtcggcaaaatccctccggtgaagctcccaaacccaaccactcctatccctcaatgccggcggcgatggccggcggcacaggcggcgctggcggcggcggcggtagggccctcgattgccgcagcttctggaaggccggcgcgttcgagtccgcctccgccccctcccgcgagttccacgatgcgcttgtggcaggggatttcgatcgcgcgcgcgttcaccccaagtttctgcacaccaacgcgacctctcacaagtgggcattcggagctatagctgaacttcttgacaatgcagtagatgagatatgcaatggtgccacatttataaaagtggataaaagcgtcaacctgaaagacaatagcacaatgctggtttttcaagatgatggaggaggaatggatcctgaaggggtacgacgatgcatgagtttaggattctcaaccaagaaatcaaagaaaaccattggccagtatggaaatggctttaagacaagcacgatgagacttggtgctgatgcaatagtgtttactcgcgcaaaccgtggaagtaatgttaccttgagtattggtttgctctcttacactttcttgaggagaacaatgaaagacgacatagttgttcccatgctcgattttaaaatccaagatggccacattgtacctttggtgtatggttcacagggtgattgggatagcagcttgaagataatactagagtggtcccctttttcttcaaaggaagaactgctacaacagttcaaggatattgttagtcatggaactaaggtggcaatatacaatttatggatgaacgatgatggtcttttagaacttgacttcgaggatgatgatgaggacatattactcagagatcaagataaagccagtgggggagtaacaaaggcccaaaaagaaattgttcagcaacatatatcccacagactcagattttcattgcgagcatatacttccatcctttaccttaagaagtttgaaaatttccaaattatattaagaggaaaacccgttgaacagatcaggattgctgatgaactgaaatttaagaaattagttacttacaaacctcaagttgcacatgattctcaagtggtctcagtgaaagtcgatgttggctttgcaaaggaggcacctgttctggggatttttgggatgaatgtttaccataaaaatcggctaataatgcccttctggaaggtccttcaagagggatctagtagaggaagaagtgttgtcggtgtactggaggcaaattttattgagccggcacatgacaaacaagattttgagagaaccccactattcattcgactagaagctaagcttagacagattatccttgattattggaaagaaaagtgtcatttaataggttaccagccagtggatccacaattaagatcccagtataaggctgctctcaaagattcagggaatcctggacctaagtctcagcagaaagcttccactagtaggaggacaggagggcatacatcaaatttgctaccagagacatatgatgataccgaagtcattggactgacagccaatggttcaggttctcgcgtacgatcatttggccaagctcaagaaaacagtatggagccagtaggcttggatgagaattcagtagatattggctctgaaggtgcacttgatccctatatcatggaaaagctgagtgaagaaaacatcggtctgttcacaaggcgtgaagaacttcgacaacgagatacacagttgaggcaaacggttggggagctagagcaacaaatagcggagacaaaaaagaagtgtgctcagcttgctgatgacctgcgtataaggaagagccagcagcagcagcagcccccttacatataaaggttaatttatcggtggaccacagaggtgctaacaaacgaccaaaggtgtgatgtgctgatcttgctagcaattttgccagtagaaaagtaggttagctcatagttaatccagcagtacagtcacgtcaaagaactgtagaagtaagttaaaatcgagtccaccaatgctacggtatctgatgtatagatgaagtgacttctgtgactcgtgctgatgtgcttcaactgtaattatcagactcaaatcccatgcagattactgtccatcgcattttttgcgtactgttccattccacaccagagtacgggttttttttatttatggttgaacctataacaatggcaatgcaacctgaatgaaaacactagtgagatgagattcctgaatgactcagaagccg

SEQ ID NO: 18209 - DNA, 1362 bp, Oryza sativa
  ref <308>: DATABASE ACCESSION NUMBER: AK068616
  ref <309>: DATABASE ENTRY DATE: 2001-12-06
ggcattttccggcttgtgtacagtgcttgcagcagaataccatggcccgctgcttcgtcctcaacaccggcgccaagatcccgtcggtcgggctcggcacatggcaggccgagccgggcgtcgtcggcaatgccgtctacgccgccgtcaaggctggttatcggcacatcgattgtgctcaagcctacttcaacgaaaaggagattggggtcgctctcaagaaagtgttcgacgagggcatagtcaagcgcgaagatatattcatcacctccaaactctggtgcactaaccatgctccggaggatgtcccggttgcactggacagcacgcttcaggatttgcagaccgactatgtggatctttaccttatccactggccagtgaggatgaagaagggcgccggctttggcgggcaaaacgtcctcctgaccgatatcccggcgacgtgggcggcgatggagaagctccacgactccggcaaggctcgcgccatcggcgtcagcaacttctcgagcaagaagctggaggacctgctcgccgtcgcacgcgtgccgccggccgtcgaccaggtggagtgccacccggtgtggcagcagaccaagctccgcaagttctgcacctccaaaggaatccacctctcagcgtactcgccgttgggctcgccggggacagcgtcggtgaaagcggtgggcaatgtgctcgcgcacccggtggtcgtctccacggcggagaagctggggaagacgccggcgcaggtggctctacggtgggggattcagatggggcacagcgtgctcccgaagagcacccacgaggagaggatcaaggagaacattgacgtctatgactggtccatcccggaggacatgttcatcaagctctctgaaatcgagcagatgaagctgatccgtggagaattctggactcacccggaaggcgtctacaaatcaatcgaagagctttgggatggcgaaatctaatgatcgacttggctggactgaagtttgctttcttcgtgtgggtgaaaaactggaaactgccattgctgcaaataaagtggggaaatgttaatcaatgaatgaataaaaggagtttaagtctacagctaccattttgctggtactggcgtgtatttttacaagaaccggaatccagaatctttaccggcaaaattatcagtaatttggacatttgtttaaaagaaggctttatcacagattttggatgtagtttgacgtctgctttcttctgctcactcgctcagttccttagtaacctgcgatacgtttttcctaggtgtaaatgtaacttttgtgtggctaactaaagcatgcctattcaataaagtattttaaaacatat

SEQ ID NO: 18210 - DNA, 3125 bp, Oryza sativa
  ref <308>: DATABASE ACCESSION NUMBER: AK068617
  ref <309>: DATABASE ENTRY DATE: 2001-12-06
gggctgtcacgcacgcacgcgtgggcgcgtagcaaagcaaagcagcgaatccggcttcactagtcttcttcccccccgccgccgcatcgatcccccttcccctcgtcttccttccctttcccccaatcagattgcttccagaagcctccttccccgcgaagcaaccaaccccttccggatcccgactccatccaaacccccatcccctcccctctcccctacgctcgaaaccctagggagatccatccacatgccgccccgatgaggtcgctccgccgcgtcctcctccagctcgtgctcctcgccggcgtcgccttccgcggggtccgcttcgacgacgccgccgacgccgccgccgccgcccaggggtcgtcagacctcttcgagctcccttcgccgtccccgactctcgcgctccccggcggcggggatgagggggcctcgacggagatcatcgccgcgccgtggccggggcgccacggcctgttcacgccgccgcggagcacgtcccagccggcgagagcggtggtccagccggccgccgacttcggctcccaactccagttttacgacaatggtacaattcaactagtggaccttctatcaaaattgcctcggtggcagttctccaccggaccccctctttcgaagcatatcactacttcgaaacctgatttgaactatgtcatataccttgatgggtcagaaacatcggaccttatagaagttcataatggcagtggtgtgagacttccctggaaactggaggagtttattgctgagactccatatatacgggattcttttgttacgattggatcaaaggtttcaactacttttgtggtcaatgctgatagcggtgagatcatttacaagcatagcttgccagtggccttgaacgaggtaggtggccccctggttgaggaaattccatccaagttagatgctgctagaagtggtacaagtgctaatatcatagtggttgtgagaactgattattctatcagtgcatcggatcttggggaacatttgttcaactggacaagaacttccttcactgcaaattactatgcgaggtatggccaccaagacatgcttgcccaatcgtcctgtctgcgaggaaatattccatgcattaggactgagggtccaccaattaaactttatttacctgattcaagttcagataatgcaattgtcttgagacctgtgaacgaagtttctgctgtggatgctctggaaccacttctacctccaaagaagttaccacaacctgctggcgagtctaatgtggccttggatagtgctcaaaaccagactgctgacattgccctaggtcattttgtgcctgctgacactgaattgaccaacagtgtcactaaattttcttacagatggctattccccacgtttctcatgttgttgatcatggcttgtctagtgaaattggccgatgcaagcaaatattgcaggcaatttgtgattcgatttttgaagccatttatgcgtgatgagaaattgatggacccaagaggcaaatcagagggaacatcaaaaagaaggaaggcgcggaagaaagatggacttatcaatagcactcagatcttttcagcatctgataaagaggggaatggaactggtggatcaactgaggcacaaagtaataaagcacatgattcaacaaatgtggaactccctaatggcctcaatgggcgtcagattggtaagctttgtgtttacagtaaagaaattggtaaagggagcaatggtacagttgtctttgaaggctcctatggtggtcgggaagttgctgtgaaacgtctgctgcgctctcacaatgatatagcctcgaaagagattgagaatctgattgcatctgatcaggatcctaatattgttcgaatgtatggttttgagcaggacaatgattttgtttatatctcccttgagaggtgtcgctgcagcttggctgatctaatccaactgcactcggtaccaccattttcaaatactaagggaacagacattgaactttggaggcaggatggacttccttcggcacaacttctaaagctgatgagagatgttgttgctggtattgtgcatttgcatagtttgggaattatacatcgtgatttgaagcctcagaatgttttgataagcaaggaaggacctctcagagcaaaactttcagatatgggtatcagtaagcgtttgcaggaggatatgacttctgttagtcatcatggcactggatttggaagctctggttggcaagcacctgaacagcttcgtcatggtcgtcagactcgagccatagatttatttagtttgggctgccttatattctattgcattactaaaggcaagcatccgtttggtgagtactatgaacgggacatgaaaatcataaacaatcaatttgatctcttcatagtggatcacataccagaagcagtgcatcttatttctcaactgttagatccagatccagagaagagaccaacggccgtgtatgtgatgcatcatcctttcttttggagccctgagttgtgcctttcatttctacgagataccagtgacagaattgagaaaaccagtgaaactgatctcatagatgctttggaaggcataaatgttgaagcatttggtaaaaattggggagagaaattagatgctgccctgcttgcagacatgggacgttatagaaaatatagttttgagtccactcgtgaccttctaagattgatcagaaacaaatcaggacattacagagaattttcagatgatctcaaggagctacttgggtcgctgccggagggatttgttcagtatttctcaagccgattcccaaagctgctaattaaagtctacgaggtcatgtccgagcattgcaaggacgaagaagctttcagcaaatatttccttggaagctcggcgtagctgtaacctgcaggaggggtgaaggccctgccctgcctagtgtgtacactaacactcttctagcaaaaatgtatgtacatgtgatttgtaccatatatcatagggtaaagaaagttcagcctgtacattgtattccacagaattgtgtattacttatagtaaatcaaatcttttacctgact

SEQ ID NO: 18211 - DNA, 2671 bp, Oryza sativa
  ref <308>: DATABASE ACCESSION NUMBER: AK068618
  ref <309>: DATABASE ENTRY DATE: 2001-12-06
tggccgccgccaccgccgcccgccacctcgccgccgaccagacgagccgccgtttgacccaacaccgagctcccgcgcggagttgatgtccatctccccttccgaatccaccagaggatcccagccgctcgcgccgcgccattccaaccctagccccggaccccgccatggcaacagctccgccccaccgcgccgccgcggccgacgctcccctacggctcccgtctcaccgccctcagccgccggcgggagcggcggcccgagctccgtctcggtggttccagctatcagagaatatgttgatacttcccaaaaggtagttggattcagaatctctagagaagagaatgatgattcatatacccaagaagttggcaatttttctgaatgccactcttctgaacatgggaattcaggtttttcagccaataatggcacctcaggccaggcaactcctcagagacctgaattgatggaatccctgaagattgatctatccactacaaattctagtgggaatggtactcaggtgactgctagaaagaatcagtctgtaaatgccaattatctgctgaatttccactatgatccaatttctcggccacagcctagaggccccagaacatatcctacaagaagacagaggaagatcagaccatacaacaaagatttgttcctacaagcaaattttaagtttgttgtgttggatactggaagctatgaaatagaattaatggatccagataagatgctccagtgggaagatattgtatgtgtaagatattatagcccttgtgaggtgcaatgccctatttgcttggagagcccattgtgcccacagattacatcatgtggtcatatatattgctttccatgcattttacgttatttacttatgggaaaagaagattacaaaggtgaaagctggaagaagtgcccactgtgtttcatgatgatctcaacaaaggagttgtatacaatctatattactcaagtccagcattttcatgttggtgacaatgtgacatttacacttttgagccgctcaaaaaattcactcactccttctattaagaacctcactgatgaatctactatagacgaagatccttgcagtgcattctccaagttcattttgacgtctgatgtggaactttctgttagagaggcaaaaacagatcttgttaattggttgcatatggcagatttaggccttgtgggtgacttggagaaacttccatacgtttctaccgctttggagcagctagaagaacggatgaaatattggagtgagtacagaaattttagtgtcagccctcccctaaaagacagcttctcacctgtaactagttccaaatcaaggaaccctaataatgcacaatcttcacgccagaacagtgaacacaagctatctcctctatcagatgaagatatgattgctggtgtttcggagctctgtatttcacctgaatcaaataaaatctttaataaaggaatgccatcgaaaacagaagagagatgtatggctcccatagattcaaatgagaatgatacttataatttttaccaggtatctgatggccaacacctaattcttcatccgctaaacatgaaatgccttataaaccattatggaagttctgatatgctcccaccaagaatacatggaaaaatcttggagctagaaactgtaacacaatccgaagctacaagaaagcgctatcgttatctaagtcacttctcattgacaacaacgttccagttctgtgaaattgacctgggtgatatgctgcctcctagctcattagctccattcatggatgaaatcaagaagcgagagaaacagaggaaacgaactgccaagaaggaagaaagcgatagagtgaaagccgaagttgctgctgctgcacaggcatctgcaatgctgtttgaacatacaagcttctctcccagtagtgggccacatggcgattttatgttctctctggatgactttgaagctcttggaaacaatgctggaccctccacgagtccaccagccagcgaaagaaagcttttctccgatgttgcacggcttggctttgcgtctgcccaagactcgcctcctctaagagttgaatctggggatttgactggcaaaagtgaaagcacgggggaacaagggccagccgcaacacccgcattatcctttgccagcatcatttcctccactagagcgtcagacaatagcctggacacgcacaaaccaaatgtagtcgggaagaaaggcaagaaacccaccaaagtgctcttgtccactggcggtggccgccgatactgaaggaagagtgacactggaatggaagcagttgccagttggctgtttcctataagcagtgtgtatagtgcataacctggacttcacatctgtaacactcccaagtcccaagtagcagctttttctcccatgtggtttgatctaaatcgcctgactgttttagaaggttttttactgtgtatctacatcctgacccatgctaagggagtaagggtgactgccctgtcgcaaaatgagaagagctatgtaaaatttgataaataatgatgctaaggatcatgcgcaatactttgctcaatgtacgtcgacgagttgatccgtcataggctgatacagcctgctgtttaaatcgtg

SEQ ID NO: 18212 - DNA, 1267 bp, Oryza sativa
  ref <308>: DATABASE ACCESSION NUMBER: AK068619
  ref <309>: DATABASE ENTRY DATE: 2001-12-06
gatcactgaccactccatcagtccaccacccaccttccccgaccttatctgcgacgagacgacggcagcgagctccaccaccaccaccaccaccacctcctcctcctcccggcggcgaccgcctcggctgcgcccactccggcggcgcgcggcgacgaatcaccgggccgcactatccggcaaggatggcgcccgccgcctccgcctccgcctccgccgtcgtcacaccgtcctctttcagatgcgtccccacggcgtcgtgcggtttgggggcccggggtaaagcccccgcgccgcgccggcttctccacgaccacgcgcaaggtaaaaaacgggctgcggcaacttggtccttgaaggctggtctgtgggactcccttagatccggatttttgaagagtaataacagtacagagacagtagagccaccatcagcaccaattgaagaggaagaacctttgcccgaggaactagtactcctagaaaggacacttgctgatggcagcacagagcagatcatattttcttcagctggagatgttaatgtgtatgatctccaagctttatgcgacaaggtgggatggccacgcagacccctaaccaaaatagcagcatccttaagaaacagttacctggttgctacactacattcagttactatgccttcaaaagcagaaattcatttttctagatgatgaacatcttagtgtacttgtagaagttatttgacagagggagaagagaggaagcaactaattggtatggcgcgagcaacttcagaccatgcctttaatgctaccatttgggatgttctcgttgacccttcatatcagggtcaaggtcttggtaaagcgttaatggagaaagtaatccgaactttgctccagagagacatcagcaatattacgctgtttgcagataacaaagttgtagatttctacaagaacttgggattcgaagctgaccctcaaggcatcaagggcatgttctggtaccccagattttagtgccagcggcctgacaccttcctgttcatcagtaatgcctggttctcaccgcccagggaccatagttttgtccagttgagtcgagctcagctgtgtaacagcaactctaactgaatggtggtgatatctgcaatatcttgttgtctgcaccacgagccatacaaattcagctgaattttcgagtcaaccttgtactgaaccaaacaaaacacttcttattgtcactagcaaaactgcaaagatccctgaaaaattcacct

SEQ ID NO: 18213 - DNA, 1997 bp, Oryza sativa
  ref <308>: DATABASE ACCESSION NUMBER: AK068620
  ref <309>: DATABASE ENTRY DATE: 2001-12-06
tgggctgcgtgactgtgtctgcgtcgcgtctcctccacttttaaaacccccaacgacgctcgatccgagattaattgtgctcatactgttcgacgaattgacaccatctgcacacctgcacctgcacctgcacggccgtggctgtggacttgcagttggagctagtagctagctcggggagtagtagctaggtgtagttcatcggatcaagggggggatggccacggcggcggcttgcatctcgttcgcgtcgccgtcgccggcgcgcgtcgtgatcaggcggcagacgcgggcgtcggcgtcggcgtcggcgacggaccggcaggaggtggtgtcgccgaagcggcggctgccgctgcggaaggtgccgggggactacggcccgccggtggtgggcgcgatccgggacaggtacgagtacttctacggcccgggcggccgcgacggcttcttcgcggcgcgcgtccgcgcgcaccgctccacggtggtgcgcctcaacatgccgcccgggccgttcgtggcgcgcgacccgcgggtggtggcgctgctcgacgccgcctccttccccgtcctgttcgacacgtcgctcgtcgacaagaccgacctcttcaccggcaccttcatgccgtccaccgacctcaccggcgggtaccgcgtcctctcctaccttgacccctccgagcccaaccacgcgccgctcaagaccctcctcttctacctcctctcccaccggcggcagcaggtgatccccaagttccgcgaggtgtacggcgacctgttcggcctcatggagaacgacctcgcccgcgtcggcaaggccgacttcggcgtccacaacgacgccgccgcgttcggcttcctctgccaggggctcctcggccgcgacccggccaagtcggcgctggggcgcgacgggcccaagctgatcaccaagtgggtgctgttccagctcagcccgctgctcagcctcggcctccccaccctcgtcgaggacacgctcctccactcgctccgcctcccgccggcgctggtgaagaaggactacgaccgcctcgccgacttcttccgggacgcggccaaggccgtcgtcgacgagggggagcgcctcggcattgcacgggaggaggccgtgcacaacatcctcttcgcgctctgcttcaactcgttcggcgggatgaagatcctgttcccgacgctggtgaagtggctgggccgcgccggggcgcgtgtgcacgggcggctcgccaccgaggtgcgcggcgccgtgcgggacaacggcggggaggtgacgatgaaggcgctggcggagatgccgctggtgaagtcggcggtgtacgaggcgctgcggatcgagccgccggtggcgatgcagtacgggagggcgaagcgggacatggtggtggagagccacgactacgggtacgaggtgagggaaggggagatgctgttcgggtaccagcccatggcgaccaaggacccgcgggtgttcgcgcggccggaggagtacgtgccggacaggttcctcggcgaggacggcgcgcggctgctccgccacgtcgtgtggtccaacgggcccgagacggcggcgcccaccctgcacgacaagcagtgcgccggcaaggacttcgtcgtgctcgtcgcgcgcctcctcctcgtcgagctcttcctccgatacgactccttcgacgtcgaggtcggcacctccacgctcggctcatctgtcaccgtcacctcgctcaagaaggccaccttctgaccaccgccggtcaaagtctccggcgcccggtcatcttattttccgtcctcttcttcttcactaaatattttagtagtattagtaattttttcactctgtatggtgtgatcaatcagcttgtacggatacggagttgcactggtagtgattttctttgctgagataatactagtagaagatattttttttcacaattactttaaaaaatcatattaatatatttttcaaatttattttaact

SEQ ID NO: 18214 - DNA, 805 bp, Oryza sativa
  ref <308>: DATABASE ACCESSION NUMBER: AK068621
  ref <309>: DATABASE ENTRY DATE: 2001-12-06
ggcagagagcgcagacgcgagcgcagcgcaaaagatggcgacgatgtccctcgccgcggcgtcccccctcgcctcgactccccgtgggctcgccgtctccactccccgcacggccttcctcggcctcctgaccggaggggcgtcgctggcgccgttcccgggactggcggcggcggcggcgccgccgcggctgccagcggggaggggcgacgcggccgtggccaggatggcgaagagggagcaggagctggaggagattcgggccatgccgacggagaagatcgaggaggaagtggtggacctgaagggggagctcttcatgctccgcctcaagcgctccgcgcgccaggagttcaaatccagcgagttcggccgcatgcgcaagaggattgctcgtatgctgactgtcaaaagagaacgggaaattgaacaaggaatcaacaagagattgtctaggaagcttgacaggaaatggaagcaaagcatcgtggttagaccaccaccatctctaagggagaacaaggaggaatagagagccacaaaagcagacagtctgtagaagtcatttcatgcatgtcttgaaggaaggtttctttctccctgtggtttcattccttataatggattgatatgtaattcacattaactgatttccaagtccttgctgtcaaaaccaaaagttctattaccaattccatttgtgtaaatttcagtttattcaaaatgtgttgtccatatatgcacttatattactgatatatgaaactgtgcttaacgagtgtatgctatacacttgttgaaaccc

SEQ ID NO: 18215 - DNA, 3606 bp, Oryza sativa; identical to SEQ ID NO: 15211
  ref <308>: DATABASE ACCESSION NUMBER: AK099062
  ref <309>: DATABASE ENTRY DATE: 2002-08-28

SEQ ID NO: 18216 - DNA, 2188 bp, Oryza sativa
  ref <308>: DATABASE ACCESSION NUMBER: AK068622
  ref <309>: DATABASE ENTRY DATE: 2001-12-06
gtgtggcctcttcttcctcctccgcggccggggacggggaactaccccccgccggccgccgcaaatcctcctgctcgtcgtcgtggtgagctatgtccgggtcggagcaccccatggtggccgccgcccgcgccgccctcgcccacctccaacttcccttgccccccgcccccgccggatccaatatggatcatcatcttcttcctcatttcctccacaggtctcccccctctccatgcttcctcctcctccgcacccaacacaagcctaaaccgccgcagccgcagctccacctccttctctgcactgctttcgattccctggcccatagcctgcaggaggtcctggacaagcacaaaccaaagctacatctggacacattattcctccatggaaacctccctttcgcaaaggttggggtaccgccgcctcccccgccacccgcacccctcctctccccaccgtctgtctccgcccaccaccaacaccaacctgcaactccaactgaaaccgaaaccgaggacactgctgctaatgactctccaccaccacggaccctgcctgttcgcctgctcaacatccctgttgaccgcctacgctccacactttccacactttcactcaccgagttgattgacctagttccacacctggttgctaggtccttgccatcccctgatactcatccagacaagaagaaactcttctctgtacaccacttcttccgatatgcagaatttgaaggaaagcgattctttgaggagttagacagagatggtgatggtcaagtcaccctggaagaccttgagattgcaatgagaaagaggcgattgccaaggaggtatgctcgggattttttacggcgcaccagaagtaacttgttttcaaaatcaattgggtggaaacaatttctatccttgatggagcagaaggagccaacaatattgcgggcatacaccaccctgtgtttgagcaagtctgggacacttcacaaaaatcaaattctcacatctttaaaaggtgcaggccttccggccaatgaagataatgctgctgccatgctgcggtacctaaatgcagattcagaagaatcaatctcctacagccattttcgcaatttcatgctcctgcttccttcagagcgccttgaagatgaccctcggaacatttggtttgaagctgctactttggttgctgttcctccaccggtagaaatatcaactggaagtgttctgaagtctgctttagctggaggtcttgctagtgcactttctacctccgtgatgcatcccattgattcaatgaagacacgtgtccaagcatcttctctttcttttcctgatctcatatcaacacttccacaaattgggctccgaggactttatcggggttctatccccgcaattcttggtcagttttcaagccatggtttgagaacaggaatatttgaggcaagcaagcttgtgttaaaaagtgttgctccaacactttcagatattcaggtgcaatcactctcttccttctgcagcaccatcctgggaacagcagtccgtataccttgtgaggttcttaagcagcgtttgcaggctggaatcttcaataatgtaggggaggccattgttggtaccatgcaaaaagatggtccaaagggcttcttccgtggcactggggccactctttgccgagaggttcctttctatgttgctggaatgtgtctttatgcagaagctaaaaaggcggcacagcatgtgttgaacagagacttggaaccatgggaaactattgcagtgggagcgttgtctggagggcttgcagcagttgtcacaactccctttgatgtgatgaagactcggatgatgactgctccaccaggcaccccagtctccatgcagttgatagttttctccatccttcgaaatgagggacctctcggactgttcaagggtgcgatcccccgcttcttctggattgctcctctcggagcaatgaactttgcaggctatgagctcgccaagaaagcaatgatccaaactgagagtgactccgcagactctgtacatgagaagagaaccacagtgggttccagaggatgacagatccaaattcacctggttactctatatggtgtaaagaaaggacaagccatgcaacagaaatgtttttgcccttgttgcaaagaattagaacc

SEQ ID NO: 18217 - DNA, 1460 bp, Oryza sativa
  ref <308>: DATABASE ACCESSION NUMBER: AK068623
  ref <309>: DATABASE ENTRY DATE: 2001-12-06
gcgtaacatccatcacactcctcccccgccgcggccgccgctgcgcggtagatctcctcctcctccacctccaccgtctcctgctcttcctctctctcttctcggaggaaacccccaatttattccttccccgcaaacccgcagccttcctaaaacgaattaaatctccctcccttatccgccactgcaatccctccccacaaaatctcgctgcgccgcgcgctgttttagggtttgagctcatggcggtggaggaggcgagcagcagcagtggcggcggtcgtggtgggggtggcggtgggggtggggaggaggggttgtccggttgcggcggtgggtggacgcgcgagcaggagaaggcgttcgagaacgcgctggcgacggtgggggatgacgaggaggaaggggacgggttgtgggagaagctagcggaggccgtggaggggaagacggccgacgaggtgaggcggcactacgagctgctggtggaggacgtcgacggcatcgaggccgggcgggtgccgctcctggtgtacgccggcgacgggggcgtcgaggagggctctgcgggaggtgggaagaaggggggtggtgggggaggaggtggaggtggaggggggcatggggagaaggggtcggctaagtcctctgagcaggagcgccggaaggggatcgcctggacggaggacgagcacaggctgttccttcttggacttgagaagtacggcaaaggcgactggaggagtatctcaagaaactttgtgatctcaaggacacccacccaagtagctagtcatgcacagaagtattttattcgcctgaactcaatgaacagagagaggcggcgatcaagtatacatgacataaccagcgtgaacaatggagatacatctgctgctcaggggccaatcacaggtcagccaaatggcccatcagcaaatcctggaaaatcctctaagcagtctctacagccagcaaatgcgcctccaggcgtcgatgcttatggtacgacaattggacagccagttggtggtcctcttgtgtccgcagttggcactcctgttacacttcctgttcctgctgcacctcatatagcctatggcatgcatgcccctgtccctggagctgtagtccctggtgccccagtaaacatgcctccaatgccctaccccatgccgccaccaacatctcatggatgagggctttgaatactacagttcttctagacaaactcataatatctgtcttgtttagagtttcaatgcatgctgttatgtctcaataaagcaatatcaataaactcttgtacattacaaatggttattgaatgtagcattttggggacatcctggactgtatttatcatctttgttacgcctgcacttcgttccatcttcaatgtacgcctgccaccctgccccagtcgtaaaatggttggaatgctgaatctccttcagccc

SEQ ID NO: 18218 - DNA, 1411 bp, Oryza sativa
  ref <308>: DATABASE ACCESSION NUMBER: AK068624
  ref <309>: DATABASE ENTRY DATE: 2001-12-06
atttttggtacttcctccgtccccctaatataagagattttggcatttgcttgcactgtttgactattcgtcttattaaaaaatttagaattattatttattttatttgtgacttactttattatccaaagtactttaagcacaactttttgttttttatatttacacaaattttttgaataagacgagtggtcaaacagtgcaagcaaaatgtcaaaatccgttatatttggggacggagggagtagttggtggcagcgtgacttaaactgggattgctgtgtcatgctagatatctcaggagaaggtattgttttggtcagagttaggggaaaagacaaatttcttgatgtactgatggttccttttgcaggatttgcccgatgaggttggaagcgttaatgtcttttcttggataagctgtctggatcttcggactcttgctgtgctgacaaattccaccatatccagctcaagtgatccccataacatatccttcaatttcttaatacctgaaagaggcacagataaatcgccctactacaagctaaaagcagtactgcctgattcgaatgttactgttgctagtcaaaagaaaattgaggacaagctaaacgttgccactccagaaggaaacctcttttggtcattccccaatgaattgtcacccatcattattggaacgactcaattctcgcaaaagagatatgtctatatctcagcggactcaattgtaaagggaaaaattgaagatcttggtcgcatcgatttaggcacttatgctattgctgctgttgaagattgtaccaagcgcattggtgactatgttagtatagatgttctgaatgccgttcagaaaacagctccgaaaaatttggtgtataccgaaccttatgacaaggatgcatgcttacttgattttgatgtgcttgtggtggagccacgcaaactacggaaggaccttattgattctatcatggtgtggttcagggctttcagtctagccaatccaagggatcaaattaggttggcaataacattggccttgtatgacaattatctgaagctcccttccaattggaagcgcgcagatgctaactcagacatactgaactacaacgggccaaagaatgtttgctctgaaggtggacgtcagcttcaagaagaaggcaatggcgatgagtggcaactgtaccttaatcagaaatcccttgccgtacttagttaactgaacaatggcatttcatccaacaacctgcacggttctctgttgcttggttgttgggagctgacgaccaccgtgagaaatacgcttcttgttaacctgtcacttgctcgtgaaaggattgtgttttgatgttgtactcagtagactgatttgtttctgctaagcttaaagaatgttcgtttc

SEQ ID NO: 18219 - DNA, 2268 bp, Oryza sativa
  ref <308>: DATABASE ACCESSION NUMBER: AK068625
  ref <309>: DATABASE ENTRY DATE: 2001-12-06
gattccctccgacatgtcgcagcccgccccctcgtagaagagacggcacaatttacacttcgccccctccaaatcttctcctcctcctcctcctcctcctcgccgtcgccgccgcgagcgggcgcgctagggtttcgggccgccgcggcgtcctcctcctcctcctcctcttgttctggtggtcagcgggggcgcgcgtccgatgtcgtcgggggcagcggcgtcggcggcgggggtggaggcgggggcggcggggggcgggaaggacgacgagctggctgatctggtgcggcgcctagtggacgccctcgcccgctactccgatcgcctcccgttcgacctcgatcgccagggatttgtggtggtccgtggtgtaaaggtggcgcgccttgcttgattgtttgtggggaaggctagtcttttttgtttggaactatattttatactgtggccattctactattgtttagttgttattacatacatatgagttcgaagcatcgatttggtaattcgttcttagcagctgtacaagctagaagctgtagtaaatttttaggcgtggattcgcagttcgctaatgatatgtctcccctttgggaaatgtggtcgtatttgggtcattgtgatagttgagattttgatgtatcctttaggttagtaataggctaatagtgctgcgagaaatagttactatgtagaagtgttggttggccagaaagatgcaaacttttatgatggcttgctttatgtgatatcatcgaatgatctacttacctctatagtcagttaatgaatcactaaataattcgttaatggcatgttgtcgttttgtaagttctcttgactgtagtgttttacaacgctatttccaagaactcggtagtaatacaacgtgcagatcctaggctagtaatggatgcaagcacaggcatacacatgcgaacatgacatgtgcatgcacggcgaggtaaaccgatttctatgctcagaaatctgcgctacaacgtcattaaaacgactttaggtatcaaatcacgtgaaagcacttaaaagtgccgtagcgctcgaaaatcgaccttctgggccctatgttgcaacttgcaacagcatgagcattcatattattccacaaaagattgtacttggtgtcaatttttaatcccttgtatcagtcgttgttgtggtttggatgagtgaattggtgccattttttgtgatttctcacacacaaagtccgttttattaattcttgctacaagaattattgaattacttcaatcttctattttagaaacttcgctcatttactacacttgccgcaattacaatcacacttatctttgcctggaaactgttgagagctcctcaagagcaacctcggaggccacgtagacgcgttgctccatcacctagcaacaccagcagtagatcacggccaggtgctttgacctcaacggatgcttgttcatcttcagcagattcaagagcacaggaagcaatcaaccagcttttccagccagtaaacctgactcttgagcagcttgttaggcataaactgagcgaaggacgaagggttacatgccggttacttggtgtgattttggaggaaacaactccagaggagctccagaaccatgtcacagtgagaccttctgtcctggaggttcttctagaaattgcaaaattctgtgatgtctatctgatggagcgcattcttgacgatgaaagcggagaaaaggtgttatctgccctgagtgaagctggactttttacgaacagtggattgataaaggacaaggttctcttctgtagtacagaaaatggccgcacctcttttgtgcggcaactggaacctgattggcacattgatactagtccagaaattgttcatcagctagctaggtttatcaaatatcaactacatatttctccacaacgagcagaaagagtagcatccaatgttttcagctctacaagcttggaacaattctttggaggccttgatcagagatgataatatgaggtgagctccagcaaacaatggcatagcgagaactgagacgaacatcattgttcattttttttccttgaatgatggaactcgtttttcttgtaccatgtgtaaaagtcgtgtcatgttaaactggttctgcaactccccataagctatggaaagagatagcatctgtagcataatccatgtatcaattgtgttcctgtataaccgaaatacttaaaattgtcatccagttatttgttcggccc

SEQ ID NO: 18220 - DNA, 619 bp, Oryza sativa
  ref <308>: DATABASE ACCESSION NUMBER: AK068626
  ref <309>: DATABASE ENTRY DATE: 2001-12-06
gagcgccgccgccgtcgcagcctcccttctcctctgctcgccccgccgccgccgccgtctccgcgccaccgccgcccccgagatggccccgaagaaggacaaggccccgccgccgtcgtcgaagccggccaagtccggcggtggcaagcagaagaagaagaagtggagcaagggaaagcaaaaggagaaggtgaacaactcggtgctgttcgaccaggccacctacgacaagctgctctccgaggtgcccaagtacaagcagatcaccccctccgttctctctgagagactcaggatcaacgggtccctggctcgtagggccatcaatgatttaatgacacggggcctaatccgcatggtgtcggttcactcaagccagcagatctacaccagggcaaccaacacctaagtgtgagggtgacatgcatctttgtttgccctgaatgtgtacggggggcttgcctactctagaacagctgttacctttgtcgagtttgctaatgttatgttaaatgagctacttgtgatggtcagcatctctatatggctgaaacatttcagagattttggttattagttgagtactgttcttgtttgccctatataactttttccgccc

SEQ ID NO: 18221 - DNA, 863 bp, Oryza sativa
  ref <308>: DATABASE ACCESSION NUMBER: AK068627
  ref <309>: DATABASE ENTRY DATE: 2001-12-06
gatcatcgtcaggtcaggcacttcaccaaccctctgcctcccttccgccgccctccgccgccgcatgcaagccatcctcgccgctgccatggccgcccagaccctcttgttctccgccaccgcccctcccgcctcccttttccagtccccttcctctgcccgccctttccactcgctccgcctcgccgccggccccgcgggcgccgccgctgccagggcgctcgtcgtcgccgacgccaccaagaaggccgtcgccgtgctcaagggcacctcccaggttgagggagtcgtcaccctcacccaggatgaccaaggtcctacaacagtgaatgtccgtgtgacgggacttactcctggacttcacggcttccacctccacgagtttggcgatactacgaatgggtgcatatcaacaggaccacattttaacccaaacaatttgacgcacggtgcaccagaagatgaagtccgtcatgcgggtgacctgggaaacattgttgccaatgctgaaggtgtagctgaggcaaccattgttgataagcagattcctctgagtggcccaaattctgttgttgggagagcattcgttgttcatgagcttgaagatgatttggggaagggtggccatgagcttagtctcagtactggaaatgctggtgggcgacttgcatgcggtgttgttgggctgaccccgttgtaggtcgctgcaagttgcagctgaagtgtaagtatcgcatccatgtcaccctttttgtcatcttcgagcctgaggcagtcgttcttgtatcacatggatttcgcaacatggatgcttaatagtatctgttgatcgttcgtctcacagtaataaaatttagttgagc

SEQ ID NO: 18222 - DNA, 2271 bp, Oryza sativa
  ref <308>: DATABASE ACCESSION NUMBER: AK068628
  ref <309>: DATABASE ENTRY DATE: 2001-12-06
ggcggggtggagtgtggagtcgacttgactcccaagtccacttccctccataaagcgagctcggagcgcagccacagcagtgtagagcgcaagcacagcgacggcgagcaaccgcggtgaccggagaagcgtactacgtgtataccggcgtcggtcgatcgacggcaatcggccggattccggtgtgattggctcaccggcgatatgcacacgaagcgtccgctgccggcacaggcgccaccagctgggcttgtcctggtgcccgcgcccaagcgcccgcatgtggatgctgctgccggcggcggcggcggcgtggcgtcgccgcgggggaagcggcagcttcgctccggcatgctcgtcctcttcttcgtcgcgcaagtcaaggaggagatgagatacaaccagcgacttcgtcgagtgatacgtggagagaatgctatttcccagcaaagggcaatcgaaacatttgattgtgtctttcagaaagcatttgacaatgccttccagaagcatcttgatccaatttaccgctcccttcaatcccttaacaagcgcactgatattctcagccatgaagtggaacaaatcaaacattcaaattctaaccatcatgctaatcagcaatacagatcaaaggcaaatcaagagtctgctgccatcactgaggaagtgaatcaagaacaaacagctgctagatttgtcgcgagtgaagctcaggaggggcaaagagttgagttgaggttcctcaataagttgaaccctcttgtttttacaaaggaaaaaattacagcggaggatggtacagctatcaaaattgccatagttagggataatcagataattacatctggtccactttcttctgcaagaattgaaattttggctctccatggtaacttttatgatgtcgtccctgataattggaccgaatctgagtttgatcaccgcatagtaagtagttcacaaggtcccgcgttaggaggggtttgtcaagtcaagctgaagaatggggaggcctctccttctgatgtatttttcaatataccatcttcgaagactgaaagtggaaggctcattctagcagcaaaagttcatacaagtgacattggtgggcttcgaattaaggaagctgtgatgatgaatcctgttgtggtgcaggtttaccgaaacaaactaaatagaagtagtgaccgtccgaagctaaaagatgaagtacatcgtttaaagggaatttcaggaaagggatgccgcaccaaatggcttaaagataatcaaatcaacactgtggaagagttcgtaaaggctttaaataaggatgaagaaaagatccgcaatgagtgtttcaagctaaagaaggataataagctttggaaagatacaattaaacatgctaaagagtgtgatcttgaagggaattgcaagctgaaattatatagagctgaagagcagcatgttgtactcttctttaactgcgtgcatgacctcgttggtgcgaaatttcgtgatcactatgttgcaaaggacaatttcagttcagatcaacaggatgcagtgaatcgtttgaagaaacaagcatatgatgagctggatagcattggctttgatcacgaaatgaaaaataactatccggtgatgacgctcagtgatgatgcttacattcccttcattgacacagcacaaaatcctccagatttgcatgttacatttcaagttcagggtattgcaggagctgagatttatcatgcacatgaactgcctcaagcatttcctaacaacaataatgattttggacaacactttttacatggctttcaaggtgatctgactcagatggaccatgactatgcgcaatttggcattgctgatatgcagtgttatactacacaggcacctgaaggtacctcttatggaggcaacaacatgatcggaccagcaaatgtaccgcagaatgttattggtgacggctctatggacatgtttgactgttatgcatacatctttccggacaatgagaaccagaatgagaggcctcatagctctgcatatccaggaccagtttaactgaaggctttgttgccagctagtaatctatcatgatttctgattaatttcattctttatttagataatggatattttattgttttattcttgatggatgtattactttcaagaaatattcttgctgtatgtattagcatttgttgatgcagaaaattgaactgtactagtacttatgtttcagaaaaaaaacatcgactgttatgttac

SEQ ID NO: 18223 - DNA, 2531 bp, Oryza sativa
  ref <308>: DATABASE ACCESSION NUMBER: AK068629
  ref <309>: DATABASE ENTRY DATE: 2001-12-06
gatgtgtttcaatgacaatgatcaaaagttatgggatgaagatcctcatgaatatgttcggaagggatatgatatcattgaagatttgtacagtcctcgaacagctgctatggattttgtgagtgaattggtaagaaaacgaggaaaaagcaatctccaaaagtttatccatttcattgtggatatttttaggagatatgatgaggcatctattgaaatcaagccatatcgccaaaaagatggagcacttcttgctattgggacatgtgataagctgaagcaaacagatccatataaagctgagttggagcgtatgctggtccagcatgtcttccctgagtttaatagtcatgttggacacctgcgtgccaaggctgcatgggttgctggacagtatgcacatatcagtttttcagaccaggacaattttcggaaagctatgcattgtatagtttctggaatgcgtgatccagatctccctgttcgggttgattcagtgtttgcacttcgttcttttgttgaagcatgcaaagatctcaacgagatacgacctatactccctcaactccttgatgaattttttaaactgatgaatgaagttgagaatgaggatcttgttttcactcttgaaaccatcgttgataaatttggtgaagagatggcaccatatgcactggggttgtgccagaatttggctgctgccttctggagatgcatggctagtcaagaagctgatgatgaagctgatgattctggtgctttggcagctgttggttgtttacgagccataagcacaatccttgagtctgttagcagtctcccacacctttttattcaaattgagccaactctgttgccaataatgcgcaggatgttgacttctgatggtcaagatgtttatgaggaagttctagaaattgtctcatatatgacttttttctcaccatcaatttcgttggacatgtggagcctgtggccgttgatgatggaggctctaaatgattgggcaatagacttctttgagaatattcttgttccattggacaactatgtttcccggggatcggaccattttcttgcctgcaaaaacccagattatcagcaaagcttgtggagtgcactatcatctattatgatggatcaaaacatggaagattcagatattgagcctgctcccaagctcattgaggtggtttttcaaaactgcaaaggcaatgtggatcaatgggttgagccttacctcagtcttacaattgatcgattgcgtcgagcacacaaaccatatttgaaatgtctccttgttcaagtgattgctaatgcgttctactacaacccttctttgacacttgcaaccctacataaacttggggctgtgactgaaatttttaacatttggtttggtatgttagaacaagtcaaaaagagtggtgtacgagccaattttaagagagagcatgataagaaagtttgttgcttggggttgacctcacttattagccttccagcagatcatattccaggagaagccctgaatcgtattttcaaagcaacacttgatctgcttgttgcctacaaagagcaagtggcagaatctaagaaacaagatgatgctgatggtgatgatatggatggttttgatgctgatgaagatgaagatgatgatgaggttgtatctgataaggagatgggacttgatgaagaagatgctgatgaagtaaacagtcttcatcttcagaaattagctgctgaggccagaggcttccagccagctgatgagtatgatgactctgatgacgatttcagtgatgatgaggagctgcaatcaccaatagatgaggttgacccgttcattttgtttgttgaaactgtccaaggcttgcaagcatctgatcctatcaggttccagagcctcatgcaaactcttgattttcgttatcaggcccttgctagtggcatagctcaacatgctgaggaaagaagagttgagattgagaaagagaagttggagaaagcaaatgcacaatgattagtcataaagttctttgatattattgccatttcaccgggttgtggaagtggtgggccatcttgtgatttggcgcgaccacaggcaatcaattttggagccttagtctgccatttaggcaggaaaattttaggctcgcaaaattttatacttgcgagagttgaaaccggtgatagagccttcttggatagtctcttcaccggaagtcattttcctagtggcccatcggtcggtggcttggattgtgcaagcgtgacactgggaagtttctccaatttgagggcactagcttgtcatgctgtttgggccactaatatattttttttgctgggggcttagcatttgttggagagccccccactggtggcggggtgcatctccgtatcacagtttgtagggcagtttacatttagactgtagaatgtatatggttttgttcttgtctagatcttaccgtgagtttccattggtgggctgggatatacggttacgttttgtttttggc

SEQ ID NO: 18224 - DNA, 876 bp, Oryza sativa
  ref <308>: DATABASE ACCESSION NUMBER: AK068630
  ref <309>: DATABASE ENTRY DATE: 2001-12-06
gagtttggtccaatccaaccaagcagaggctgcagcctgcggagaagaggagaaagaaacagagtttcagtttccgacatgccgcggctgctgcctggaactggaagggcctcctccttgtcctcttctttgctactgctcctgctgctcggtgccgcgatggcggcggcgccggaggcggcggcggtgatgcccatggaggcctacttctcgccggcggagctcgttcgcattgcggggtacggcgaagagctggtgtcgacggtgatcgtgtccgggaaggtcgtctgcaagctctccctccgcccacccggctccgacctcctcagcatcgagctgccaggagctacagtaggagtggcctgtgaaactggaggtataaagacgatggctaactctgtattcacagtaactgatgagaatggcaacttcaccatagaactcccttctcggctccatgccacaccaaacctggagaaggcttgctctgtcaaggtgctccagctcccgctagactgtgcgtgttggcctcgccgtagtcctagttactaccatggcatccagttatcatcatcagaggatggcatccgctcctacacgacaggggtgatacggctgcagcatcatgatacaaagtcagacatgtccatgcaccatgttggtacagaatagaattgatgatagacaaacaattgttgatgtaaagtagttcgattcttggttgagttccattttctttaaattttcaagaagcgtagttgggtagatcgaatagatgcctttttccatatattttcttcctatccctacttcatttcttgtaattatgacctccctttataatatacaaccagatgtctgggctccgcctcacct

SEQ ID NO: 18225 - DNA, 3047 bp, Oryza sativa
  ref <308>: DATABASE ACCESSION NUMBER: AK068631
  ref <309>: DATABASE ENTRY DATE: 2001-12-06
gtcgcggctgctgctctccgcgtcgtctctccctccggttcgccggccgccgccatggcgaacagccttctccacctccctcccgcccaaaaaaaatgggggcagatctcgcctccaagtccacgacccgtacactcgtgtccctaggagtccaccacggcggaggcgctgccctccgtggcggcgccgtcggagtggtgggggcgaggccgagccatcagcgagccgagcacacgggcggcggcggcgagcgcgggcaccgcgggtgctgtggtggtagcgcgcccaacccctcgagcttcgccgcgcggcgtcttcgtcgaaggctcccgcatcctcttccgcagcacaggatcaggaggcaccgcgatctcaacagcaccgtcaagcatttgggtcaccttatgcatggtaggtcgcatggctgggtcctcttggatgcaccaaagtgctactgccaaaaacctctgtaccctcttaatgtcaaatgatgcctcctcatcaccctccaccagtaaatcaattcttccagagcgataacagtcatttgcccagtcagtaagtgcaacataccctcgagttccccggataccagttgttgtttgtgtttggtccatctgcagcagctttgctaaaccaaagtcggatatttttgccgtgaggttgttgtcaagaaggatattttgaggctttatgtcacagtggatgatctgtgtgctgcattcctcatgcaagtagagcagtcctcgttggtaccaagatggtctgatggtgcagaaaatgaattcattaagtggcccgtttggcatgaactcataaacaagtaatctcttagcaccttcattgcagaaccccagtaacctgaccaggtttttgtgaaatgtccatccaatggtctgaacttccacagcaaactccttttcaatatctggcaagaccttattgatcttctttactgcaatgtgtgtgccaagctgatcttgtagtgtccccttgtagactaccccagaaccaccgctaccaatttcttcacagaacccacctgttgcctcgtgaagctcttcataagtgaaagatttcaaaggaagtcccccggtactatatgattgctttggtggatctatcttcttgcttttctttgcaaaatagtgtccaaaaaggataaatgagataaggaggatcaacaccaacaagaagcttccaaggaggagacaactaccgaggatccaatacttcttgtctttcttccatttgatggagccagtattaataatagacagggaattgttgttcttgggcaccttcagataaagtgttctatcaacactactgtccattcttccattggacatggggagtttcttcttccaacaatttccttcattaaacactgtcacagcacagaagcaatctgtcaagcatagtttctggcagtcatccatgccaacagaggtgaatgactcatagtctgcacttggccaatctatgcctttcattgggatcaaatcaaattcatcaatcatggttgcctcatccaaatcacagctttgttgttggaagtttgctttgcatcctttgtacttccgtgcctcatctatgaacgagtaatgtggtggacattggcattccactgtctcgttctggttccagttgaagctgcaatagctgttgaacccgcatgcaccacttccatctgaggtagtgaagacatcacatatgttcctggggatgaagtccacagcagtccaacctatgtacttccaccctctggttactgcctccttctttgggtacacatattgacggaacacaccatctgggtctagggttgcacgctggtagtagttcaccattgaacccatgatggtagatgtgatagtaatttcagtgccatccttcaaggtgaagtagacccctccagtttcattgaacagaagctgtgagccatttccaccagtgttgggggtcaagtatgaacgatacttgtttcctgagggaacagcaactagatcaaattcaaggtttccatctttcacttgaagtagaaatcggccattagagtagtctgcttgtgtcagcctactgtagagttgaacttcagaaaatggcccttgtgtgggcaggatggtgtccgctgggctatcaaaggttccccactttgtagagccatctgtaccaagaagcacaaaatttccagtatcaagcatgttggcataagctgcaccagggacttgggggttccaaagctcatggccaccagggtcaaggagtgacagaccattagagctaagctgaagtcgagaaccagaaggcaccaatactacctctggtacttgtgtgttggtcttagcgtaccatgccatgcttttgttgacagtcttgtcgaaccagacggcaaggaggtaagtgttggtgctgatgagttggaagccgaatgcaaaatcaccggagggtgaaatccacgatgtgttcacgccttcggtggtcagcaacgagcccagggtgatgtttcgagctttagagggagctattgtgaacactaggaggaggacgaggagggtgaggagaggttccatcatttttgcgatggtatgtgttcatgaaacagctttgtgtgctgccgcagctatatcatggcagggatcaggggtctgcttgacttggaacactgaagtgacgacttgcaaagaccagtagtgggttcctccaccaccaaaggagaaggcatatctaatctagctgttgcagcatttatcattgaactaataaggacagacagcaagggcctgctttgattagggacgttgataaagggggagactctgaaagttcagcaactgagcaaagggcttaactgatgacatagggtgaaagcacattgttgttcctaaagaacttcatattttacttgtacttacagaatgtgaaaatttgagaacttggcaccgcattatcaagttggtgacatattgattgacagtcctaaattttgtgagagaaagcgtactgtgtagtatgagtactagaatgtaggaaggaaattcacg

SEQ ID NO: 18226 - DNA, 3892 bp, Oryza sativa
  ref <308>: DATABASE ACCESSION NUMBER: AK068632
  ref <309>: DATABASE ENTRY DATE: 2001-12-06
gacaccactcacgcctcctcccctctctctcagtccacccctccccatttccaccactccgccctcgccgccgaccgccgccgccgccgccttcgccgtcgtctcgcagcgcgacccacggccacgcgggggggacgcgctcgtcgtctctctctctgtcctcttgtggttcccgccgacgcacgagcaggagctagggtttccggcgccggggcgccgggggttatgagcagcagccgccgccccgcaggatctagggttccgacgactccgctcacggatggagggtggtagaggcgcgggcgacctccactcggcaaacacccatggattatgatgattctgattttcagagccagaatttccagttagctggtgaagacaacaataaattcccagcaggtctgcggcaatttccactgcccaaacttgacatcgacgaccaactacaaagccacctcagatttgataacctaattgattcagagggactttttagcggacaaggtcacggcaacagttggattgaggttttgtccactggaagtagtgttgttgattttagttctagtgctgctgaatcttgctctataaataggacaaataatgtatggtctgaggcaacatccactgaatctgtggaaatgttattgaagtcagtgggtgaaaatgagatgaccggtaacatggatgagaacgcacatcatcagattagtggaatggacagtaaaactgatccatccaacatgccgtccaaaacaagtgattctcccacaggcaacattatagtaccagctgagaatgataagtctcagagcactcgttcggaaatggcagaagatccttcaaggattcagcctcagcttgagcatatcagacctttctcagtggatgacaaagctgaacaagcagtaggttcaactttatcagacagaaaatctaactatacgctggaatctgtttctgagaggtgcatagtgagtgggaggtcttcttctccaaagaaaacatcagaaagctgtccagatgttggcagctattttgaggtggtccatgatgacgattctttggacaacctcaacatacagtcagatggagtaggttctagaaagttgaataatgaacccttctcagacttggcaccattacagaacatttatactaccagctcatatcactttgagcaggacaatcaagaatcaggagttggtgttaccactcaaggttcagaaatatgccacacgaatgaaaataaagatggacttcatgatttgcaaaatttgtcatgtacaagccagcatttgggttcttcaaacttaactagtgaagttagcaatgaaactttattgtcgggaagttctgatggattactggaggccatcacaaatccagtaaagatgctgcacaggagtgatgacactagtaagagagccagtgctacactgcaatcatctttcttacaagtcgagcatgcatcagaaggcacaaaaggttctattgacaggagcagtgagcccgccatgaagaaatttggtgctagtgaagaacccaattctgctaaatctcaaggtgagccagatttgaaaaattctagtcctcatcttgtcattcctttgccaaccataagtggtgagtttattcagtctccaaaaggaaaacagcttgctcatgttgctggagtttctgaagaaaccaaatatgacagggtggatgatacgaaccatagcactagtgatgactcaaaacttgccatgttggagcagcttcaagattctgttgataatctatctagtggtgttatggaagagaagacaatcatagggcaaatctcagctgtttcagggaacgttgtacatgtagtgaaaagtggtcattgtgaaaaagttgcagtttctaccagtacaacagatgataagtttgagtcaccgggtgatattgtgcctgacaattcttcagcttatttacctgatgaaaaagacccaagcatcacagttaaccacgaggtgtcattcaaggaaggtgttgtgcctgcattagaagacgatcctgagaaaatgtcctcaatgaatcatgaggagccattgaaggaagatgataaatctactttagaagttggagaacacaataccacatctcctgtttctgagcccttgctgatgggatcaacaggatcagtgaatccgaacattgatactatttgtagcagtggtactgatgctgttgcagaaacaccacaatgcgaagaacaggccacttcttcgggtagtttgaccacaaatgcaactcaggataaactaggtgatcatccagacgcttgtccaccgaaagtcttgactactgggcctttgatgcaacctgaggatcatgaagatttagttgcaccatcctctgtcttgggtgcctcgtctgaaaagggtgaacaaaataacggaaaagttcccttgaatgggatggatgattcgggtgtgcagttacaagataaggtattaagtcatggtggagatcgtactcttgttactgtttcatcagagaataagaatggcttagaacatgggactggtgaaggaagctgcactgatgctacatgtggttcgcctacagtgattagttgcaatgaatcctgtccagaagaagatgggcagggcagtaatgctttgcttcatcacaaacaaaccgaaccacccaaggatcctaaagatcatacagcttcgactaacaattcccatgtctcaaaagaaggttcttccagaaatgtaaaacctactcttacttcggaggagacgcatacagccgaagataaaagtttttcatttgaggttggagctccactaaatataactgagaaagctcatgctcctgcttggagcccattgcctcgacctgaagttgctcagagtcccgaggtaaccactggaattcctaaacctggaaatccatcgaatcatggtagtgatgaaagtaagaatttggcgattgtggagaccagcaaagaacaactatctggaaggaaagtggttggaagtgctgaggggtcttctgtaagctcacatattggtcatatcactaaagccaaaagtacaccactagagcaggaacaacaacatccaactcctgatgtcaatgctttggggcaccaacctttcacagatttacagcatgtgcagctacgtgcacagatatttgtttatggagctctcattcaaggaatgccaccggcagaatcttacatggtgtcagcttttggagaacctgcatgtggtcgtaagcctccatgggggacacttttgcaagctgctttggaaagatataatagtcagaggtcatctttaactggcttggagactcctacaagctcacatataggtagccgtgtgacggaaaaagccagtagaagcacagcggttaaaactgcaccagctagcaaaaagggtggcaaaactgtgttgccagcacatactgctgtgccccttcatttgccaactttaaatatgtctcctcttggtagttctgctttgagcttgccacgaggtactcatctggattttggccaggctgtatcaccagtattcccatacagttcacagacaaggcagcctacttctggtgttgcatcgtggtttccccagagccctggtgggcgcgctgccccctggttggttcaaccacagaatttgatatttgattcatcgatgaaaccgcctgtgccggcaagtgcaaatgaaactgcaaagggagcatcctctaaaaacatatccatttcacaagctgtttcacctgttgcattccctccgaatcaggcgccttctaccatttctccattagcagtcatacctgaggaaaaacagaaggcatcggtttctacttctaagcgtggagctacaccacaaaagtc

SEQ ID NO: 18227 - DNA, 836 bp, Oryza sativa
  ref <308>: DATABASE ACCESSION NUMBER: AK068633
  ref <309>: DATABASE ENTRY DATE: 2001-12-06
gaggaggaggaggagatagagtgaggccgtgacggcgacggcgaggtctgggggcggggcgcgatgggagacggagcggaggcggcgggggcgaccgcggcgagcaggttcgggacgatctgcgtcttctgcggcagcaacgcggggcgccgcagggtgttcggcgacgcggcgctcgacctcggccacgagctggtgaggcggggcgtcgatctggtctacggcggcggcagcatcgggctgatgggcttgatcgcgcgtacggttctcgacggcggccgccgtgtcgtcggggtgattcctagagctctcatggctgtcgagatatcaggtgagagtgtgggagaagtaatagttgtacaggacatgcatgagcggaaagcggagatggctcggcgatccaaagcgttcattgctcttcctgggggctatggaacaatggaggagctgttagagatgataacatggtgccaacttggaattcatgacaagccagttggattgctaaatgttgacggttactacgatccactgctcgcgttgttcgacaaaggcgaggcggagggcttcatcaactctgattgtagacaaatatttgtatctgcaccaactgcaagtgaattgctgacaaagatggagcaatacactcggttgcaccaggaggtggcccctgcaacaagctgggagatctcagagcttggctatggaagaacaccgggcgctgatcaatcatagcccccctcacttcaaaagtgactagtacaagctctactaatgcctttgcttttgttttcccttgcttcttgtgatcaagtgtcaaattaaactcctcaccg

SEQ ID NO: 18228 - DNA, 2772 bp, Oryza sativa
  ref <308>: DATABASE ACCESSION NUMBER: AK068634
  ref <309>: DATABASE ENTRY DATE: 2001-12-06
gatccacctactgccactggcccccgtcacgtggccacgcctcctcagcctcatcgccgccttcctcctccctctccctcttggtccagaggcagcagcggcgcaggggcgggttagcggctcccggcccagcggctgcattgcggctcctcgacgcagcggctgcccagcggcgcggcggctcaggacctccacgacggcgaggagcggcagcggcctccctctcacccctccctctccctcttggtccagaggcagcagtggcgcaggggctggtcagcgtctcccggcccagcggctgagctgcggcttctcgacgcagaggcgcggcacggctcaggatctccatggcggcgaggagcggcggcggcctccctctcacccttctctctcctctcatatcctatgtgatgtgatttattttgtgatttccacctcttctctcatcttatgtgtgatttattttgtgatgtgattattggattgtctcctgtgcttgatttattttgggatgattttgtaatgattccgattggattgggatttagtttttgggttagatttgtgatgatttgggattggttgtgggatgttcagagcggacgctcgttgacagatgaagcggaagaaggtgcttctgctttagtttttagggatttgggatttgtttgtgtatttctttgtagtgtcgatcttgtaacagcgaatgggaaactgattttctgggattatcggtcggttttgatgttgtgatttgtcctccaattataattttgtatcctctcagaattttttttctttggccgctgtacacgattgcgttcacacggagagagagggcaccgctcagtcagacatttacggatgaaaaatttgtgacgaaaggaaaaatactaatcttttagttagttaagatgtgacacatgctataggctatattcgttgaactaggatgtatcatatctcactaaaatctcttatatttagggacggagggagtataacttgatgaaggaattatcaacattattgctttgaaactgttgaatacaaaatgaaatcctagaatttgcgtatgtctgattagaaaatgtgacaatgccaatgtagcaggtaatttcttttagaaggtaatttcttttagagtaaatttcacaaaaccacatctctacccatactaatactacattcagtggttcaacaacagtggccgcattaaggtaacacaattggtgagattaaattttgcaattggttattactgtgattttgttgattgcgatgtcgtacctatgcatgcttgctccttgctccttgctgttgggtagactttcacaatatgataaaaacacgttgcatcatggtagaacaaaatcaatactcctttgtgcataatagaaaaaaaattgtgttgcatcctatgactcttgaagctgtttttgagaatgatgttgctagagctaagaaagagaaaaatgttgagcatgctaaaagtgaaaatcagattgtagcaaaagaacttgtacaacataacaagaaagattctaaatctgaacatggtaaggacaatgtgattaaatcgaaaggtccttgtttgcttgccactaaatctgatattgtcaatttggatacgagtgacactatttgctatgctctcatttgtaaagaggccttgtttccttttgagaatatgcctatctcttttcttcttgtggtcactaattttttgcagaagtattaggatgtgtttcccaaggacgtaccaccagggctgccaccggtgcgtgaaattgagcatcagatcaacttgttggtaacaaagatagaaaggaattgaattttgaacctggagatttggtttggttgcgtttgcgaaaagaatggtttcctaatttgagaaaatctaaatggatgcctagagctgatggaccttttaaagtattagcaaagattaatgagaatgcatataagcttgatttgcctgtagattttggggttagtcccacatttcacattgcaaatttgaaaccgtatttgggagaagaagatgagcttaagtcgaggacgactccaatgcaagaaggggaggatgatgaggacatcaacaccatcgatacatccacgtccccacaagtacaacttcatgatcctattacccgcgctcgtgcacgtcaactcaactatcaggtgagttcattcttgaattcatgttcttcttgtttataccccggagatgcgtgcactcttgttttactcaggaacgatggggaggatccaaacggggagaggattcgcgcggggtggattcggactgcaggatagcgccaacatctgacggccggcacgacttcatgcgaactccgatttgggcgtgcaagtacttcatggaaagcttatcaagtctactttcaaatggatccattcccatgtccatatctgatctggagcagctgcaatcatcattttactgtcgagtacttttctgtccacgatgttgcgtcacctcatttgggcccaatgtgctgtatatcaagttgggcccattaggggtgcgtcctagggttagagcacgacaccaacacccctgtggtcgttctccccctcttcttatacctttagccgccgccaagaacacttgggctttgtttagatcaaagtatagcgtcgctacttggccgagttaatcccatgaccagttagatccccggatttcttgttgctgaactccacttgtgctacttctgttgatctgatccatcatctttgattcgc

SEQ ID NO: 18229 - DNA, 849 bp, Oryza sativa
  ref <308>: DATABASE ACCESSION NUMBER: AK068635
  ref <309>: DATABASE ENTRY DATE: 2001-12-06
gacccccaaaccaccaaccaaacacacacacccaaacccgacgaacagccgcagctgcaggccacgcatcctcgccgtgaatctcccaccgcgctccggcgatggcattcgcggtctccaccgcctgcaggccgtccctgctcctgcccccgcgccagcgctcgtcgccgccgcggccgcggccgctcctctgcacgccctccaccgccgccttccgccgcggccctcagcgcgacaacaacgccaacgccggcgcgcgcagcactgccgtcgacgacggggaggaacaggatcgtctgcggcaaggtgagcaagggcagcgcggcgcccaacttcacgctgagggaccaggacgggagggcggtgtcgctgtccaagttcaaggggaggccggtggtggtgtacttctaccccgccgacgagacccccggatgcaccaagcaggcctgcgccttccgcgactcctacgagaagttcaagaaggccggcgccgaggtcatcggcatcagcggcgacgacgccgcctcccacaaggagttcaagaagaagtacaagctgccgttcacgctgctgagcgacgaggggaacaaggtgaggaaggagtggggtgtgccggctgacctgttcgggacgctgccgggaaggcagacgtacgtgctcgacaagaacggcgtcgtccagtacatctacaacaaccagttcaagcccgagaagcacattggcgagaccctcaagatcctccagagcctctgattctcttcttcttcttcctccttttttaactacaatctctcatgtatgatccatcacagtataccgagaaattaatccatctgttaatctcttccc

SEQ ID NO: 18230 - DNA, 1431 bp, Oryza sativa
  ref <308>: DATABASE ACCESSION NUMBER: AK068636
  ref <309>: DATABASE ENTRY DATE: 2001-12-06
ggcttctcaatttatcattgtttaacttttttcttcatccgattttcggttcggacgagagctctattgccgtaggagcaggagaagggagcagggagagcgccgccgccgccgccgccgccgcaccggcgctgtgccgacgagatgagcctctcccaccacctccccccgccgccgggagacccctactacgtgtacgcgccgcacccctacccagatccgcagcggcagggggtactcacgctcttcgtcgccggcctccctgacgacgtgaagccccgggagatccacaacctcttctccagccgccccggcttcgaccactgcctcctcgagtacaccggccgcgggaaccaggtggtggccttcgtgtcattcgttaatcatcaggcggctctttcggcaatgtctgctttaaatgggactgtatttgatccagatactggagaccgtttgcacattgagctagctaaatcgagttcacgtaaacgtcatggagatggtggggtttatagagttgttgacaaacgacttaagagaaaagaaagagctgctgaccatgagaatgctggtgatggaggtaatgatgatgatgcatggggcgaggatgataatggtggtaatgatggagatggtggatctgatgagccattggacacagaaaatgatgattccgacgaaaagaatgaattaccagcagaacggagtagtggtcaaccagggcttaagcagcatagggggcaatctctttcagatgatcaaccagacaaattgtcaagtgatattccaccttgttctactttatttgttgcaaatttgggtcactcatgcacagaggaagagctaaaggaagttttatctaagcaacctggatttcatttgcttaaaatgcgccgtcgtggtggaatgccagtagcttttgctgattttacggatatcgagtcctctacggctgctatggatgctctacagggcactgtgctagcttcttctgacgctgacggcttgcagattgagtacgcaaggtcaaaaatgaggaaaagctagctcactagctacttgttctacatcagcagtgagcgctgaccaccggggatcgaacatgaaggtatatcatttgccatttggcatcccatgccagcacatgtaatcgccaggctgtagctgtgctctttaattgaattctaagaatatagatctgggcaatcaaacactttgtcacagagtagttggatcgtttaatttggtttcgctctcgttcagaaacttctctgtcagagtcggatcgttaattgtacttcttgtttctgaaactttccggagacaaccaggcggctaaccggctctatcaacaatcaatttgatgtatgtgctcttctttgtgcatattgaacaattaatttgatgtgctcttcttgccgccatcttttg

SEQ ID NO: 18231 - DNA, 1476 bp, Oryza sativa
  ref <308>: DATABASE ACCESSION NUMBER: AK068637
  ref <309>: DATABASE ENTRY DATE: 2001-12-06
gtaaacttggccgatccaacggcgggggaaatccgccggaaattaaagccggcgccgcgagcgtgcgggcgtggcgcggcgtgcgagtcacgtgacccacgtgccaaactgcctcttatatcgcctcctcctcctcctcccctgcctccggcgaagcggccggcggctgaggcgagattcgcggcgaccacgtcggcgaggagcgcgagagtgggggccctcctcctgtccgccgtccgcattctcgtcgtgtctggtttgagctgctgctgctgctgctgccggtgggagttgggctgcttgcttgcttggtttgattggtggaggtgggaggagtactggagtaggcgagtagctgtgggttggggtcggcgagggatccgggcggcggggtatggggaacgcgagcggcaaggaaggggaggagaacggccacgtggcggcgggggccgccgccggagtggctggctcggcgggggcagcggcccgggctccgccgccgcttatgccgccggacgccgtgatgcgggagctgcctcccccggtgccctacgtcttcacgccgcaggttccagtagccccactgcatatacctactgaattttctcctgttttcaacaattcatggataaatgaatcggatgaatccaccaataaccatccccaggagaagggaattccaactttgatctcatggagtcaaggaggaaatgaggtgtttgtggaaggatcatgggataactggacatcaaggagggtgttagagaagtctgggaaagaccataccatattgctagttctgccatcaggggtataccattacaggatcatcgtcgatggggaaccgaaatatgtccctgaactacctcatgtggctgatgagggagggcaggttgccaacctcctcgatgtccatgattatatcccagaaagcctgggcagcgtggcaggattcgactctcctccgtcgcctgaacacagctatgatctccagctcccaggtgatgaggagtttgccaaggagccacctatactgccacctcagcttgtaatgtctgttcttggtgatactgataactctgaagaacaaactctgaagccaaagcatgttgtcctcaaccacctgtatatcgagaaaggatggggatcgcagtcgctgcttgctcttggagtcactcaccggtttcaatccaagtatgtaagcttcgtgctgtacaagccgctgcgaaggtcatccacggcgaagcgaacaaagaatggtggttaaactcatggtaactgacaatgtacataagtgaaatgcaggaggtcttgttgtttgatgctgatcaaagcaatcaactttttttttaatttctctctttgtttctttaataagctgttgttgtagcatgatgttttagaagcctgaactctatgagaaaatgagtcaagagagggatgaaaaaaaaagagaatatccctctatgcttacct

SEQ ID NO: 18232 - DNA, 1435 bp, Oryza sativa
  ref <308>: DATABASE ACCESSION NUMBER: AK068638
  ref <309>: DATABASE ENTRY DATE: 2001-12-06
gactcgcacgcagacatcacatccattccaggctcgatcgcttcgatccctttgcctgagaccgaagaaatggagctaatcacaaacgtctccgagtatgagcagcttgcaaagcagaagctgccgaagatgatctacgactactacgcctctggtgcagaagatcaatggactctcaaggagaacagggaggccttctcaagaattctgtttcgaccgcgaatactgattgatgtatcccgtatcaacatggctacaaatgtcttgggcttcaacatttccatgcccataatgattgctccctcagccatgcagaaaatggcccaccccgaaggagagcttgctactgcaagagcagcttctgctgcaggaacaataatgacattgtcttcatggtccacttctagtgttgaagaggttaattcagcagcgccggggatacgtttcttccaactctatgtttacaaggataggaatatagtacggcaacttgtcagaagggctgaattggctggttttaaggcgattgcactcactgtcgacactccaaggcttggtcgcagggaagctgacatcaagaacagattcaacttacctccacatctggtattgaagaattttgaagcgctggatctcggcaagatggacaagacaaatgattctggccttgcttcctatgttgctagccaagttgaccgctctctgtcttggacggacgtgaagtggctacagacaatcacctcgttgccgatcttagtgaaaggagtcatgactgcagaagatactaggcttgctgtcgaaagtggcgcggccggtatcatcgtgtccaaccatggagctcgccagctagattatgttcctgcaactatcagctgcctggaagaggtcgtcagggaggcaaaggggcggctgccggtgttcctcgacggcggcgtccgccgtggcacggacgtgttcaaggccctggcgctgggagcttcaggagtatttattggcaggccggtgctgttctcgctggccgtggacggcgaggccggcgtgaggaaggtgctgcagatgctccgcgacgagctggagctcaccatggcgctcagcggatgcacgtcgctggccgagatcacccgcaaccacgtcatcaccgacagcgacaggatccgccgctccaggctgtagaggctaagctctgcagcggttgcagtgatcgaattgtccatgtatggtatgctagtccatttgagatgctactgctagtagttattgtgatccctcccacatttgatgatgccgggtaataaggagagggaggaggctgggatgtgtgcctccaggtgtatgtgttcggtgttcctccgtgatggaggagtatgtagcagggaatttgtcactgttgctgtcgttggcagggaatttggtgattcagagtagtttgtgttgg

SEQ ID NO: 18233 - DNA, 1342 bp, Oryza sativa
  ref <308>: DATABASE ACCESSION NUMBER: AK068639
  ref <309>: DATABASE ENTRY DATE: 2001-12-06
gaccatgatttgcctccgagccgccttccccttgacctcctccttctcctcctcccctctccgccgcctcgccctcaagccctcctcctcccgcgccgccgccgccgccgccatgtcgtccgcccccgccaccgccatcgccgcgccggtcgagcacatcgtgctcatcaaggtccgccccgaggcggcggcgtcgggcgccgccgcggcgatggtgtcctcgctgcaggcgctgtccagcgtggtgcccgggctgtcgtacatccacgtcggccccgtgctccgcctccggtcgccggcggcggaggcgctggggccgacccacgtcctccactcccgctacgccaccaagcccgacctggcggcgtacgcggcgcacccggcgcacgtcgccgccgtgcaggggcacgtcctccccaacgcgctcgacaccaccgccatcgactgggtcaacgccgcgctcgcgccgtccccggtcaccccgggctccgccgtgcggctcacgctggcgaaggtgaaggaaggtgtggaggtgccccagctcgtggagaagggcgccgcggcgacggcggcggcgggcgaggcgaagggcgccagggtgagcttcggggagaacttctcccccgcgcgggctaaggggtaccagttcgggatggtggcggtgttcgacagcgtggaggagctcgacgcggtggagggggacgggaaggtgcaggaggccaaggcggcggtgaggccactgctcgacgaggtgctcgtgctggacttcgtcgtcggacctgccgccgtggaggctccggcgccggccaacctctgagagctctagaattgttgcacgtggtattgccctcgatgactctcagcttgatgaccattctgaaagtgatagttctagtataggcactgcagcacaaccatccccaattaggaacagtccttcaagaagcttgagtttttctcatttgtcaaggttgagaggcagagttcataccttgtgggaatgggttcttcggaaatggccttcggattgtattatcatttaccaaagcgagcagctggcattcgttatgtattcattgggaagccaatgattcagaggcccaggtatcaaatcttgggtatttttttgttaattcagttatgtattctcggtgctgaaaggcttcgaagaagtaatttatcaacaattgctagttcgattaatcaaatctcatctggaagctatccttcatcgagaggtggcactttctttttctgaatttatgaaaccggttttggttttatgccaatgctttgtgtttacttgttacatgggtataaaatgttccaatattacctttgt

SEQ ID NO: 18234 - DNA, 1332 bp, Oryza sativa
  ref <308>: DATABASE ACCESSION NUMBER: AK068640
  ref <309>: DATABASE ENTRY DATE: 2001-12-06
ggccgcagcaaaagcttcccttcccccatctccctctcctctcctctcctccccgcctccccccgcctcgataccctgcaagccctagctctctctcgccgccaatggagtcgcaggtgctggtggcgctcgccctctcgctcgtcggcggcctcagcacgtccatcggtgcgctgtttgtgattttgaatccgacgcctaatcttaagatgcttgggcttctacagggttttgccgctggacttatgttgagcatttcctttctagatttggcacacaatgcattgaattctattggtttcttgaagggcaacctttggttttttgctggagttcttttctttggtttggttgtcaagtttattccagagccaactgttgtgccaacagctgatgcaggcaagaagcagactgacgatgatggttcgggtaaagatatgatgaaaaaacatcgtcggcaagtattattcagtgggatcattactgctgttggaatcagcttgcataactttccggaggggatggaagtatttttgggatccatgaagggccttcgtgtgggactgaacttggctattgctattgctttacacaatataccagagggggttgctgtagctctaccactctattttgctaccaacagcaaatggcaagcatttaaagttgcaaccctctctggtttcgctgagccactaggaatgatcattgttgcttacttgtttccgagcagcttaaatcctgaagttcttgaaggcctacttggttcagttggtggggttatggccttcctcactttgcatgaaatgttacctctagcatttgactatgctggtcaaaaacaggctgtcaaagcagtctttgttggcatggccttcatgtctgcaagcttgtatttcttggagatcagcctgccaaaggaagtgagcttgtagcacatgactatccatacaagcttgtcacactatcctctgaactgaagcggagaacttaggagagatgttaactttctgagcactgccaggcagggatgtggggatatatggttcgccatttatcaaacggaaacaaggatttgtgacttagattcgcgcgttggccatgtgtatgctatcacagctggtcattgtatttgaccattttacagtgaagatgaacagtctgggatgggtggcaaaacaccacccagaatcagaatgtaacctccgcttgttggggaggaataggacacaacttgaactagcagactgatcagatcagtcctttaacttgaccagtgtacattggttgaaggcactgtgagaaaaataaaaataaaaatgcttcgttttc

SEQ ID NO: 18235 - DNA, 1399 bp, Oryza sativa
  ref <308>: DATABASE ACCESSION NUMBER: AK068641
  ref <309>: DATABASE ENTRY DATE: 2001-12-06
ggccaggttcaggttaatggtcaaccaccaccaccactagttgcgctactgagacagagcaatggaggagggggcgaagatcgggagggagcacgagcagcagcagcagcagcacgggagggtgaacggtagcgggagggtcgcggccgtcggtggcggcagcggcggtggcggggacgagattgagattgaggtcgccgcagccgcaggggcttcgccgtcgcggcaacacggcggtctgcacggcgatgtccaggcacccacttggaagagatttcttgcacatgttggtcctggatttgttatctccatcgcataccttgatcctagtaacttgcagactgatttggtagctggatccagccacagatattcgttgctatgggtactcctatttgggttcatatttgtgttgactgtacaatcattggcagcaaatttgggtatcattacaggaaggcacctcgctgagttgtgcatgggtgaatatccaaagtatgtcaagtactgcctatggttactagcagagcttggtgttattgctgccactataccaggagttttaggaactgctttagcctacaacatgctactccacatccctttctgggccggtgtcctagcatgtggggcatgcactttcctaattctcgggttacaaggatatggggctcggaaaatggagttcactatatcagttcttatgttggtgatggctacttgcttttttatggaacttggcaaagttaatcctcctgctggtggggtaattgaggggctttttatcccaaggcccaaaggggattattctacttcagatgcggttgctatgtttggttctcttgttgttccgcataatctcttcctacattcttctttggtgctaacgagaaaaatgccatatacttccaaaggacgcaaggatgcttctacattcttcttgcttgagaatgcattagctctgttcattgcactacttgtaaatgtcgctattgtatcaatatctggtactatatgtgccaacaatctctcatttgccgacacaagcacgtgcagcagtctaacattgaattcaacttatgtactactcaagaatattttgggaaaatcaagttcaactgtgtatggtgtggccttattagtttctggacagagctgcatggtggctacgagttatgctggccaatacatcatgcaggtacatttacctaattactggagtagattagattagggcctcaaggataaacctagtagtacataccttcagaagatgtatcatctcaatattaccaaataatatttcgagctaattgcatgcctactgaatttgaaatgtaactttgcttagaaaaattgaaatgtaacttctgtgttaaaatatttagttacaactggt

SEQ ID NO: 18236 - DNA, 1171 bp, Oryza sativa
  ref <308>: DATABASE ACCESSION NUMBER: AK068642
  ref <309>: DATABASE ENTRY DATE: 2001-12-06
gttgcttgcttctcttgctggttcgtcggtcggtggagtttgagcctgcgccatggctgtcggcgggagagggagacggccgctgctcctgctcctgctcctcctcgccgtggcgctggcgctggcggcgcgcgcgcgggcgcagctgtcgccggggttctactcggcgagctgccccaccgtgcacggcgtcgtgcggcaggtcatgtcgcaggccgtcatgaacgacacgcgcgccggcgccgccgtcctccgcctcttctaccacgactgcttcgtcggcggctgcgacgcgtcggtgctcctcgacgacacccccgcggcgcccggcgagaagggcgtcggccccaacgccgtcggctcgacgaccgtcttcgacctcgtcgacaccatcaaggcccaggtcgaggccgtctgccccgccaccgtctcctgcgccgacgtcctcgccatcgccgcgcgcgacagcgtcaacctgctcggcgggccgagctgggcggtgccgctcggccgccgcgacgcgctgtcgccgagtcggagcgcggtgtcgaccgacctcccgggccccgaggccgacatctccgcgctcgtctccgccttcgccgccaagggcctgagctcgcgcgacctcgccgcgctgtccggcgcgcacaccgtcggccgcgccagctgcgtcaacttccgcacccgcgtctactgcgacgccaacgtgagcccggcgttcgcgtcgcaccagcggcagtcctgcccggcgtccggcggcgacgccgcgctggcgccgctggactccctgacccccgacgcgttcgacaacggctactaccgcaacctcgtcgccggcgccgggctgctgcactccgaccaggagctgttcaacaacgggccggtggactcggtggtgcagctgtacagctccaacgccgccgccttctcgtcggacttcgccgcgtccatgatcaggctcgggaacatcggcccgttgaccgggtcaaccggcgaggtcaggctcaactgcaggaaagtgaattcctgatcgatactactagatagcattgccgcgcgcaaattgttcatagtacaaagtttaaagttatataatcagctgtcaatttcatgtattaagtgaattatgacataagaatgcaatagaaatgtcccaattttagacacc

SEQ ID NO: 18237 - DNA, 941 bp, Oryza sativa
  ref <308>: DATABASE ACCESSION NUMBER: AK099063
  ref <309>: DATABASE ENTRY DATE: 2002-08-28
atgtgtacaagatcgatcgtgcatgtaccaaatttggaatgcccatgggtccattcagactggcagacctcgttggttttggtgttgctgcggccactggtatgcagtaccttgagaacttcccagagagggtctacaagtcaatgttgattcctcttatgatggaggacaaaaggacaggtgaggcctctcggaagggcttttacaagtatgaggacaagaggaaggcaactcctgatcccgaaattatgaaatatattgaaaaatctaggagtatggctggagtaacaccagacactgagttgatgaagctaagtgagaaggacatagttgagatggtcttcttcccagtcataaatgaggcttgccgtgttcttgatgagggaattgcagtcaaggcttctgaccttgacattgcctcaatctttggcatgggattcccaccgtataggggaggaatcatgttctgggcagattccattggtgcaaagtacatccatgacaagttggaggtgtgggcgaagcggtatagcgacatcttcaagccttgttcctaccttgcagaaagagcagcaaatggggttcctctgagtgcaccagctaagcaagtcaaggcccgactatagatgaacatcctgctttcctatcaactgcggaaactatgcagaataatagaacacacgccaatggggcatttatggtctgtagaatagcccatccaataataattagaataggattcttgaagagttatgtgtaatctgtatgacgcctctccaagttcttgaaccattactgcgacagtgttttgagttcagacattctttaaaatgtttcatgtgccaatggttataagcagattgaaaaggcatacataaaaacagcgggtgttaattagtttgcttcaagtttgtcaaatgctgctatatgttcattgcgcc

SEQ ID NO: 18238 - DNA, 1590 bp, Oryza sativa
  ref <308>: DATABASE ACCESSION NUMBER: AK099064
  ref <309>: DATABASE ENTRY DATE: 2002-08-28
gtgctaagctaaagctacctagctaataggatacactgattaggagaacaatatggcacaactgaggcttacgctgctggctatgtctttgctgatactctcgccggcgatggacggcggcggtggcggcaccgtccaggcgcagatcgtgccggcggcgatctcgttcggtgactcgaccgtcgacgttggcaacaacaactacctgcctggtgccgtcttcaaggccaactacgtgccttatggggtgaacttcggcagccgccgtaagccgacagggaggttctccgacggcaagatcgtcaccgacatcaccggttgttaacttcacacacgagtacacatagaccatagttacctgcatgctatttttgcaaagttgcaattatatattttggttaaaaaatgatatgatgcagctgaaacgcttggctttgagagctatgcaccaccgtaccttagcccgcaggcgaagggggataaccttctccttggcgccaactttgcctccgcggcgtccagctaccatgacgacacggccgccatgtatgatgcaattactttgacgcagcagctcaagtactacaaggagtaccagtccaagcttgcggcgttgatcggccagaagaatgccaccgccatcctgtccgacgcgctgtatatcgtcagcacagggaccggcgatttcatccagaactactaccacaacgcctcgttgtcgagccgctacaacgtcaacagttactgcgatctcctcatcagcatcttctccggcttcgccaacgttgggggcgcggcggattggtgtcacgtctctgccgccgctgggctgtctgcctgccacaatcaggctgtatggcaagggccgcagcgggtgcgtggagaggctcaacggcgatgctgagaccttcaacaacaagctgaacatcactgtcgaagcgctggcgaagaagcattccgacctcaagatcgccatcttcgacatctacacaccgctccgaaacatgtccgagtcacctgcatcgcaaggcttcttggaggcgaggaagacttgctgccagacagggacaaggaagacgagggtctacctctgcaacccggcgacggcggggttgtgccgcaacgccagcgacttcgtgtacttcgacggtgtgcacccttcagaggcggccaatcttgtcatcgccgagtccacgatattggcagggataagcctagttacctaactcactcggtctgactctgaactaccatggcaggtgcatgaaggcgctacagttcatcatcaattagtttcgaaggttgtgttgtgttttcaacctaagaaaaagtgttctccagtgatccattcgcatatacaaacaatatagtttgtttctataaatatgtgcgtcagtctcctactgacctgcataactgcaagttaaatccaacttaaaacatgtcatccaactaagtatgaatgacgaacagtgttactctactcttttttttcttcttcatttttattaagattttttcctacccagactagcagctctcagaacatgctgtaatgatcttaacagaaaagaagtcaaatcgtttgcc

SEQ ID NO: 18239 - DNA, 2364 bp, Oryza sativa
  ref <308>: DATABASE ACCESSION NUMBER: AK068643
  ref <309>: DATABASE ENTRY DATE: 2001-12-06
gacgatctctcgtctctccacgtcgcatcccaatccccatctcccttctcgcttctcgcttctttgaccggcggcgccgatgctcctccgccgcggcgccgcctcctcctcctcttccatggcctttccagcgccgtcgttttacccgtcctccaacagtgcttccctaaagtgtacggtggtggctgcgctcgatggaggggctcaacggcggtttcaacatagccttgaggtcggggacctggcggcggcgtcggagcctctagcacaggggtttggcagcggcggctgctgctggaggtcccagcgatttgaggtcgctgcggctcccccaacagttttttggaggtcttcgacgtggtgacgacgcatcgagttcgacgggtccctgtcgccgccggcggttaggtgcgtgattagcagctccctgtgttttcccctttcatcaatgggcgtgtgattcgagcgattacattgatttaaatgtggatttcgagtttctactgtctactgggtaggccaatggcatagaggaggattaggacgagaagaagctgtcctctctgttgcctctcctgtacagcccaacatactactatcatattgtctgtagctagcacatgcagaagatagactggcaggatgaggtggtggtggttcttccccagacccgtcactgctctggttgcatttattaccttttgggttgttgtcctatgaattgagcctaattagttgatattcaacagctggaggttatatttcctttttacactgcatcttcttggttgttcaacagcagtgatagcatttgttcccttagtgaaacagctatcttgttgtagcagtgatagcttttgttcccttagtgaaatagcttttggcaaattgtactatcttgttgtattggctagatgagtgtcctagatgtttaatatggcccgaggagtttgctaagatgtgtgacagaattcaaaaatatatttcaaaagaatttttgttgttacctctaaataaaagaataatgttctaaatgataactatattatgttgaatcatctctaaagagttccttctatttttgttcccactggttccatttacatggtcatgaagcagtttgcttgctggaccttttgcgtcgcttacatggctcctcccattatatctggcttttaggtaaagactattcatttctttgattgttggataactaagccagggtgatgtgaattgcttcttgctgattctgctgtatttaatacaaatttttcctatctttttaacagtgcttcagagggcaatgaattcttctgaagttttccattgttacctgttttcagtttcagtaaaaaactaagctcttcaatgtaaatgggacaacaatttgaatagttactataagatcttttgggatcaaaagatttacttgttgcaggcttaactttcatttacattgcagaaacttatcattggtagataaggatgtgttaaaaggggcttgcttagtacaactcaaggcgaggctaatactaagccattcagaacacgatagccatgacagccaggcaaaggcaacagaaaaaggtaagctgcaggaatttctctttttacctcaccattaaacatttgcctttcattgtttgtacctttttatgatatgccatttacatgtctgatggccacagatggttctgaaattcaattatatttttgtgtaactttgcaaacagatcgccatatgcccatatattgccattctttgtaaatgacaggcgtagacatcaatcactcagtccagtaattgcataatagtagtatttccttgtttttatcttatcatgtgaaaaagtcccctataaaatttggctttctcactattattgctttgcagaattaacatggcaagttttgtacaggaactacatatgcttgcattgaagtttctttggggaaccaggagatgctttaatctttattgatgtattgtcctatggtttgttggatagtcgatctacaaaattaatcctaacactcccaatttacctacaagaggtattcttggatgggtacaacatgttagtttggttcggttttgtcaatacaaaatcatgaggatttctagatgtgtatattctgtgatattatctataatttgatatatattaaatttatctgattatacatgagtttatatatgcgacaccattacgaactgctactatagtctccccgtgttctcttcatacacatgaataacatatatggtacaataaaagagaattgtagttttacagcctctgtgcaagtagctttttaagtttaaatggtaaatatttagttttcccttaagagaagtttacc

SEQ ID NO: 18240 - DNA, 3185 bp, Oryza sativa
  ref <308>: DATABASE ACCESSION NUMBER: AK068644
  ref <309>: DATABASE ENTRY DATE: 2001-12-06
gaggggaaggcaatccgaaaggaaattaggctagggttttcgccatggctaccacccaccacctcgagctccccctctccattcccaatctctccgactcctcctaattaatcccgtattcccaccccccaagccaaggacagcatctcgcatccgcgtccttcaattgatttgattgggttccccccctccatttcagggtttcgtttcgcatcgcagcaatcttcccgacccagcaagcttcttcttcccttgggtccgttagggtttgagattgagaggggcggcgctggcgatcgagattggtacggcggcggaggcggaggtgggcggataatgtgtatactgtgcgccgtgcaacggtggtcgcggcgcgtcgccaccatgctgccatggctggtgctcccgctcatcctcctctgggcgctctcccagctcctccccgccgcctaccgcttcgaggtcacctcccctcgcctcgcctgcgtctccgtcctcatcctcaccctcttctggtacgagatcctcctcccccgcctctccctctggcgcgcccgccgctccgcccgcctccgcgaggagcgccgcgcccacgccctccagctccacaagctccgcaagaccgccacccgccgctgccgcaactgcaacaacccctaccgcgaccagaaccccggcggcgacaagttcatgtgctcctactgcggccatgtctccaagcgccccgtcctcgacctcggccctgccgggaccctccccaccggctggccctgcacccaggattggccaaatgctgccggtgaccctgcctactggctcgacctccgctgctcctccgataacctgtactcggggttctcgtggcgcttgttctcttccttctgcgtcagcatgaggtggttctggagggaagtgctcagatttggctcctcgggggacggcgatggcttgggccgagatggtaaaagattagcaaaagaaggggagaacggagcaaaggctgaggagagcagagtcgagaaggcgaaaaggaaggcggaggagaagaggttggcgaggctggagaaggaaatgctagaggaggaggaacgcaagcaacgggaggagatggcaaagctcgtggaggagcggaggaggctaagggatgagaaagcagaggctgaagagagatccaaaggcgccacacctgttggggagaaggatcctcggaaggaagtggaacgtagacggcaggagaggaggaggaaggacgagaaggataagggatcaagcaagagcaattcagattgcgaggatatcgagagaagagtaaccagggaaggggagagaaagcgggattctgatagaagaaatgagccagagaagcgggatgcaacaagagttggcgctgagggtcataagccctataattttgatgctaacaaccagggtagtaagacagtacagagcaaggcaaagtactttggccgtatgacaggcggtctgttatcttcttcaagaggttttggtggcggttccttttttggtagaagtgctcagacctctgctcctcaagttaacaaggtgactaaaccgcttgttactgtaactgaccagagtaacgtagtcaaaagaggtgcccaacctcctgcaacagccaaatctgctactgctggaggaacgacaaattcatggactaatgttcatcgatctgttagtccaaatgtgcagtcacagcctactggacttaaaaagtcatggcaccagctgtttagtcgctcagcatctgtgtcaccttgtcctgatgttcctgctacagcccgtgaaatgaacgggcaaccagaaccatatggagcacaaattagcaatgctcaaatcttcctatcgcagtatccccctctggacagtaaccctagttcaagccgctgtatgcaatttccaggtttcccaccagtgaatggagcacctgccaacatgtcactctctcattttccagctggacatatgccctactattgtgagccagaaccaacagtgtttgaagaaccagaacaatttgaggacccatgctatgatcctgatgcaattgcgttgcttgggccagtttcagagtccctagataactttcctctcgacttggatagcgggttcatctctagtgacatcaccaaggaaacacatgcgaagccttcaccaatcgaatctcctctttcaagatcacgtacattcgaggataatcctattaggcactcaactggaaaagggcctaatggttctattttgcctgaagctagcaatgaacatgggggcacatggcaaatgtggggcacgccattagttcaagaaagtttaggtctacgaggtcctcagactgagtggctcctaccaaacacaaatcaatttaaccatggtgccagtcatttgaatggtggaacaagaagctcagtgggttctggtttggatgacaatgatttatggctgcagaaagcgcctttccagcaaatgcctcttgatacaaggagtctgttcctttcacatgatgtctcagagaatgctatacacaacgatttggattttggatcaccaaacaaatcagcccgtttgcaccccattgggccacctggtcattcttggtccaaggaggcagtggtgctgaatggacctcaggaagctagtaagatttgctcaccaacaggggcacatgttggtggtggctttttttcaactaatcctgatgtacagtcagtttggtcgttcaatcaaaaagagacaacatagaacatataaaacacaatgtcaagccaatgcttccttgcctcatttgagtttaagaagttgaggtgatatgttggactgtattccttggacgtgaatgatagttcccttttatttagtatcacttacctgttaacatgcgttagcattaggtctctcacctgatgttttggcgcatttaaccttttttttggattcaatgcaaaatgggctgggaactcatggtgcacaatcacttgcttgctcagatgctcttattgatgtggtgactagtgaaatcatagttcagtcaattgtccagcacttcactggattccctagtttgccctgtggttgaactggttagttccagtgtgacctttgctttcagtctgctgagaggtgtggagagaagataatgaaggaatggtcgtggagcaagtgctgttccc

SEQ ID NO: 18241 - DNA, 2354 bp, Oryza sativa
  ref <308>: DATABASE ACCESSION NUMBER: AK068645
  ref <309>: DATABASE ENTRY DATE: 2001-12-06
accccgtttcactccacttcactcgcactccggaccgagtcggccgctccgctcctcctcctccactttgtccgcctcggccgctcgcttcccatctcgaaaccccaaatccccacgccaacgcgcgcggagatttcctcgagatctgccgccatggtcgccgccggcgcagcggcggccgcggcggccgcgcccagggtgaacccgtcgccgtccccgcaccgccgccgcgcctcctccgcgctctccccgtccaaatccgccaactccaacgccaacgccaatgccgacgccgccaggggcggcggcggcggcggcgggaagcccaagggtaaggccgtcccctcccgctacctcctcgccccctcctccaaatccacctccacctcctcctcctccaccaccaccaccaactcgtcggcgacctccaactccacctccacctcggcctccacgccgtcccgccgcttcgcgtcgccgctcccgaggcggtcctcctccgtcgaccgcccgcgccccacgagcaatgcggctgctgctggtggtgacgccttggggcccaatggcactaccaccaccaccacgaggagcctctctgttgcttttcagggccgcgcctacttcctggagaccagcaaggcgaagccggccacctccccttcgccggtgcggcggccggtggcggcggcgtccaccacgcccgagaggaggcggcccagtatgggcacagtgccggagagggggaaggtgtttgaaggtggtcatagccagcagaggtggccaatgtcggcgagggctgcccatgggttcgaggggaatccgcttaccaagagcttggactgttctctggacaagaggggtgctgctgtgctggctgctgtgcgctcactgcggcagtcaatggtgttcgaggagggggtgcggcgcgcctcgtttgatagcggtgactacttgatgtcatcggacacagagagtgtgtcatcagggagcaattctgggtctcaggatgcaggcatgggcagagcacgctcgtccccaaaggggatgagtgtgcctgcgcggttcttgcaggatgctgcggccagcaggccgaatcgccttgcagatccaagcacaccattcatgacacatagctctgggtttgcatcatctcccaggacagcaccagtcaagaaatcgttgctgaatggctttgtttcgtctccactgaataggccaattaggcagccttcaccaagtaagcttgtaggatcacggaggatgtcaagccaatcccaaccaaggggctctgtgggggtgagtgcatcatatggagatcagcatggaagaagttcatctggttatgggttggatagtcaagtgaaaaggaggtggcttgggtgtagtaaggttgactgtgagcacctattgaggattttatgcaatcgacatttgcagtggcggtgtgtaaatgcacaggctgatgctgcacttgccgcgcagaagatgactgcagagaaatacttaagtgatgcatggattactaccttaggaatgcgtaaatctgttgctcttaaaaggtttcagctacaactattccggaacaattggaaactcatgacagttctaaagggacaaatggactttctggaggagtggtcttttttagagagggatcatgcaaattctttatctgggattgtggaagctctaacggccaccattctttgccttcctgttactgatggagcaaaggctgatatccaagatgtcaaaaacgctgttggctctgcagttgacatcatgcagacaataggaagttcaatatgtactttgctcgctaagctatctgggacaagtattttggtttctgacctcgcaaaaatcgctacacaagagcgcactttaatggaccaatccagagaattgctgtccacacttgcatcaatgcacgtcaaatactgtagcctacaagggcaaagagtacagacgacaactcacaggaggcgtgtgcgttcgtagagcagacaactcttgactcactaaccgaagagtgtaggtgcagttgcaaaatctggttggcttgctggacaccgagcgatcagactcttctgaagaagctatcgtagtctgccgatacaagttctagcgctcttttggccctttttttggttcggtaggttcttattgctgagttgagctatgccaagcctatgtagaacagattaaatgcaacttgtatatagctgtaattttaggtgagcattaggtctaactaatttaagggttctttttttgttcgttggatgaccttccgccgtcggcgccatcaaccatgtcaatgcaatgcagtatatcctctattcttctatgcc

SEQ ID NO: 18242 - DNA, 2529 bp, Oryza sativa
  ref <308>: DATABASE ACCESSION NUMBER: AK068646
  ref <309>: DATABASE ENTRY DATE: 2001-12-06
ggttctttccttcttttcattgcaaaaggagtaaaagcggcagcagcagaaaaaccccttcttgcccccgccctccgccgccgccgccgccgaggagccggccgtccgccgtctccctctcgcccgtgggcgtcagacggcggcggaggcggccccccctccttctgctgctgctgggatggcctcgagcgccggaggggacccgccgccgccggggctcttcgctgctgccttacacgcttgtagtggtgcaagcgcacttgaagaacatatacatgctgatgatagcaacaccatttcagataataccctggaacagttgggttttctagaccaagagtcaaatgatgcaagcgttaacacagaaaagatacaatcaagcacaccaaaatgcaaatcagtggaagacataccaatagcaccagctgcaaagagatgtaagaacatggattccaagaaacttgtcccaaacagcaataacaattcatgtctcactggtagccaggctcccagaaagcttcccagaaagggggactaccctgttcaactacgtcggaatgaaacatttcaggatacaaagcctcccagcacttggatatgtaaaaatgcggcctgcaaagctgtgttgaccgctgacaatacattctgtaagcggtgctcatgctgtatttgtcatcttttcgatgacaacaaagatcctagcctttggctggtctgctcatcggaaactggtgacagggattgctgtgagtcatcgtgccacattgaatgcgcactccagcatcagaaggtaggatgcgtcgatcttggtcaatctattcagctcgatggtaattattgctgtgctgcatgcggaaaggttattggaatacttgggttctggaaaaggcagctgatggttgctaaagatgctcggcgtgttgatatcctttgttcccgcatttacttgagccatagactattggatggcacaacgcgttttaaagaatttcataagattgtagaggatgcaaaagcaaagctggaaactgaggttggcccccttgatggtacatcttcaaagatggcccgtggcattgttggccggctgcctgttgctgctgatgtgcagaaactttgctctttagcaattgatatggcagatgcgtggctgaagtcaaactgtaaagcagaaacaaaacaaattgatacacttcctgctgcctgcagatttagatttgaagatattacaacttcatcattagttgtggtactgaaagaagctgcttcttcacagtatcatgctatcaaaggctataaactctggtattggaatagcagagaacagccttccactagggtgcctgcaattttccccaaagaccaaagaaggatactggtttccaatttgcagccttgcacggagtatgctttccggatcatttcatttactgagtatggtgatctgggccactctgaatgcaagtgttttaccaagagcgtggaaatcattcacaagaacatggaacatggtgcagaaggttgctcatctactgccaagcgggacagcaagagtcgaaatggctggtcatcaggcttccaggtgcaccagctgggtaaagtcctgaggaaagcttgggctgaggagaatggttgccccagtgaggcctgcaaagatgagattgaagattcctgctgtcaaagtgattcagctttacacgataaggatcaagctgcacatgttgtttcccacgagcttgatcttaatgaatcctcagtccctgacctaaacgctgaggtggtgatgcctacagagagcttccggaacgagaatatatgtagtccaggaaagaatggattgagaaagtcgaatggttccagtgattctgatatttgtgctgaggggcttgttggagaggcaccggccatggaatcccgatcacaaagtcgtaaacagacatcagatttagagcaggaaacttatttagagcaggaaactggtgctgatgatagcactttgctcatcagcccacccaagcacttctcccgtaggttaggtcagttagatgataactacgaatactgcgtcaaggttatacggtggttggaatgttctggacacatcgaaaaggactttaggatgaaatttctaacttggtttagcttgagatcgacggagcaggaacggagggttgtgatcacttttatccgcacccttgctgatgatcccagtagcttggcaggacagctcctggattccttcgaagaaattgtatccagtaagaagccgagaactggtttctgcagtaagttatggcactaatccagccaggtgaaagccgaaatcgctatcgtatattcttgcaaggggaaaagttgacggggccacaattttccgctttgctgaaatactacttttaactactgataaatgtatatgtagtttagttttgatgctgtgcttggcgcccagccagccattacccatgatgatatattggaacttgaatgtctgtatctggtttactgggaaatgaatacccttatcat

SEQ ID NO: 18243 - DNA, 1143 bp, Oryza sativa
  ref <308>: DATABASE ACCESSION NUMBER: AK068647
  ref <309>: DATABASE ENTRY DATE: 2001-12-06
gagcgagaggctagaggcaaggaaggaggcagcagcagagcagagcagccatggcggccgctgctcttctctccccctcctccctctccctctccctcccccaccccgtcctcgctccaccccaggcaagccctccgcttcgcggttggcacaggaggaggagggcgcgcgcgcgccacgtcgacggggacgagacgccgcgcggcgctcgtcccgtgctcctccagcgtgagcgcgcgcggccccgcttcgggaggcgacggtttggccctggagaggaggcgcctgctgctgtccggcctcgtgtcttcgttcgtgctcgtcctcccggtttcagattcgcatgctgttgccgagatggatgaagatgtgaaaatggctacgctagttgacccgatcaatgcatattcttttctttacccagttgaattgccaggaaagaaattcacattcaaatgggtagaatccagaaaaccagaacgatattcctctgctgcaccactatctcctgatgcacggcaacgtattgtatcggagcgagttgacatgatacataacgttgtcatctcagtctcgattgggccgccaaattcacgttttccgccttccaaggacaagagcaagtgggatccagaagatgttgctgattggattttggctgaaaaatcttcactgaaggtgacgacaggccaacgcatgacagagagttctgtccttgatgcacactcttcagatgtcgatggagaaccatactggtactatgagtatctagttcggaaatctcctacacaatctgcaccagaaccaaatctgtttcgccataacgtagcctgcactgctgaacgagatggttacttgtactccttgaatgcttcaacactcagcaagcagtgggaatctatggggccttctttacagaaaacagtggcatcctttcacctcctaccccctacagaaaattatgttcctccataccaggatccatggagattttggtgacattgcaattcgtttcctccttttactgtttcacgttttaggtgatcttggaacatcaggttttagaacatattttcctgtaatggatgcttcagtgatgtctgcactttcagttctacaaaatgaagcctagttcagttgtgc

SEQ ID NO: 18244 - DNA, 1452 bp, Oryza sativa
  ref <308>: DATABASE ACCESSION NUMBER: AK068648
  ref <309>: DATABASE ENTRY DATE: 2001-12-06
ggtcgacttgcgcattagagattagtggtgtggttttcttatcgatttgtgcattggacaccatccggtcggccggcgccattggaggaggaacatggcggcgatggcgtcgccgccgccgccgacgagagtgtgcgtcaccggcgccggcgggttcatcggctcgtggctcgtcaagctcctcctctcccgtggctacgccgtgcacgccaccctccgcgacccgtgtgatcccaagaacgctcatctgaagcagctggacggggcgtcggagatgctgagcctgttcaaggccgacgtgctcgacgccggcgagctgtccgccgccattgccggctgcgagggggttttccatgtcgcctctcccgtgcccggagacaagatcgtcgatcctgagttagaagtaatggctcctgctgtaaagggaacactgaatgttcttgaagtttgttcgtcgtctaagaaggttcagaaagttgtggtggtgtcatctactgctgcagttcattacaaccccaattggcctccaggtaagcccaaagatgagagctgctggtcggacagaaagatatgcatggagaagaaggttagtaatgtcagaaattagagcttcatgttgttgaacatttgttttcttattttactgagggaggaactaaagttcatcattttacaaaaatttttttttgaaattttcatttttacaatttctgtgtttcaggagtggtatagtgcttccaaggttatcgctgaaaagatggctttggaatatgcagagaaaaaaggtctaaacgttgttacagtctgcccttgtttagtttttggtccacagttgcaaccaactgtcaataccagcaatgaactcctcatctatataacaaaaggaggtccaaacgtaatgaggaacatgttgttgcacatagtagatgtccgtgatgtggctgaagctttgattctggtatacgagaaaccagaatcatctggcagatatctttgcgcaccgtatcacatcagcccaaaggctactgtggagtttctcaagaacatttaccccaactacaattatgtaaagtgtagtgctgaagtgaatggcaagactgaaatatttacaccaatttcgtcagagaagttgaagagcctgggctggaagccaaggaaattggaggagacactcacagacagcattgagtactatgaaaagacaggaattttgcaggatgctggtggaagaccttgcgttctgccttacctttttcactttcttgttgagaactgagcacttcaggagctgtgttttctctgtatgcttgagacactagcactgaatatgtgtgtgtgggaataacacaaaaggcctatcttggcacgacatataacttccatcaatccttcagttctgcggtgacagtatatctttcagtacaaagtaacgtgttgtcgccaattaagctt

SEQ ID NO: 18245 - DNA, 2949 bp, Oryza sativa
  ref <308>: DATABASE ACCESSION NUMBER: AK068649
  ref <309>: DATABASE ENTRY DATE: 2001-12-06
ggaaggcgaggcgagcacacatggccatgggggatgactactccaaggcgaggcaagccctggcggtgagcgcccacgagtgctcgctggtggacgcggtctcctccgcggccacgccgccgaccgcggacgacggggaggggcacgcggcgggcttcttcgagggcttcgtgctgggcgggatccgcgtggacagcgtccgcccgggcctcgtcgactgctccttcaccgtcccctccaggctcaccgatcggagcgggtgcctggccgcgggcgcggtggtgtcgctggtggacgaggtggggtcggcggcctccatcgccgacgggcgccccgtcaaggtctccaccgacatgtccgtctccttcgtctccctcgcgcaggcccgccccggcgaccgcctgcggatcacggccagggcgctcggccacaagggggcgtactccgccacccacgtcctcatctccaacgccgccaccggcgaggtcgtcgccgagggcaggcactccctcttcggcaggatgaaggtcgtctccacctccaccgccaccgccaccagcaagctgtgaccatggattccaccctgctgccatggttaattaaagtgtgagtattatggcccttctaagtagcgtaataaggaggttttgattttgatcacaaatgtcttcagtatctgattgagcatacgacacacctgaacctgattataccatttttcttttttgctttactagctgtaaattcagttatcgaattacctgccccagtacagtgttaataacattgtcaactttcattatctgggtcgccaagtttgggcgttcattcattttatgttcattagtttcagagcagttgatagagtatatgaaaaataaatgaaaagaattgtaactatttttgtctttgagatttatggattgcagctcgaaatgctgttgaaagcgttaactggtagtttggtagaaagggagtatgagtatgagcatgttgcgcagttcaacactaagctcaattcccacgcgaatttcgtgaggtcgaattctgtttgctaggtgtgttagcgaaaaaactgctatttgttaggagataaaggatgattcctccaatgtgctatcatgaattgagagttggatggtttcatggtgtcatctaattggtgtagtttttcattttgacattcacatttggtaggatgtaaggagtgttgatgaatcctggaaattctaccttaaaggaatgtctgatttagcactacttactgctcctcataggagaatgttgaacttgtagtccattaggcatggttgtgcgttgcaattaatttataggtaaaacttttatatatgcgttatatgcaatttaaaagccaatgttgaaaaataaaccacattgaaaatatcttaaaatcttattcaaaattaagtttgaaaattcgatttttggctgtctttagcttactagagcaaccaatgggactctaaaaatcttgcttacacttaaccatcgtttaattttgccacctggccattgatttgtctgttgttgttgtcgtcgtcgttttgtgagtgcgtggaaagagggcgggattgctaattggcgtgcacgcgctagctaacgaagtaacgcgcgtttggcccaccaggttcatatttcagcccagtccgagaagcggcccatgcgtgtacgggagatcacgcggtgatgaacgctgatctgactgatctttaatcgtgaatgctgatttgatttttttctatttttgggagacgcgcgcatctaccgtaataactctgtttagttttagatacgtaattaagagatacgtaattaaggtaagttttttttctctctttttaagtgtttttattaacagattgaaagaaatctacccatgaaaaaaactttcaaataaaattgaaaactttctattaaaaaattaaaaacatacctaaagttttaaaaattcaacttaaaatttgaaactctaaacacaaaatttaaaaaattacaagggagaatagcctatttggtccctaaagtttcgtcttaaggtcaatatggtacttaatattttattttgtccaatcagatgcttaaactttatcatatggtccaatatgaattttaggcccaccagaaacaccatgtagacatgccatgtcatcatcttattaaaaatggatagtgaaatatctaatttgtctatttgcatgtgatacaaaatactagaactaattaatcttatatgattagttaatttaatctaatcccaggaattgatataaacacaaaatggattatgttacatctatatacgaatcgatatatttgattatttgcgaatgcaagtgtgtatgacattttttctttttcttttttcactcttatgttgtatgtaagggtatattaggcatttcatgacagatttgtataagatgatgagatggcatgcctatgtggtgtttttgggtccaaggaccatagtatactgaaaaatagactttgaggaccaatttgaaccaattaaaatatcaaggaccatattgacctcagagcgaaagttgaagggccaaataggctattatcccaaattacaacttgtaatttgaaactttcaactcaaaatttgaaaaactttcaatttaaattggaaaactttcaagtcaagattttaaaactttcaactcaaaatttgaaaactttcaatttaacttggaaaactttcaagttaatatttgaaaactttcaatttaaatttaaaaactttcaactcaaatttgaaaattttcaatttggattggaaaactttcaagtcaagatttgaaaactttcaactaaaaaaatttgaaagcatgtatgttgcggattgaaaacaaatggaaagaacaagtaaaaaagttaaaacgtgacgaggagagggtgcgcgaaaataggagaaaatcg

SEQ ID NO: 18246 - DNA, 2547 bp, Oryza sativa
  ref <308>: DATABASE ACCESSION NUMBER: AK068650
  ref <309>: DATABASE ENTRY DATE: 2001-12-06
ggccgtttcctctccacttccgcccccatctccgcgtgcggaagtcaacgaagcggagcgcctctgccgcctctccttcccacccacctctgctctgctcctcatcgtcgtcgcgcggccagctcagccggccggagaatccaccgaatccggcgcgaatcccgcagccatgttcggcgactccgacggatccaaggacgccaaccccggggcgccgccctccaccaccgacccgcccttccccaaccgcgagctcaccctcagcagctacctctgcgagaagccgacgctcgcctccgccgccgccggtggcggtggcggtgccggcccgtcctcgccgccgaaccctgctgcagccgcggctggcgacgacggcaagcactgcgtcgagcgcgacttcctccacctctccgcgcccaagcgcggggatccacccggcgacgactcatccgtcgtcggcggtaagaagccccgcctcgactccctccagctctcgctgtcccttaactccgacggccccgctgctccgccgtcgtcccagccgccgctcgcctcgctcctccagcccgtccccgcgaccgatggagatctacggggagcggcggcggcggcggccgtgcccgcggcccccgccatgaggacctacagcgcgacgacggcgcgcacccgcagcatcaactccgacgacatgtcctactcctactccatcttctcgcacaaccctagctgttccctcacgcacaactccaccgacatctacgccgccggtgaaggtaccaacggctccgttcacagccgattcaatttccgccccatgggggacggcagcgtcgccttcgccacgccgccgctgaaggagggcacgtcgtcgttcttccccacggagctccctgcgaggatggcggcggcggccgcggcggctgctgccagcgcgggtggcagcttcgacggcggtcgcggtgggcttcacgcgtcgcgccctgacaagatcctgcgggatattgtgtccgactctgtgacggctatggcgcaggtgctgcaggatttcccaagcgaacgactggagttgctgcgagaggcagtgcggggcatgattgactctcatgagaagagggatgagctggccagcctgcagcggaagcttgagcgccggtcagacctgaccaccgagacattggggagggcgaacaggacgcagcttgagatcctggtggccatcaagactggaatcgcgacgtttgtcaccggtaaaggccgggtaccaagcagtgagcttgtagaaatgttcctcatgacacggtgccgcaacctgaactgtgagagcacgctgccagtggatgactgcgattgcaagatttgctccaccaagaaagggttctgcagcgcatgcacgtgttcagtatgccacaagtttgactgtgctgcaaatacctgcacctgggttgggtgtgatgtctgcggacactggtgtcatgttgcatgcgcgctggagaggaatttaatcaggccagggccgacgctgaaggggccaattgggacgactgagatgcagttccaatgccttgcttgcaatcattcttctgaaatgtttggatttgtcaaggaggtgttcaattgctgcgcagagaactggaatgctgagactctgatgaaagagctggattttgttaggaagatatttgctggttgtgaggattttgagggcaaggggcttcatgccaaggctgaagaggtcctcagcttgcttggaaagaaaattatttctcctttggatgcaacaaacagtatcttacaattcttcaaatatggagttacagattattctgttactggtagcacgtccaaaggtatattggcagctcaggcaagtcaatctacagatatgcggtctcttcaaactccaacgatcacaccaccgaaatcctcattcaacttcaagaccactacttccattcttgacaccgatgcacttaagcccagcccaaagccactctctattgaaccccatttcagcaccgcttctaaggaggatgactctagcctcgaaaccatcgtgaaatgcaaggaagctgaagcaaaactcttccaaaagttggccgatgatgccaggaaggaagtagatagctaccgccagattgtccgctccaggactcagaagctagaggaggagtatgctgcgaagctggcaaaagtatgcttccaagaaacagaggagaagaggaggaagaagctggaggagctcaagatgctggagaattcgcactacgactacctcaagatgaaaatgcggatgcagaccgatatccagggcttgctcgagcggatggaagccacaaagaagatgtgggtataggctggtaaaaattcatctgacgccgctgaatgtgtgaaaaatctgttgtacaccattaggatgttttccgagttgttgtattcatcctgtgatttgtgttaccagttaaaactgttataagcagagggccgcctaacctcgtgctggcagataacataactagacaccatctcatttaattgctttccgtttgc

SEQ ID NO: 18247 - DNA, 2197 bp, Oryza sativa
  ref <308>: DATABASE ACCESSION NUMBER: AK068651
  ref <309>: DATABASE ENTRY DATE: 2001-12-06
gactgctcaaacccccgccgcgccaacctagggcatgctcccaacccccatggccctagccctagccctagccctatccccctcctcctcctcgccatgaccgccctcgcctcccccttcctcctcccccaccgccgccggaagcgccccctcgacgattcccacttccacggcccgcagcgccaccgccgccgccgcctctgcctctgcccggcggccttcccctccccgccgatcccgcccgaggcggcgtcgtcccccgcgttcgacatggggggcttcctctccttcctccggggtaaacctaggcacgacgatgccggcctcggggtgtacaggggctgggtcgacgtccggtcgcgggatctctcggtggccaccgccatggaagacgacgacgcggggtttggcccccggttggtggtgaggcggagggtcggggacccgaggaaggccgccctggaggccgcggcgccgcgtccgcgggtgaagagggagccgtactacaaggaggcgctcgagaggatgaggagccacgacaagaggctgggcgagctcgcttcactggtgaatctagaagaggagaaactcgccgagctgcggaaggcggctgagccacccaaggaggacctgtctgaactctttacacctctaactgctgaagaggaaaatgaagttcataattgtttgtttggtaggggttcaagtactgaaatcctagcactgcatgagccctccaacattgaagttagcagagagaagttccggtgcttgagactgactgcctggttaaatgatgaggtcattaatttgtaccttgaattattgaaggagagagaggcaagagaaccaaaaaggtttttgaaatgccatttctttaatacatttttttataagaaggatgatgtttggagaaatgccacccaagtgttagcttcgcaaaataccattacttcttctctttggggggcagtattgtgttggcctgtttggttagggatgggaaattctaggaagttcttcatttgccttcatccactcatttgatatccttttattatgaattttaccatttcattttcatttgtgaatgctgaattgctgatcaccaagtaaatgctaatcttcattgactccctgaattgttggtcgtttggttcagcttgcttgcggaaaaaatggctatgactacaaatctgttaaaagatggactacccgcaggaggttgggttatgagcttattgagtgtgataaaatctttgtccctgtacataaagatgtccattggtgcttagcagttataaacatgaaagaaaggacattccaataccttgattctcttggttgtgtggatcatcatgtaccaagagtgctggctagatatattgcagaggaagtgaaggacaagagtaataaagagatcgacacaaacacttggcacgaagagttagttgatgatattcctttgcagcaaaatgggtgggactgtggtatgtttatgctcaagtacattgatttccacagcagaggattgagcatgtcttttagtcaggaaaacatggaatatttcagaaagagaacagtgatggaaatcttaagattaagagctgactaatcaaatatggatccttttccttttggtgaacagctgattaacttaggttgatattcgtagactaaattgtcaatcgtgtatacattgttggaagttgccggcaaagataggaaatatatttttccagtgagaagctggagttttgtcagtatgtaaacctgtatgttgataacaccagatttctgtaaagttccgttgtttttggtgattcagttggcagaaagaacaagagggggaagagaatctttgcgctcggttgaacaatctgtatctgaagagtttaacttttaggagcctagccgtagtgctactgatacttaccatttgctgctcatttgattgttcttgtagtgctttggtagctggtggggattggcatgctctggtgcatgccagaaaagaggaaaggttgtacccggcatccacaagttaaacaaatgcgtataatggttcttcatttgtaaaccatgtgtttgtgttgtcaaatttactcgggacatccgaaacgtaaaacatcatgttttgtgatttgtttaatgaaaccttatgttctggggcaaaatgttacttaaaaccccaggt

SEQ ID NO: 18248 - DNA, 1448 bp, Oryza sativa
  ref <308>: DATABASE ACCESSION NUMBER: AK068652
  ref <309>: DATABASE ENTRY DATE: 2001-12-06
gctatataggcatcagccaagaagtacagcggccgtggcaatggcagctgctgcaatggcgacggtggcggtgccgcgggtgaagctgggctctcaggggatggaggtctcggcgcaggggctcggctgcatgggcatgtgcccggccttcgagccgcccaagccggaggccgacatggtggcgctcatccgccacgccatcgccgccggcgtcacgttcttcgacacctccgacctctacggcccccacaccaacgaggtcctcctcggcaaggcgctgcagggcggcggcgtgcgcgacagggttgagctggccaccaagttcggcaagttcttcgccggcggcaagccggggatccgcggcgacccggcgtacgtgcgcgcggcgtgcgagggcagcctccggcggctcggcgtcgattgcatcgacctttactaccagcaccgcgtcgacaagaaggtgcccatcgaggtcacgattggtgaactcaagaaactagttgaagaaggaaagataagatatattggcttatgtgaagcatcggcatcaacaatcagaagggctcatgctgtacatcctatcactgcagttcagcttgagtggtcattatggtctagagacgtcgaagaagatattgttccaacttgcagagaacttggaattggaatagtagcttacagtccacttggtaaagggtttttttctagtggagctaaactagtggattctctaccagaccatgattttcgcaagcttatccctagatttcaaccaggtaatatcgagaagaatgctgaaatatttgagcgtgttaacgaaatggcagccagaaaagggtgcacaccgtcacaactcgcattggcctggatccatcatcaggggcgtgatgtgtgccccatacccgggacaacaaaaatcgggaatttcaaccaaaatgttgcagcactatctgtgaaactcacccctgcagaaatggctgaactcgagtcttatgctagcaatgtccatggcgaccggtatcctctgatgatggctaacactacttggcaggactctgagacccctcccttgtcgtcttggaaatccgagtaaatcattttcgtctgttcaaatacagttcctggttcaaaatagctggttcaaaatggaagagcgttgcacaagatttcatcagaagtgtttcatcagacgcgttgcttgctcctgttcttctacatcgcgtgtatttggaatgagctgacctgtcgatctatgcgtagcgtgttgtgtcatatgctttcgtgatgtttaatttgcgcgtaaaacttacttgagtgaagcgccgtttcataagcttgtgcattgcacgcagaatgtgtggtaatattaaataaagtgttgccatcaccagttttaatttgtgttattaacatgtttgttcaaattaaccactatcatgtctaatcct

SEQ ID NO: 18249 - DNA, 1529 bp, Oryza sativa
  ref <308>: DATABASE ACCESSION NUMBER: AK068653
  ref <309>: DATABASE ENTRY DATE: 2001-12-06
ggttcactctctccccatttgtaggctggcggcgcgagacaccgccgcgttggcgcgccgctcacctcgacgccgagatggcgatgtcgtgctcttcctcctcctcctccgtgcgcctccgattgaatctagcgccctcccgccgccgaatcgccgctcccgccaacctccaggtgctccggcgcgtgggagtggcggcggcttcaatccggcttcgtgccgcccgcgccacgggaggtgatgcacggcaaccgttcgaccatgtgcctcgcggcgttgaggaggttggtgagatggaggaggacgaggagcggcggaggcggaggggtctcaagatcgccgtcgtggggtttgggaactatgggcagttcctgaccaggacgctggtgcggcaggggcacaccgtcctggcgcactcgcgctcagactactccgccgtggcggccgagctcggcgcgacgtacttcaccgacgcgcacgatctcgtcgagtgccacccggatgtggtgctcctcgtcacctccatcctctccgccgaggccgtcctccgctcgctccccgtccaccgcctccgccgcgacaccctcttcgccgacgtgctctccgtcaaggagttccccaggaacctcctcctcggcacgctcccggaggagttcgacatcatctgcacccaccctatgttcggcccggagtccgcgggcgacgggtggggcggcctccccttcgtgttcgacaaggtccgcgtcggcgactgcccggcgcgccgcgcccgcgccgaggccttcctcgacatcttcgcgcgcgagggctgccgcatggtggagatgagctgcgccgagcacgacgcgcacgccgccgagacgcagttcctcacccacaccgtcggacgaacactcgccatgctggagctccaaacaactccgatcaacaccaaggggtacgagacgctgctccgcctcgtcgacaacacctgcagcgacagcttcgacctctacaatggcctcttcatgtacaacaacaactccaccgagctcctcaaccgcctcgaatgggccatggattccgtcaagaagaggctcttcgacggcctccacgacgtgctccggcggcagctcttcgagggctcgccgccgttggactccgtctccgccgccgcagccgggtcgccgccggatgacgcaccaatcgatggcgatcttggcagcgacaacgaggaggagcaatcggagtaaatcggtgatcgtggtgtcacgctaactctgacgtcgatctcctgtgaagtcgtggccatggtcccttctcgggtcatttgcaagattcagaagttgctccccactatgaacatcaaatcgcaaatttggcttccttttcacctttcctcgcttcaatttactaccctgttcattcaaactccatgctaaatactccatacaataaaatacttgtattacatcgcgggtcgaatctatacatttttatcttaattttgcgaaatttcgtcgatttgaatacgaatttgtttgattctg

SEQ ID NO: 18250 - DNA, 3012 bp, Oryza sativa
  ref <308>: DATABASE ACCESSION NUMBER: AK068654
  ref <309>: DATABASE ENTRY DATE: 2001-12-06
gagaactcaagctctgagatctttttctctctctcctcccatggccgatcgtcgacatcgtcggtcgatctccccatccgtagctcctcctttcctctcctcgcaccaccggcttcgcctccatctggcgagtccgttttttccctttcccctcttccctacccacttcatcaagccaccacagccacttctcttgccgccggagataagctcttctactcgctgttccggccatctccctcgctccctctgcttgccaccgacctccccggatgcgcagtgagcgggaacatgcgtggccgatgacgtcgccgccctccagccaccggagcgccgccgccccgctcgccttctcctctctcttctctcggctctctctggaaccgagaaaaggaagacgagaagaaggaagaagaaggagaaaagaaaaagaaaaagagaaagaaaggctgacagcggcaaagatgtggagtggagtagtagtggagggagttgccgtggcgatgacgatgacgtgcttggccttcctcttggtctagaatatgtcgatgatgtgctcgggctcctcacagatacggctccagcagccccatgtgccacacctgtagaatgtgtggtcttgctagttgtatggcttgtagtcgtgggatgtcttggcttcatgcatgcacttgccttcctgtgctccctacgcatctggatcattttctgttgtagccgacggcgctccgtggatgcgcatttgagccctatggtgaagccacgtcacttcaattaattttagccatcagattagatttgtctgtccgagatttcttctttctccaccatgcacaacctatatggccttttctgtatcccaatgaacattgctgcgagtaggacagcccagcaatttcccaccaggccatttattcctcagtttctctcccctaccaaccgaggaagccgaggagcttcgcgttaggccagtcacaatgggtgtttcatttgagtgtcatgcgcatttaatacagtgacaagtcagcaaaagagcaatatttgcatgaaatgggtaggagagagagtaaactcgtttcaccatggtgacacgagatagcgccgtttcccaggtcactgaaacggggtgaaacagcattgagagttcatcgtttcacctccgggatcccgtgcgagcgctgctcttcgccatcttcgcgcgcatcgccggattcttcccgcgcgagtcccccatcttcccgcgcagcacctccatgttcccgcccccaaagcactggctcgaagcttttttccccaatctcacctgcaaccctagcgccagactcagtccccatcgccccgtccgtcccataccctagcgcaagaaccacgagcggagattgcggagctggatccacaagtaggtggtgaatcctgtccatctgccgccgtccgccgtccagcagccatggatccacaaggaggtggtggatcccgtctgagcgccgccggcagaggagggaataagcgtgggggcaagcagctgggcctgaagaggtcgtcggcgcctgctccatcaccggcaacagctcagccaccgctgcctgcaagttcccctcctgaagctccatcgccggcaacagttcagccgcctactccatcgtcaagtcctgctgttgctgcccccagttcatcccctgctgtaccgatgtcaaccatgcccccatggccaccgcaaggagcaggatggggctctgtaccccccaattttgcttttctgcaaggaaaccaacaaggcccaagttcatggttgtatcctacagaaggcttcgtaaattttctccaacagaactgtctgccgcagccacaagaaggtgaaaattttcaccttgttggtcagactaccaacacaatgtctactccaccaccaacaccccaagctgcagctaacaatacagtccaaattgatattcatgaagatgcaatcaatgatgcaagtgctaaaaagagaagtttgagatattggactcatgatgaggaagagagattggctagtgcttggttgaatgcttctaaagatcccattcatgggaatgaaaagaaaggtgatacgttttggaaagaggttactgatgagttcaacagaaaagggaatgggaagcgtacaagggaaataaatcaattgaaggttcattggtcacgcctcaaatcatcgattggagaattcaatgattactggactaaggtaactcaaatgaatacaagcggatatgacgatgacatgctggagaaggaggcacaacagatgtatgcaaatacatttggaaagccttttgcacttgtgcattggtggaagatactgagaaaagagcccaagtggtgtgcaatgattgagaaggacaaaaacaaggctgaagtggttgatattccagatgaacaaaagcgtcccattggtagagaagcagcacaagccgagcgcaatggaaaacgcaagaaggacagtatgtcagaaggaattgtcatcctaggggacaatattgaaaaaattatcaaagtgacgcaagatcggaagctggagcgtgagaaggtcactgaagcacagattcacatttcaaacgtaaatttgaaggcagcagaacagcaaaaagaagcaaagatgtttgaggtatacaattccctgctcactcaagatacaagtaacatgtctgaagaacagaaggctcgccgagacaaggcattacaaaagctggaggaaaagttatttgctgactaaggttccaatctatttacaggttccctaaaaaaaaatctatttgcaggttccagtctgttgtcttcacaatggtgaaagaatcaatgaaatctatgggtgcatcgtcaatttgcctccagttacctgcttgtcatcgtcatttgtagcttagttctgtcatatttcacctcgagttaacatctattcagttatctaaactttgctatgtagtgaacttggttgaatggtcatttaaatttatcaagtgaacaatcgtacct

SEQ ID NO: 18251 - DNA, 1378 bp, Oryza sativa
  ref <308>: DATABASE ACCESSION NUMBER: AK068655
  ref <309>: DATABASE ENTRY DATE: 2001-12-06
gtttttgcctgatccgatcccctcacctccgtccctgcttcctcccggcgaccaccgcccgccgcgcgatgggcggcgccgccgtctccagcctgcttgccaccccaacaccgacctctcgacctcgacccgtctccaccaccaccgcccccttctccgtcaacctctccaccgcagctgcccgcgcacctcgcctcctcctcctctcgcgccgccctcgccctcgccccgccgccgcggttctcggggtgtctgatgatacaggggtcaagatggctggctccgacattgttggcaagaacgatttgctgattgttggccctggagtgcttggtcgactggtagctgagaaatggcaggaggaacatccaggatgcaaagtttttggccagaccgcaagcacagatcaccacaacgaattgtcgaatattggcatcattccctccttgaagggatccacttttcctcagaaggttccatatgttattttctgtgctcccccatctcgttcggatgattaccctggggatgtgagagtagctgcctcaaattggactggtgaaggctctttcgtttttacatcaagtactgctctgtacgattgtagtgacaacgaattgtgcaatgaggattgcccatctgtgccaattggcagaagccctcgtactgacgtccttctaaaagcagagaatgttgttcttgaggcaggaggctgtgtcctcaggctagcaggactctataaaatagatagaggtgctcattttttttggttgaggaaaggaactttggacacacgaccagatcatattatcaatcaaattcattatgaggatgctgcttcccttgcaattgccataatgaaaaagggacacaggggtcgaatctttttgggctgtgacaataagcctctttccaggcaagaaataatggactctgttaacagaagtggaaaatttgacacgaagttccaaggttttactggtacagatggtccactgggtaagaagatggagaattcgagaactcgttctgagattggttgggagcccaagtatccaagcttcacagaattccttggtcttgacagttgacatgcttgtgtatgcttgcaaaaatcttcaactctaaatgaacagcaacacgttgtgaaccagttattttgttttgtttccattgcgttttttttaaaagacgtaaatactgtatatcttgttctgctatgtgcttatatcagttagcgttctaagtctgaccgttgtacaatggtttcggccagagaaatatttccacccgtgtcatgttggcctcgttctggtccgtccaacatctatttgtctctttgtaaccacatttgttatgaaaacttggtttcctttcg

SEQ ID NO: 18252 - DNA, 2121 bp, Oryza sativa
  ref <308>: DATABASE ACCESSION NUMBER: AK068656
  ref <309>: DATABASE ENTRY DATE: 2001-12-06
tgatggagggtgagacgcggagagcaaggcgtcggtgtcggccggtgcagctggccgccgccgcatgtgcgccgttcgtcgtgcttctcctagccgccgctgccgcggcggccggcggagaggccgtggcggcgtggaggacgacggtggaggacacggtggtggaggtggcggcgctgccggcggagctcgggggcatgctccatcggcgcgtctggtcgtccaaagagagcattggtaagcacgcacttagtcgggacggtggcctgtgcatccaggactgcgctggcaaaggtccaggcgacccatacacaccccctgtgacggagcactgtaaccgtaggtattacaaccaggggtgctagctgatctgcctttctgatcgacgccttaccgcagtacactactactacattggttccccgcatgcatatgaccggattaataaaagagtaaagtgcatagccggtatctaaacttgtataactgtgttatttgagtccccaaactcttaaaatgcatatctaaatctcaaaacttattaaattgtgtcaatccgatcccaaactgccatgacacctccaggatcctacatggcacgccacacgaacgatgatgtggcagcatcacaaattctacaccaactgacaagtgggcctcaataaaaaagctttttttaatatctttttctgttcattcccatcctgtcctttcttcgtttctcctcttttcttcctactacattgaccgtagccatggcctctggtcgagctgtctctttgatgacatgaacagcagtgcgtccatgggcaagaaggcatcgacgcggcagccgcgtcgacggaggcgctgcagcgtgtgggcagcgacgccagcgcggtgatggacgtggttgtgtcctgggcatcatcgaggagactccggccgggagcggcgcgactgcgtgtggcccggcacgtttaccatggctcggggctgtggcggcagcgacaaacatctgcgatgactagtgcgttaacagtgtcgacaactttgtggcactatcgccactgccatgttcaagctggggtcatcggctatctacgtctgcgtcgttgcgccccaacaggctcacgtccctgctgtcccactacgttgccaagctgctcgacatgctactggtgttgtgcatggtagacgccctgctcaagaacggcggcagtggcgttgtcgtcgccgcgagggtggcgaggttggtttgccgttgcgctcgccgtcggcgaagccgttctggccgaagcttagggttattgccgctggcttcgacttcggaattcgtcgccatcgtcgatcgttgtccaaaattgaggtctccctcatcttctccatgccaaactccctccttcccctctcctctccgagccatcctgctgtcggagctcaccggcacggtacccgcatgctgcctacctgttcggccgccattgtgtcagcacggtgcgccgccgctgaacgtccccgcccaagccgagaacacctccagctccaagtcgacgccctgatgctcctaggcagccgtgcccagtcggaagctcgtcggagcgccgctacttcgcatgcccccgccgcttgtacgacagagaaagagaagaagagaaaggaaaaaaatgaaaggagaaagagaaaagggtggaaaagagagttttaaatgggtcctatttgtcggcgccaatgtagaggtattgatgaggccacatcagcgtccgtgtggcatgccacgtcagcgccacgtaggatggcggaatggtggtggctatgttggaccggaatgacatactttagcaagttctgggacttgaatctgtattttttgatttcggagacccagatggcacaacgatacaagtttagggaccgggtgtgtagtttactcttaataaaaccacacgcatgcacagcagcacaaggcgggccgtgcagcttaattatattaaccgtctcgtgtgcatgtgctgaagaaattacagttggtgaataaccaaactccgaaggggtggaaaattaagccctttaggcaattgttccatgttttccatctttttcttccatgcgttgttgcaaataaaatagatgggatttgcc

SEQ ID NO: 18253 - DNA, 765 bp, Oryza sativa
  ref <308>: DATABASE ACCESSION NUMBER: AK068657
  ref <309>: DATABASE ENTRY DATE: 2001-12-06
cccaataattcgatgaaaactctgttcttcgtttgagagcaacgatgtaatctgacagcaactatgtaaccgcagggatcgacatgatctccatggacatgaagggccaaaagctgacggtggtcggcgacgtcgacccggtggacgtcgtcggcaagctccggaagggctggccgtcggcgagcctcctctccgtggggccggcgaaggaggagaagaaggaggagaagaagccggaagagaagaaggacgacaagaagccagagcaacccaagctcgtcttctacccgccgccgccggcgtggcacgcccacgccgcgccgccgtcgtacagctacgcgccgccgcagtacgtcgtccacagcgccgaggaggaccccaactcgtgcgtcatctgctgatcatggcgtcgttagcttgtacattttgcagttcgtctagctgatcaacctactcaccggtggtcactgatcgggacccggacgtggcggtggttgggtgtcgcacgcttgcactcctcccctatcatttggctggttctctggctcagctcggtgacggtgatgatgcgtttggttttgtgtgtatatggttgctgcgcttgcttgttgctacttgctagtactagacaaacaggtgagacagggaagctaagctagctatgtgcagatagttttgtgccatttctttttttttggtgatgagatgagacatgggattaaagagaaatcgtactgttataaaagaagcgtataattcgatccc

SEQ ID NO: 18254 - DNA, 1922 bp, Oryza sativa
  ref <308>: DATABASE ACCESSION NUMBER: AK068658
  ref <309>: DATABASE ENTRY DATE: 2001-12-06
gggaaatatcgcaaccttgggagccggaggtttatccccaccacgaacgcctcctcttcttcttccgatgcggggaggctgagctcgcaatccccaaagctcgcggagatggacgccaagctgctcctcctccccttcccctcgccgccggccactctccaccaccacccgccgccccccaaatccctcttcctcggcgcctccctcccgctcctccacccgccgccgccgctgcggctgctgcggcccggcgccccgcggcggctggcggtggtggcgcaggccgccgtgaagcggcgcaaggagatcccgttcgacaacgtcatccagcgcgacaagaagctcaagctggtgctcaagctccgcaacatcctcgtctccaacccggaccgcgtcatgagcctccgcgacctcggccgcttccgccgcgacctcggcctcacccgcaagcgccgcctcatcgcgctcctcaagcggttcccgggtgtcttcgaggtcgtcgaggagggcgtctactcgctcaggttccgccttaccccggccgccgagcgcctctacctcgacgagctccacctcaagaatgagtccgagggcctagccgtcaccaagctccgcaagctcctcatgatgtcgcaggacaagcgcatcctcattgagaagattgcgcacctcaagaacgatcttggactcccgccggagttccgcgacactatctgcctcaggtacccacagtacttccgcgtcgtccagatggaccgagggccagggctggagctcactcattgggaccctgaattggcggtgtcggcagcggaggttgccgaggaggagaatcgagcgagggaagaacaagagaggaatctgatcattgaccggccactcaagtttaatcgggtgaagctaccacaggggctgaaattatcaagaggggaggcgcgcagggttgcgcaattcaaggaaatgccatacatttcgccgtactctgacttctcgcatctgcgatccgggtcggctgagaaggagaagcatgcttgcggcgtagttcatgagattttgagcctgacacttgagaagcgcacgctggtggatcatctgacacacttccgggaggaattccggttctcgcaatctctgcgtggtatgctaattcgccacccagacatgttttacgtgtcgcttaagggggacagggactcggtcttcctccgtgaggcatacaagaactcccagttggtcgagaagagcaaactcgtgctgcttaaggagaagatgagggctcttgttgcagtcccacgcttccctagaaggggtgtgccggcaactagtgaggaggctgatagaaccaatggagctgcgcaaatgctgagtgaaggaagcgatgtagaagatgatgaagacgagggattgtcggatatggaagacttaattagtgagatttctggtggcaaatctgacacagactaccactggggagatggctgggttggcgagaatgatgactcgccaccagacttcgaagacgatgatggctcaagtcttaaagaagtcaaggtgactatgaagaaaactgctaattctgccaatggcaaggcacatgttcctgtttttcctgatggcagaccaagggaacgatggtaaaatgatctattttagattgtttggtagagtgtgtaatctttgttgttagttatttcatcatatctagaaagtcgcaaaaccctcagtcctttgaggtgctgcttgaattttgttaccgagcacatgaatagcatatcagaatttgaacagttcacatgaatcatcactaatatagtgaacgaatttgaagttgtgggggtttgtgatcaagcatacttggtgatataaataggtgcaaactgtaacaacttaagtataaatacaagcttaatttgagctatgtt

SEQ ID NO: 18255 - DNA, 725 bp, Oryza sativa
  ref <308>: DATABASE ACCESSION NUMBER: AK068659
  ref <309>: DATABASE ENTRY DATE: 2001-12-06
ggccccatttttattcgtctcagctagctagcagctagcccaagtactgacatacagtatgaagctgatgctcctcttcgccgccaccgtcgtcgccgcggcgttggtgctggtggcggcggtggatgtcggcagcagcggcgccttgttgccgatgcacgtgctgcgcggccgggtggctgacgtcgaggacgtggtggcgagcgtggtggaggaggaggaggcagcgtacccgcggaggaggatcctctacgacagccggtacgccagctacaacgggctcacggagagcaaggcggcgtgctacggctcctgccccggcaggggccagccgtacagcggacgcagctgcctcaacatctaccagtgcaagggctaaaagcttggagaaattaaagctgctggtgatatgatcgatcgatcgatcctctgcaataattctgcgtctgtactgcaggggaagatatgttcaaactaactgtgttgaaatgatactggtgaatttgtatgctgttgatgactttgtgttagtcgatcacttcatatatgtaatatgtagttaagtgttgtatccgattcacgtacgctcgtagttaatagctagtttgagcgttagatacaattaatatccggcctatacgattcattgttgttcgatgaattactgggacgaagaaactgattaatcgatgaataaaacaaaggtttgcatctgcatagaagtt

SEQ ID NO: 18256 - DNA, 1994 bp, Oryza sativa
  ref <308>: DATABASE ACCESSION NUMBER: AK068660
  ref <309>: DATABASE ENTRY DATE: 2001-12-06
gaattccactgcttccagaagcgagcgagctctcctttcctttctcctacgcctaggcttctagaagcttcctttccaaataggggctaatctcctgagctcgaagctctcctcgtcagcttcaggtggtcgggtgctgcctcctcctcctcctcctcctcctcctcgtcctcaaatctccccgagagttcgtgctttgccgcgagcagcgagctgcgatctcgcctgaatccttcgtcggcgggggggatgaattgatcacgcggtgtgcgctttctgattctgtcgggttcctttcagatgcacgagcacgtcggtgtccgcctcctctttgcttgatttgcttccgctgctgctgttaggtgcgcgagagctcgtgatggggtgaagcgtgtgttcacaggattagattgcgctcgcctgattcgctgcatcttgttcttcttgctgccgcctacgcgacttgatttcgtcacgccaaagccgtgacaggctgattgctaccttgcttggcgacctgtgctttaaattccaccattgtttgctggtgctggatgagcaaattcttggttcgtgtggctctagttggtagttcttgattgaggtgaggttctgagctgccatgaactaccgagtggtgaacccggtgaaggtggagagcgggccgtcgacgggcgtggcgaatggccagccgccgaggccgatggacgggctcgccgacggcggcccaccgccgttcctcaccaagacgtacgacatggtggatgacccgaccacggacgccgtcgtgtcgtggagcgccaccaacaacagcttcgtggtgtgggatcctcacctctttgggaacgtgctgctgccgaggtacttcaagcacaacaacttctccagcttcgtccggcagctcaatacctatggcttcaggaaggtggatcctgacaagtgggaatttgcaaatgagggttttctgagaggacagaagcatctccttaaaggcataaagcgtcggaaacctccgaattcatctccaagtcagcaatctcttggctcattccttgaggtagggcacttcggatatgagggagagattgatcagttgaagagggacaaacatctgttgatggctgaagtggtgaagctgaggcaggagcagcaaaacacaaagtcagacctgcaagctatggaacagaagctacaaggtactgagcaaaagcaacagcacatgatggcattcttgtcacgagttatgcataatcctgagttcatacgccagctgttctcccagagtgagatgaggaaggagcttgaagagttcgtctcaaagaaaagaaggcgccgcattgaccagggacctgaacttgatagcatgggtaccggttctagccccgagcaagtgtcacaggtaatgtttgaaccacatgatccagtggattcacttttcaatggtgttccatcagatcttgaaagttcatctgttgaggccaatggaggcaaggcgcaacaagatgttgcttccagtagctctgaacacgggaaaatcaagccatctaacggagagttaaatgaggatttctgggaggacctgctgcacgagggtgggctcgatgaggataccaggaaccccgctatagatgatatgaacttgctgtctcaaaagatgggctacctcaactcaagcagcaccaaatcgccacagtagtagctctggtctgatcttgctgcagctccaacgacccttgagtacttgttaatcaagcttgtcattatacttatccgctttgaggatgatcaatttgagtaggtctcctcccccatggtgatgatcttatggtagcatcagctgtacatactattgccgcaataattaccatcgtattctgttcagctttgtggaattagttttggatctgaatgtatggtactttgacagtggacttgagggtgctgtatgtacatataacagtctaactaaatgcagttgtgcgttgtaatgatgt

SEQ ID NO: 18257 - DNA, 2275 bp, Oryza sativa
  ref <308>: DATABASE ACCESSION NUMBER: AK068661
  ref <309>: DATABASE ENTRY DATE: 2001-12-06
gtcacaccagtaccaccacacagctagctagctggtatagagtacagcgcactagctagagcggtagagcctccagagtgctagccccatcagccacagtagtgttgagcgagctaaagctagcatacccctcctgcttaatttccatggcgccggtgtcggaggccagccccctcgtccaccaagacggcggcattattgcctcctttgcggtttacgccggcgcaccgtgctgcagtgcgcggggtaggatggccgagacagacggcgacgacgatgacgacgactatgactgcgcgcctgccgcctgagtcgtcgtcgtcgggtgaaagaagagctagctaatgtagtagctagtgtgcatggtacctgaagattaattagcagctacgaagtcatgctgacatgctgtagtactgtcttaatagagttgccactgcatatatatgctacttatttggtcgcacgcaagtaggtactcacttaattaagtatcagtttatggtaattagcttctactaatatatatatgtacctccccgagtaaccgtagtctaagctatgaggcagtacaaagtgtgtggtttttgtaccgggaagctagaggtcatcgtgccgataggcaaactgcgctgcaagctatatatatgcacataatacagaagcagttagtcaagtcgctagcaggtagcagcctagcagggcgcatgtactgtggttgttgatctccgttgcaataaattaaactgatatctacgcacttgactacttatttgtttgcatgatatatgcaccctggagacccaggagctggccggatcacgtactgtacgcaactacgcatgctgctagctatagctatgctttcaatctggtgcaattcccttctgtctagttaatttgaatctgatactgatagaaatgctaccactctaggctatcagtttctcgtgttgtatttttacttgaaagacatatttggatgatacacacgcaccccatatgcatatctaaactttggttttctaattaatgttgatactgtctaaactttgcctcgtggttttataatggttcttttaggccagcttgatatcagtataagattctgttggtagtgtgcacactttagaaatagctatatatatatatatatatatatatatatcatgcactatggttttcatgccactgtttgcacattaattatattggcacaccatactgtttttgcatgcatgttaacacacttttatgcaatcgttcatatttgcatcagttgaatgcaattatatgagtggcagatttaattgtaaattaagagatggtgcaatcgtatcagtcaattgtacatcagaagaactgcatccccttttctgattctagcagatggaatcaaaaatcaacaaaactgtaacagagattgtgtgagggcttgcatcaaaatgtgtatctaggaaatgcttagtatttttggataattgaagtacaactccagctttccattaacgagatcgaatggacttggatgcatggaaatgcttaatatagacaaaccaacggtaaggtcgatcgctatgctttttgcagtgacatttttataatttgggttgatgttttgaagtggattgtattgaaatttccctcgatcttttgtgagtacgttcttcatttggagttgtcattgagctctaagctcacatagcgggagaggattctaatccctcgagggggcaggggatgttcccctcgtctaactttttctctcaattttaatgtgtgagagaattctaatcccttgaggaggggatgtccccctcgtctaagtttttctctcaatttcaatgtaagtagtttttgaagaactctaaaaaaatattgataatgtagagttttgtaacatctatcattccgtcaaagttgagttttgacttctttttttcttttgagaagtttatatatgtgttgtgaatgttgtcattttcttgagattttttaacaatcatttagatagtgcttgaacaaaagaggggatatcttctcaagagtctaaaacacgtttccctcacatagcgtcctcacattgatgcaccatctattggtgcatgagaggaagagaagggtaaggatctcgttgtaatatcaactctgtgatggtaatagttcactacggttattagggcatgtataacagtgtttagtaacaagctctttgttaccatgcatgtaaataattttggtgatgtggaagaaagagaatggaggaaaagcaacc

SEQ ID NO: 18258 - DNA, 1042 bp, Oryza sativa
  ref <308>: DATABASE ACCESSION NUMBER: AK068662
  ref <309>: DATABASE ENTRY DATE: 2001-12-06
gtggacacgaaacagcttttgcattgcatcatgtcgaagacaaggatggacggcaaggtggccatcgtgaccggcggcgcgagcggcatcggcgaggcggcggcgcggctgttcgcgtcgtgcggcgcgacggtggtcatcgccgacgtccaggacgagctgggcgaggcggtggcggcgtcggtggcggggggcgggtgccggtacgtgcggtgcgacgtgacggacgaggcgcaggtggaggcggcggtggccgccgcggtggcggagcacgggcggctcgacgtgatggtgagcaacgccggcgtgctgctcccgacggggcccgtcgtggacatggacctcgcggctctggaccgggtgatgtcggtgaacttccgcggcgcggcggcgtgcgtgaagcacgcggcgcgcgccatggtgtcgcgcggcacccgcggcgccatcgtgtgcacggcgagcgtggcgtcgtgccagggcgggttcgggccggcggcgtacacggcgtcgaagcacgcggtgctggggctggtgcgcgcggcggccggcgagctcgggcggcacggcgtgcgcgtgaactgcgtgtcccccggcggcgtggcgacgccgctgagctgcgggctgacggggatgagccccgaggagatggaggcggcggcggagccccacaacgtgctccgcgggaaggtgctcaaggcggcggacgtcgcggaggccatgctcttcctcgcctccgaccaggccgccttcgtcagcggccacaacctcgtcgtcgacggcgccaccaccgccgtcaactacgccgtgctccagtccgtcggcctgtgacacggaccgacgccattaatttaatttaaaagaaaaacatatctttacgataaattttaccgcgttttgactggaaagatgatccctttttcttattaggcgatcaatggtgacgtggtgtcatagcatgtggtttgtaaaattgtgtttgttcgtttgtaatattatatgttggttgccattgcatctcatcatgatgcaaccttttggaccc

SEQ ID NO: 18259 - DNA, 2471 bp, Oryza sativa
  ref <308>: DATABASE ACCESSION NUMBER: AK068663
  ref <309>: DATABASE ENTRY DATE: 2001-12-06
gcacgcgaaaattctcgcgccgattccgaggggcaaccgccgcctcgcccccgcgccccctgccgccggcggcttcctccgcgccctcttcccctcacggcgctcccgccctccgccagagaaggacgagctcctccgcctcatcgccgaccaatgccgcggcctcgacacccagtccgacccctcccgcctcgccgacatcgtctcctgcatcgacgccctcgccgccgctgctcccggatccgataccgtttccgatgccgacaagctttccggtacgtggcggctcctctggaccaccgagcatgagcagctcttcatcgtgcgcaacgcccccttcttccgcaccgccgccggtgatgtgttccaggtaatcgacgtccccggtggcgccctcaacaacgtgatcaccttcccgccctctggcgcgttcgtcgtgaacggctccatcgagatccagccgccccagcgagtcaattttaggtttacacgcgctatgttgagagggagcaattgggaggtcccgtttccgccctttgggaaaggatggtttgacactgtctatttggatgatgacatccgcgtagcaaaggacatacgaggggactatttagttgttgaacgcgctccatattcatggaatggatagttgttaaaattcaaagttgattgaatgcatagccagtcttgtgatgtgccttgtgaatataagaagcagattgtcagagccttgtgctttctcagcaaagtgttaaccatcgtgctatgacatttcttttcctagacaatactatgttctcccggaattagatggtaagtttgattagtaatgcatgtgcagcaaggttcttcttccaaggaattgtctaggttaaataatacctaggtatcccctatgtgagagaacacaaacttgccaagtatttgatgtgcttttggacatatgaaaaagatgctgcccattacggtgaactacgttagcgaacttgacagcatattgttatggcccacgatatcaagagccatgatggaattgttgactgtttcagtaccttttgttagtattgttttgcctgttgcttccagctttaagtagtagtttttcacattgaagcaagttctcagcaaatcaggtcaatgaatgccatcatctgattaagatagtaaactatgtatggtcttgctttatctgtatcagggttccttttccttttatactcatgaggagtcaatgagatcaaatccaactttgctttgggaaaagtagcattgtagtgtcgcaagcttaatgatatgaaacattagattcagtttctgtaaccacttacccatgatttctaattctaggggtttcagatacagtgttatgtttcattccatctatcaattgaccactgaagatcagatcaactttttgcagggatcgggctctatccttctactgcccccttggaatgctggcaggatttgtagtgcaatgagaagagaattcaatttgccatgtctgaattttcctggttatttttgtttgctcgtttctttatctaggaaaaattctgctcaatacctggtttaatttttgctgcatcgtcaatgctccctgtcatttaagaaaagtaagtgaaaaggtatctatgtgatagattgattgaacatcactacttctccatgatattccaggcctgaacagaagcactgaagcaaaatacttttgaaatgctttcgttggtcctactgttgaactgaatagcaagttctcctttcaacagcttgtttcaagtgtctagtctgataattgcttccttgtactagactactgcaggttctagtcgcagtcgaacaacatatggtgaggctttaggaggacaggttggaccatggccctgggccagactacattgtgtgatgttgggcagtttgtgtacgctacgtgtgaactcatcagctcatcacgaaccagcatagaattatttttcttagtttgcttttgtttgtttggataccatttccttcaccttgagatatttggttaaggtggattgaacttagtaatgaagcaattcttttgtaatagcaggccctccctgaccaagtactggagcaacttcaaaggatagaaggcaaaggctccccatgtgaaaaaggacgctccatgaccctgccatgtgtggtcatctgcgatttggtgtcccatggacagtgatgcactgattccacccttcgagtcttaaaagcaatccaagccgcccggatggtagccagcagtccagcaccaagagctccaagacacggcggaccgagccagccggagggaggggatgattgagacagcggcctctgcggcgacgacagtggatcgtgagcagatttatcctgccacgagataagtacattgtactgctgactccgtttcaaaatatagctatttttagcatgatactttgttctaaaataaagctatttcttcatcc

SEQ ID NO: 18260 - DNA, 2055 bp, Oryza sativa
  ref <308>: DATABASE ACCESSION NUMBER: AK068664
  ref <309>: DATABASE ENTRY DATE: 2001-12-06
gagtcgccacttgcctcccatggctccccctctctgacctcgccggagcgccgccgggatctcgacggtgatgccgccgccgccgcctcccccaccgcccccggcggcgccggatccgccgcagctccatggcgtggtcatcatcaccctccctcccccggaccagccctccaagggcaagaccatcaccgcgttcacctacaccgacgacgacgtcaccccgcccccgcctacgcctccgccgacgcatctgccgacgcgggctctagtgcccgcgggggcgggggcgggggcggaggctaggcgatcgaggcgggggttctcgccgcggcgggcggcggcgatggtgctcgttctcggggcgctcgccgtcgcggcatactactccttctactcggacgtggccgtccagttcttggggatgcaggaggaggcgcagaatgagaggaacgagaccaagtcgttcctgctgccgctgtaccccaaggcacggcaggggcgcgcgctgcgggagtttggagacatcaagctcgcggccagaagattcgataatgacggcggagggggcgtcggcaggaaatctaggaacaaattggaggtcaagaaggcagctgcggcggggacgaactcgacggctctgctcccgatcaaggggaatgtcttccctgatgggcagtactacacatctatttttgtgggcaatccacccagaccttattttcttgatgttgatactggaagcgatttgacatggatccagtgtgatgcaccatgcacaaactgtgccaaaggacctcatcctttatataagccggcaaaagaaaagatagtccctcccaaggatttattatgtcaagagttgcaaggcaaccagaactactgtgaaacatgcaagcaatgtgattatgagattgaatatgctgatcgaagctcctccatgggtgtccttgctagggatgatatgcatattatcactactaatggtggaagggaaaaactagattttgtgtttgggtgtgcatatgatcagcaaggccagcttttggcctcaccagctaagaccgatgggatccttggtcttagtagtgcaggaataagccttcccagtcagctggccaaccaaggcattatttccaatgtttttggtcattgtatcactagagatccaaatggtggaggatatatgtttctaggggatgactatgtacccagatggggaatgacatcaacacctatccgaagtgctccagataacttgttccacacagaagcccaaaaggtatattatggggaccaacagctcagtatgcgtggggcatcagggaactcagttcaagtgatttttgacagcggaagttcatatacatacctcccagatgaaatatacaaaaaccttattgcagctatcaaatatgcctacccaaattttgtccaagatagttcagatcgtacattacctttatgcttggcaactgattttcctgtgaggtatttggaagatgtcaaacagctcttcaagcccttgaatcttcattttgggaaaagatggtttgtaatgcccagaacattcaccattcttcctgataattacttgatcattagtgataaaggcaatgtctgcctgggattcctcaatggaaaggacatcgatcatgggtcaacagtaatagtcggagataatgctctgcgcggcaagttggttgtgtatgacaatcaacagaggcagattggatggactaattcagactgcaccaagccacaaacacaaaagggctttcccttcttcctctaacaagtattgtgcaataaacatatgtaaatgatacatagagactaccaatagagctgcttacgaatagcatatcctgttatgtgccgccctatctcctctacagtccatagtataaatcctggttgtttgttgtatacttgggtactttttgtaatatagggtgttgtatacccaagaagcagtgtatgtatattcggattaatggagtttcagatataataatcattatcgttattaagactataataaagtctagattgtgt

SEQ ID NO: 18261 - DNA, 2348 bp, Oryza sativa
  ref <308>: DATABASE ACCESSION NUMBER: AK068665
  ref <309>: DATABASE ENTRY DATE: 2001-12-06
gagcggcagcaaccacctttggttcgtccccaacgccacgccgccaccaaccgcgccgcccaccgcccacgacctccacgccgccgccgccgcctccgcctccgcctccccctgccgctgcgcgccgcgggtcacccgctgccgccccctgacaccggtgcgtgccccgtgccccgtcgcccggtccaccctctccccgccgcctctctcgccatcttccggtggctcgccgcgaccagcccctgcctttggcctcggttggagtggctgatttggtgcgataacatccccaatcttcagctttgcggtgtggaacgggagcaagctgcagcgtgggagtggaattagggtatgatatgtggtagtagctactttgtgaggagaaagcacaaagggtggtcactgattcagggtaggtttttgagattgtatctggtggtcactgattcgggtggcgtcagctatattgggtgatattatgatgaagcaaatatttgggcggcggaagaatgccaagtcagctgataaggatttcttttctgggacgagcccttccgtgttggaccaggtttcaggtctcggagttgctgatagggccacgtctaacttgggtagccaaccgccaattatctctagtactgggctcagctatgggagtggaaaccgtgtagagaatccaaacacaaggacaaatggcaatttgtattcttctagctttcaaccgttgccgagctttaaagatgtgccaaattcggagaaacagaatctgctgatcagaaagttaaaattgtgctgcattgtgtttgactttactgatccgacaaagaacatacaggagaaggaaatgaaaagccaaactctgttggaaattgtcgattatgttgtgtctgccactgttaagtttcctgaaatagttatgctggaaattacaagaatgatttcagcaaacttattcaggacactaatttctccacccagagagaaaaaggtgcttcaagcttttgatttagaagaggatgaagcagtgatggatcctgcatggtcacacttgcagattgtctatgagttgctattgaaatttattcaatctccagaaacagatgccaaattagctaagagatatatcgaccattccttcattttaagactacttgacatctttgactcagaagaccctagggagagggagtacttaaagatgacacttcatcgtatctatggaaagttcatggtgtatcggccatttattagaaaagctatcaataatatattctaccagttcatctatgaaactgaaaaacacaatggcatagctgagctcttggaaattttaggaagtatcatcaatggatttgctttaccactcaaggaagagcataagttgttcctggtacggaccttaattccacttcacaagccaaagtgcatcgcactgtaccatcaacagttgtcttacagcatcacacagtttgttgaaaaagattgcaagctcgcagatactgttatcagaggcctcataaaatactggcctatcacaaacagcacaaaggaggtgatgtttttgggggaattggaggagatactcgatgcaacccaacctgcagagttccaaaaatgtatggttccccttttccgccagattgcatgctgccttaatagttctcactttcaggttgccgagagggcattgtttttgtggaacaacgaccacattgagaatttaattagacaaaacagtaaggtgatattgcctatcatcttttctgcactggagaaaaatgtaattgagcactggaaccaggctgtcaaaagtctctctcttaacgtacaaaagttattctctgatcgtgaccctgaactttacaaagaatgtttgaggaagtatgaggaaaacaaagctaaagaaaaggatcataaattgaagcaagaatctgtatggaaacgcctagaagaggttgcatcagcaaaagccacaagtggcgaggccgtcctcatctctccatcccttgctcgcacatcatcacttgtgtaggaactttgttaaaggtcttggagaatcatgagatactgtacagtattgaatgtatatacaaggtctatgaaggtgtgcaaatgaaggggggaaaaaattctgagaaggccagttgggtcagttagactagctttcatttttgtaaatcagatgtcttgggactcctggcttattttgttacttgtagtttgctatggcgaatggttaatctgccaaaaagggattctgtgtctttctttgcttgtttagttaaatatataggccctcaggattgtaaatggaagcaaatctagtactctctgagggagtgtttgtc

SEQ ID NO: 18262 - DNA, 1442 bp, Oryza sativa
  ref <308>: DATABASE ACCESSION NUMBER: AK068666
  ref <309>: DATABASE ENTRY DATE: 2001-12-06
gtctgttgcaggccagctaacggaaggcccgggcgacatgggtttgcagatgatgcgtggtaggccctgcgccccgtgctgttcgtcctcctcctcctcctcctcctcttcctcctcgtcctggatgccctccaagcatcctcacgcgccattgagtcgaaggaaaatctcatctgagtcacttagagcattggccttgcacctcttgcccaaacgtcggaaataccaaaatggggatatctcaaggatttcagcatcttcgtccggtgtgcttgaaatcaccgagaacaagtccaataacaaggctgatgcagaaagaaagatccttgatgatgctcttgacagaaagccgcagattgactgggttgaagaagatatctcttcttggatggataagagttacacaagcagcaatttggagtataacttattaatgcaaaacattcaggtcttagaaagtagtttggctggtaaagacttggtaaggctggaaagagatatccttgtacatatcgaacggctgggagcattgaaatcattcaacgcgtctatctccagggccactctaacacaaacatatgaattagagttttcacttcctggggatattattaagcttgatccagagattcctctcgaggagcaaaatgatgtggtaattgttcgaagtgggaaaagtcaagagaggaaactgaaaagaatgaaagcatcagaaaagggctctcgggtctccgtgaaaacaccctcacgaaaatcaaagaagtccagtagtagtcaatttatagctgagtggaaaaactatccaggccgaagaaggagcattgtacgagaacaatcagcattgctggttactatcaaggagtgtgcaaaccttgagaaaataagagaaaacttgttgaaggatgggagtgaagtcagccatgcaagctgggccaaggcagctggaattgatgaagctttgttgaggagtaggctgcaagaaggttactgctgccgagagagattactggtaaccaccgagtggctagtcaagtacattgcaaagacatacgctggaatgggaacagcttttgaggatctactgcaggctgggaaaatgggtgtccttaatggagctgagaaattcgacagccaaaaaggatgcaagttctcaacttatgtgaagtactggataaggaaagcaatgttagcacttcttgctgaaaactctggagtaatccagctgcccgcaaggatggagggtataattcgtaaggtcagggaagcgagaagggcgattcgctacaacacagggaggaacccaccagatgcagaaatcgcagccctcatcggtgtatcagttgccaatgttaggttggcacggaaatgctctcgtcgagttgtgtcgctttacacagagatcggagttggacagaatgcaaaatttgtggaagtgactccgg

SEQ ID NO: 18263 - DNA, 1844 bp, Oryza sativa
  ref <308>: DATABASE ACCESSION NUMBER: AK068667
  ref <309>: DATABASE ENTRY DATE: 2001-12-06
gatcccgaaggttacatcgaccaaaccaaaccccccctcccttctcctcgcgtcgacgcgtccatcctccagaaagagagagagagagctgcccgaggaggaggggggcaaccgtagcgaggcgttgctcgtgcggatccagagggggggcgcagatccggacgggccggggaatggcgtcgtcaccggaggcggcggcggtgggggaggaggagaaggggaaggggaagaaggaggaggggcggcggggcggcggggtgctggggaggatgtggcgcgcgctgttcggcgggcgcgaggactacgagaagcggctgcagtacctgtccaaggaggaggccgccgtgcacgcgcggatgcgccgccggacgcagttctcccgcaccgccgtccgcaacctcatcgtcctctccgtcctcgccgaggtggtggctattgtctatgccattatgacaacaagaaatgagcatataacatgggaaatgagggcaatccgagtgctgccgatgtttgtcttgcctgctgtatcttctgtgatatattcaacagttgtaaaattcacaaggatgcttgagcggaaagaccagaagacacttgaaaagctgagagctgagaggaaggccaagattgatgagctaaaagagagaactaattattacctcacccaacagcttattcagaaatatgacctagatccagctgcaaaggctgcggcagcatcggtattggcatctaagctcggagaggaaactggcttaaaagtacatgttggtgaagaaccaaaactggattcagcagttgctaggagcaatgatgtggagatatcaccatcagaagggctgagaaacaggaagcaatccaatgcaagaggtagccgaactggaggcaccactgctgctcaaaatccagctcagggagctgaatccagtctgacaagtagctctggcctggaacagcctccaatggtggtagaacattttcaaggctcaggggcaagtgatggtggatggatagcaaaaatcgctgctttacttgttggggaggatccgtcgcagtcgtacgctttgatatgtggaaactgtcatatgcataatggcttggccaggaaagaagattacccgcacattacctactactgcccccattgtcatgcgctgaacacatcaaagcaatctttggggcaacattctggctccaattcaggacggtcgacaccagttgctcctgctgatggaatatctgctagcagttcagtagtagagagtgaagtgagtaacatgactacaattcaggagctgaaaaatgaagaaaataccgagaagcaagaagtgcaagcaagttgatcggtcataaacttatactgctggtctgtgtgaaaattagcacatctatttggtgtatattgccgtattcaactggtttgaaccacagatgttgcactgctgtaaattggtaatagtgcctgatatgatccacctacagaggccgagtacaaaattttgagtcaccatctttacatccttggatgtatgaattttgttgtcaatagggtgggggacaaacgactacctgatgtctgacaatgtgagatttaaaagctagcggatggagccaagcagttcagttgggcatgaagcatggtgttggtctaaaacttagacacaatcaatcccccatatctgtttacccgtgctttatttgcagttgcaccttcggagatgaggaattttgagttctgttagtttctgaaccttgacgattaccatttccctgagatgtctgtaacttgcagcatttcgtctgcaactattggtttcttttgagtagtgaaaagtgacaaccgc

SEQ ID NO: 18264 - DNA, 1678 bp, Oryza sativa
  ref <308>: DATABASE ACCESSION NUMBER: AK068668
  ref <309>: DATABASE ENTRY DATE: 2001-12-06
gcggggccgcccactctgcgttttgcatcggcagaggcgcggtggagaaaaaaaaaggccgagcttggatggaaagctccaagcttttgcgctgttcgcttgcctgagccccccgtcccgtcccgtcccctcgcctcggcaagaacaaagagcatgcgagattagatcgagacggcgtatccggtaagcgctgttccatctccggcacaaaagggatggcgaatgggggtgtctgcctctcgtgctctgcacttgtctgcgcgctggtgtttctcacggtggatggtgatttcgtggacattacttacgtagcgagcgctgtggccaaaggcgcagtctgtttggatgggagccccccggcctaccatctcgcccggggttttggctccggcgtgaatagttggctggttcatttcgagggaggaggatggtgcagcaatgtgacgacctgcctgcaacgcaaacgcactcggttaggatcatcgaagcagatggcaaagcagattgccttctctggaatactgagcaacacccctgattacaacccggatttctacaattggaacaaggtcaaggttcggtactgtgatgggtcatctttcaccggcgatgtggaaaaagtagatcctgcaacaaagcttcactacagaggtgctagggtgtggcaagcagttatggatgatctgcttgcgaaaggaatgaacagtgccaataatgctctaatttcgggctgttctgctggtggtttaacttccatactacactgtgacagatttcgtgaccttttcccagtggataccaaagttaaatgcctttctgatgctggtttcttcatcaatgagaaggatattgctggagtggagtacattgtggcctttttcaatggcgtagctacaacccatggatcagcgaagaatttaccttctgcttgcacctccagattgtccccaggcatgtgcttttttcctcagaatgaggtgaaacagattcagacacctttgttcattctcaacgcagcgtatgattcctggcaggtaaggaacatcttggtgccaggatttgcggaccctcatggtaaatggcatagctgtaagcatgatatagatcaatgtcctgcatcgcaacttcaaatcttgcaaggattcagagacgattttctgaaagcactgaaggaacaagggactccctccaccagaggattgtttataaactcatgcttcgtgcattgccaatctgagacgcaggagacatggtttgcatctggttcccccatgcttgaaaccaaaacaatagcggatgcagttggagattggttctacgaccgcaatccgtttcagaagattgattgcccttacccttgcgattcaacctgccacaaccgaatctacgacgacccctcagaagcatagcaattacagaaacctcacctcgtactaccattcatcacattgttatatttgatgcacccttattgctcgcaatagggcaatccgtgggcaaccattgattttcaggaataactgcagatgatggcttaaagctcatctgatgcctggaggctggatgcagcttccaacagtagttacaggtgtctccaacatttgattcgctttgtcggcaatattttgccatatcttcgataatcatcgacaaagtccacattaatgttactgaagtg

SEQ ID NO: 18265 - DNA, 883 bp, Oryza sativa
  ref <308>: DATABASE ACCESSION NUMBER: AK068669
  ref <309>: DATABASE ENTRY DATE: 2001-12-06
ggtcgccgtcgcggaatttcctccgccatcgcgcgccctcggtataaatcgccgggagaaatttctccgagctctctcccacccaccaaccccccatcgaggagacgacgacgaggaggagatgcttccgggggtggagctggcgaggcggcggcgggtgcactaccacggcgacggggcggcggcgggggcagggtttggggagcaccaccacgggcactacaactacttccaccagcagcaccaccgtcaggcggtggcgagcgcggaggcgggggcgggcgcagggggcgaggtgagccccgcggtggcggcgcgcatccggctcgaggagaagctgcggggcgccgcggccgcgccctcgtcgtctctctcgaggtggggcaggcgatttcgcgaacgagatgggagcacaacctccagacaacagaacaaccagcaagagcagcagattcagctgcccactgaacccaggcctactcccaaacattcgatgaccatgctggaggcgccatcaacaagaaaagccccccgccgcgagatgaggaggacactttccaaggccgatctctgcgctgtgtgcctcgacgaagtgcgggagcgacaccagcgggtcaccaggctaccctgctcccacaagtaccactcggagtgcgtcctcccctggctggccatccaaccagactgcccctgctgcaggacgcaggtcccttcggtggactccctctttgtagcttgatcagcttgctggaagatttggcatcttcttcctctgcacagtttccgaaagaaaggaacaaaaagaaagggttttcattgtcttcagcagaacatgaactgacatagacaccatgacaaagttttgttcttcagttttctcttc

SEQ ID NO: 18266 - DNA, 706 bp, Oryza sativa
  ref <308>: DATABASE ACCESSION NUMBER: AK068670
  ref <309>: DATABASE ENTRY DATE: 2001-12-06
gaacggaagactccactactcagtcctcacctcggtagctaatactactttactttattactgtcgttttggtttgcttagcagaatatggttggcgtgagcgagttcgtcggcggcctgctcaactccgccaagagcgcggtggcggccgtggcctccaccgtggcggcggcggccaagccgggcctcgccgcgggggtcggcttcgtgaaggagcagggcgtggggaagtcggcgctggccgtcggcggggccgccgtggccgcctacttcctctggcccacggcggcagtcggcggcgccatcatgaacgcgccgggcgccgccggctacgtcatctcccgcgcggcgttcctggcgaaccccaagctctacttccacctcctgcgcacggtgggcgccaaggcggccgccgccgctttcctgtagggaagaaatggtatccgccgccgccgacgtccgccgctcgctggcgttggcttgctggttcgtgtgtggcgtttggttgagtgagtaatcgccttgctaattaaggagggatttgtgatggagttcatgcttagattactcttgtttggctgtgaatctgtgtgggctagtaattcacggtgtttaggcgacgtggttatatgctagtacatccatggtcatgtgtaataaggtgccgtgtaataagtttttgtggtaattaagtatgttgccgttt

SEQ ID NO: 18267 - DNA, 2094 bp, Oryza sativa
  ref <308>: DATABASE ACCESSION NUMBER: AK068671
  ref <309>: DATABASE ENTRY DATE: 2001-12-06
gatttcgccttccttcctctcctcggggtttttgtccacaaacgagcggctcgcctgcgccgcgtggattccccttcccgccgatccggcgatggattcggcggcgagagcctcgcagtcggcggcgccgccgccgcccggcgccggggtccgcgtccgcgccccgctggtagagtctgtctcatgctactgcagattagatactggtctgaaaactgttgttgatgctagaaagtttgttcctggagcaaagatgtgtatgcaacctgatgtcaaacccaacaagtgcaaatcaaggggctctcgtaaggagaggagccgaactcaagcaccacttttgcctggtcttcctgatgaccttgctattgcttgtctcatacgggttcctcgagtggaacatcccaatcttcggatagtttgcaaaagatggaaccgtctcttatctgggaattactattattccttgcgcaagagaaacgggatggcggaagaatgggtttatgtctttaaaagggaccgtgaaggaaagatatcctggcatgcctttgacccactgcaccagctatggaagtcacttccaccagttccagcagaatattcagaagcattaggctttggctgtgctgttctgagtggttgctatctgtacttatttggcggtaaggatcctctgaggggctctatgaggcgtgttgtattttacaatgctcggacaaacaaatggcaccgagctccagatatgttacggaaacgacacttttttggttcttgtgtcataaacaattgcttgtatgttgctggtggggagtgtgaaggaatacaaaggacactcccgtctgctgaagtttatgatccaaataggaacagatgggcctgcgttgctgaaatgaacaatgggatggtacctttcattggagttgtatatgatggcaagtggttcctgaaagggcttgattcccatcgccaagtgacgagtgaagtctacctaccatcatccaatttatggtcaaccattgatgatgaaatggttaccggctggcggaacccaagcattaccttcaacggaaagctctattcatctgattgtcgagatggctgcaagcttagggtgtatgatccaaacacaggaacatgggcaaaattcatggacagcaagcaccacctgggcagctcgcgcgcctttgaagctgcagcgttggttacattaaatgggaagctttgcatcgtccgcaacaacatgagcatcaccctggttgacatctccgacccaacgatgagcattgagactgacagtgcacgcatgtgggagactgttgctcggaagggccagcacaggtcattcgtggcaaacctgtggtcgaccatcgcaggaaggaacctgaagagtcacattatccattgtcaggttttgcaggtttgaggtcagcctgttgtgaatctgaacataagcagactagtagaaacaatccctccattgaaaggtcaattagattccataccgaaattgtggcagaagaagctcattgcccaaacagatctttgttcattagattaccagaaaacaccaattcagtattctggaaatttgaagctactcataaggtaggagatggatgccgaaaacttttgtgcaaactggaaactgagaagagaacttccttaatagttgcggtgataggggggagaatatgcatcggtggataacatttcactaagttggaatatccatcttcagcctctcactgtcactgatcactgtacttatctatgttgtatcatgccctcttggcatactgcttagtgtgcttaatgttggctctatgttgtagcggcagattagacttgagagtagagaagtaataagcctattggttactgtacttgaaaaatccgtatgtcctggtatcatgtgctgtaaatcttcgtaattacccctccaactctccaagcatttcattgcaccaatcctgtttctctatttaatttaatgtttagatgatttgagctgaaatgaagatactatgattgattgatttctatgtgattggatctgatgtgtactagaatttgtaaatgcaaggatttcaaatggac

SEQ ID NO: 18268 - DNA, 3316 bp, Oryza sativa
  ref <308>: DATABASE ACCESSION NUMBER: AK068672
  ref <309>: DATABASE ENTRY DATE: 2001-12-06
ggattagcttggtggatacttgggttggatccaatggcgggtggtggtggtggtgccgccgcgtgctgctagatctcgggctgtggaggcaatggcgacgcggccggcttcgcggcagcggagggcgtcttcggcggcggcggcggtggcggtggtgaggagttcgccgcagccgcagcagcagcagcagcagcaactgccgataccgcagtcggggtcgccgacgtcgacgacgaccaccaccacgtcctcgtcgcggctcacgccggagctctcgctcgacgggcccgcgtcgccgctgttcgccgggcttgacgaggacccggcgcccaaggagaatgtcaccgtcaccgtccgtttccggccgctgagcccccgcgagattcggcaaggggaggaggtggcatggtatgcggacggcgacacggtcgtgaggagcgagcagaatcccagcgttgcttatgcttacgatcgggtttttgcaccaactactacaacccgtcaggtatatgatgttgctgctcaacatgttgtcagcggtgccatggagggagtaaatggtacaatatttgcatatggtgttacaagcagcgggaagacccacacaatgcatggagatcaaagatccccagggatcatacctttggctgtcaaaggcgcatttagcattatacaagagacaccaaatcgcgagtttcttctccgtgtatcatacttggaaatttacaatgaggttgtcaatgatctgctcaatccagctggacagaacttacgaattagagaggatcctcagggaacatttgttgagggtatcaaagaagaagtagtattatctcctgcacatgccctatccctcattgctgctggagaagagcatagacatgttggatccactaacttcaatctacttagtagcagaagtcatacaattttcacactgactgtagagagcagcccttgtggtgagtctaatgaaggcgaggcagttaccttctcacaactgaacctcatcgatctggcaggttccgagagctcaagggcagaaactactggagtacgccggaaagaaggatcttatatcaataaaagcttgctaacacttggaactgtgatatcgaaacttactgacggaaaagctacacatattccatttcgtgattcaaaactaacacgtctacttcagtcatccttgagtggtcaaggacgtgtttcactgatctgtacagtgactccagcatcgagcaactcagaagagactcataatacactgaaatttgcccaccgtgcaaaacgcattgaggtccaagcatcacaaaacaaaattatagatgaaaaatctttaataaagaaataccagaatgagattcgcagattaaaggaagaactagaacagctgaaaatgggtattattactggcactccagtgaaggatgccggagaagataatatcatcctttggaaacaaaagaagatggtaacgtcaagctgcagtctaggctcgaacaagaggaggaagctaaagctgctttgcttgcaaggatacagcgtctcacaaagcttatcttggtctccactaaggcgacacaaacttctagattttctccacatcctggaccaagaagaagacattcttttggggaagaggagcttgcgtacctaccttacaaaagacgtgatatcgtgttggataatgaaagcaatgaattactttctcctgttgaaggacttggcatgacacttgaagattcgaaggaggagaaaaagaatcggaaaggaattcttaattggtttaaacttcggaaacgtgaaggtggagcttctattctgacaagttcagaaggtgacaagtccagtttgactaaatcaactgctccttcaacacctattggggagagtgttaattttccttccgaaccaagaatatcaaattctttggttggtgagagtgcatcggttgatctctttagcattggccatggggagttcgctactgacagccttcatggagaagaaacacctctggccagcagaaaaacaatagatcacgttgacttactgagagagcaattgaagattttgtcaggggaggttgcacttcatacaagtgtcctaaagcgccttaccgaggaagctggaaggagcccaaataatgagaagattcagatggaaatgaagaaggttaatgatgaaattaagggaaagaagcatcagatagcgtctttagaaaggcagatacctcattccatctcaaataatcaagggatggctgacaagttagaacttactccgtcttatgctgaactgcttgagcaactcaacgagaaatcctttgatctcgaggtgaaggcagcagataacagagtaatacaagaccaacttaatgaaaagacaactgaatgcatggaattacaagaggaggttgctcacctgaaagagcaactttaccaaactcttcaagctaaggattcactgtcaaatagcattatgatgcagaagaatgcaggaattaaccatgaaactgataatcatgctgatcaagaactatcagttcctagagaggtccctggtgaaacgtcgccaaaagaaccacagtcagttgagattgatgagctgaagcagaaggtgtgtgagctgattgaagtaaaagctcaactagagactcgcaaccagaagctactagaggaaagcacgtacgcgaaaggcttggcttcggctgcgggagttgaattgaaagcgttgtcggaagaagtcaccaagctcatgaaccaaaacgagaagcttgcttctgagttggcatcggtgagaagtccaaccccgcgtagagccaacagtggactgagaggtactcggagggatagcatcagtagacgacatgagccagctccaagaagagacaacaacgcaggctacgagagagaaaaggcattagaagctgtgcttatggagaaggaacaaaaggaagcagaactccaaaggagaattgaggagtcgaagcaaaaggaagccttcttggaaagtgaacttgcaaacatgtgggttctagtggcaaaactgaaaaagtctcaaggccatgatcttgaggattttgacaccaaatatattggctcgtaacatcataactctaggctaattaattattagtagtgcgactggcttgggtacgtctgtatgtaagataagagatttataccaggtttcctgttgcagtgtgaattagttcccatcttgtatattcgccggttgatcaaagttgtgaggccttgttgggctgatgtgctgagagcttccataattgctgcaatgggtttttggattc

SEQ ID NO: 18269 - DNA, 1236 bp, Oryza sativa
  ref <308>: DATABASE ACCESSION NUMBER: AK068673
  ref <309>: DATABASE ENTRY DATE: 2001-12-06
gggcattggaacatctagtgtttcagtcatgtaaatttggctgtgccaagatctcatctagctctgcaaaacgtttgagcataaccaattcctatttcagtgagatatctcgggtacgtatcgctatcccgagtcttgtttctctgcagctggatggcttccatgacagggctccagtgcttgagaggatgccatcattagttgatgcatttgttggagtcctcaactggactaaagactattgcatttggtctgactctggggattgtggtcatgagaactgcgaatcttgttacggtatcaaggacaacaattgtgtgcttttggaaggtttatcggaagctaagacgttggggctgataagtgaacgtggatcgtttattttgaaaagggatttgaaatggcgcccaacatttaccaagctaaagactttgttactcaatgaatactggtgtgtgcccgatgattttagtgcactaacttgcattcttcaacatgcaccggttctagagaatctcattcttcagatctgttccaagggacctaaacatagaatgaaaatcaaaggaaactgccattcaatggatagttcacttgtaatatcagcacatcttgagatagttgaaatcaaatgcgaaacggttgataagagagtactcaaagttttgaagtatctgtctacatttaacatactttttagttttaaggaaatcgagattttggaaggatatgacaatgaccaggacgaagtggaggaagatgaagatgaggactctcatgaagacgaagacgaaaatgaagactcttatggagacccttatgaagatgaagacgacgatgaagatggagacgaagtggaagaggaaaatgtttgatgcaccactgttttgattattaagaaggttgagaccacaaggatgatgccatggtgttttattctctccgagtagcttaaagggcagacttttggatttgtaatgcgggttactttctacctgctgttcgacgtttttttagtttttgctcttttgacaatgcagtcctctgtaccgataaacctacatcgtctggtaaacaggcgcctagtatccctcatgcagctgataaagcccaatattacagtacagtaactgcaaacatcatataatccttgaaagcatttgtgctctatggatgcaccatttagatgtatcaaatccgagaaaacgcaaataaataccgaaccatgtgatttgg

SEQ ID NO: 18270 - DNA, 1355 bp, Oryza sativa
  ref <308>: DATABASE ACCESSION NUMBER: AK068674
  ref <309>: DATABASE ENTRY DATE: 2001-12-06
gacctaagcgtcgcctctcgtcttttttcccgtgcaacgttgcaagtgaaatcatcaatcgtgcgtgcgctgcgcccgaccatggagctcgcggtcagagcagccgccgcggcctcctgctcctccggcgcctcgctccagctcccgcgggcccgagccccgctccgcctccttggccaccgccgcctccccgctcgccgggtggctgtcgaggccgccgcgatcgccgtcgagccggaaaacaaagtaccgcagagtaacaattcagaagccgaggtgtttgcatgccctgtttgctatgagccattgataaggaaaggcccatcgggcataaacttgccatcaatttataggtctgggttcaaatgttcaaagtgcaacaagtcattcaccagcaaagatatcttcttggatctcactgtcacttctggaacaaaagaatatagtgaattgaagccagctagaactgagctgttcaggagcccactcgtctcatttctttatgaaagagggtggcgtcaaaatttcaatcgaagtggattccctggacttgacgaagagtttcaaatggctcaagattatttccaatcagttgctggtggtgtacttcttgatgtaagctgtggcagtggcttgttcacaagaaaatttgcaaaatctggatcgtactcagctgtgattgctttggacttctccgagaatatgctttgccagtgttatgaatttattcagcaagatgatactcttgtaaacacaaatcttgctcttgtaagggcagatatttcgagactcccttttgcttcatcttcaattgatgccattcatgctggagctgctatccactgctggccctccccttcgaatgcggtggctgaaataagtcgagtcctgaggcctggtggtgtctttgtagcaacaaccttcttatcttctcccaggaacaatcccttctctgttgaagcgttgcggccactgagacagattgttggaccagttaacaccagctacaattacttcaccgaaggagagctcgaagacttgtgcaaatcctgcggtcttgttaattacagcagcaaggtccagaggtcgttcatcatgttttctgggcagaagccgtagcctaaaattacatcaaaacctttgtagccaaagtatagctgtcaattctacaaaagtctttgtaaaatgccattcaccgatacctgcatagattagacccagcagaagtttttgcttggaattcctctccctgttatgaagatatagttgtcacatgtatactgtgcttcagtacagtgatgtaccacagccagggtgtatttcacacctggaagaaaaaaaaacgttctagtact

SEQ ID NO: 18271 - DNA, 2796 bp, Oryza sativa
  ref <308>: DATABASE ACCESSION NUMBER: AK068675
  ref <309>: DATABASE ENTRY DATE: 2001-12-06
gaattgattccccgcacaccccgaccacaagtccacgcctcaacgaagaaaatctcagatccctgttctcccctccccctcgattagccgaagaaaatcctcgcacaaggaagtctcatggattcagatccagccatggtgctgcttaatcgctccgtgctcttggtcaacgaggtaacagatgtaatgaaggaaaaaggctggtctcttgagctcgacgagaaggcaatttcagacgcatgcgacggtatcacggattggcaggagaaagagaaggcaaggcaaaaggccatacgagcagagatcaagaggtttcgagccaaccaagatgcggcggaggccattttgcgcaagcgcaaggcctccatgccccccagcacggtgaccaagttttgtactgacaccgacctccgtaaggttttggatggcatcgaactagatcctcaagtccatgatataccaggtttgtccttctttcgcctccggctgtcgtctgcacgacatcctcctgatttgcagggcacctccgtcgccggtgcggaccacaacatcctcgtcttctatgtcggcccctaccggcccggtttccctgcaccgggattttatctggtttacgacgcatgggccaactcactgtccgccatccaccagttgccatatttaggcggcggcagtattggctctgaggttgccgtgctgcgccatgctccggccagcgactatatcctcgccgagctcctcctcactggcgaactccccaaggcaagtctctggacgtggtgttcgtctggtccgtccgctcgccaatggatccacaagacagtcatcctccctcctgaagtgtgcacgcccacctacatctttcatgccgataccactttctctcttgggaagtttgcgctctgttgggtagacctcctcgttggcatcttgatgacctgcgatacccttgccccagaacctgttttccagttcatcccgttgccggaggggtgctatatggagccgcccgaccctcaagatggacgccaggtaccacaggaataccggtctatgtgttgcggcaatgacggtatcatcagattcatctccatcgacggctatcatcaagacctctctatcaacgatatgaggaatatgttcctcaggacatggtctcttactcttaaccccaaggagtggaagcaagaagcggcactatgcattggagacctctgatctgacacaacccaccagaagctgccagcactaatgccgacctggcctgtccatagcattcttcatgctgatgttgtcttcttgtacttgtccggccctaatactgggaataatactggggagacagagcggtacatggtcagcatcaacgtgcagcacagggaggctatttcaatctccaagttatctcctgatgatagttcccctcctccacgctactttcccagcagcttcaattcgtacataaacaagcgatccggaagggagaaaggcggcgacaatgtcaccgttaggacgaacaagaaagcggagtacatctcagggctctcagaggattgccttgctcttgcaatctccttgacgactcccatggacgcgtgccgctgctgtgccgtctccagggccttccaaaaagcggctaattccgactctgtgtggaggcacttcttgccgaaggactacctctccatcctggctcgtgccgacgatcgtgtgcatttcacttccgagaagaagctcctcgtcagccttgtcaaagaccacgtcctcctcgaccaacacagcaagagtctttggttggaaagaacaagcctagccaagtgctacttgctatcatcgagatcattaccgatagcatgggaagaccatcccctgaaatggagatggatctccttacccgattccaggtttgaagaagtaactgagcttctaaaggtctgctggctcgatttatgtggcagagtcaactgcagagagctctcacccaacacagaatatgcagcctacctcgtcttcaaattgacagatgattcgtacggccttgattgccagacacaagaggcagacatcaccatggacgatcaagtagtgtctgccaagcggaccatctctttctacccacgcccacgcccacgcccacgcccatccacacgagagacactttctaacatgggtagaatcgaagaagcaggacaagcagaggagccaagctacccaagagaacgaggtgatggctggctggaggtacaactagggcacttctacaacgacctagaagacactggagtggttgttatccgcctcaaggagcatatccagctcaactggaagaaaggacttatcttggagggtatggaaattagacacaacatataagtctttgaggaagatacagaaaaatggagcaagtatgttagaagacaaaattaaataatgcagcattgaatatgcacaaagagcagtcatgattcaaccagtgttcaaaaatcctggctgtaagcaattggttaccgctccaaagccgatgaaccaacattggcatactgaacagaacaatttaaattcaactttggaagtatgccaacttcttatctttcatggttatttgttgttatatttctaaaggaaaatgaaatattcgcattcagttctataattatatcaattgccacacttgtggtggaactattgatatgttgtatgtatacttctgtgatgcatgtctttatggactattgcatcataatcattatgttctatttgtgatgaattcaataatgctatatatgttggatcttg

SEQ ID NO: 18272 - DNA, 845 bp, Oryza sativa
  ref <308>: DATABASE ACCESSION NUMBER: AK068676
  ref <309>: DATABASE ENTRY DATE: 2001-12-06
ggtctttgaggccatcggcagcgaaagcgacttggtcgagattataggtctggttgtagagcatgttgcgctgttcttcgtaccttgaaacaggcaacgtacattcatcagagttgcatagtggagtagtagcaaatactctactagtagtagaatagtgagtaagagtagagtagagtacatgcgcttgtgcttgagaagcctgatggcgcgggccttaatggcgtcctgggagggtccagggcgtgtcttcctgatctgctccttgtaacggccgagctcttcgtccagcttcttgatcttgtcgtccacgctctcccccctcttgttgatcttcaatcacatacacatagagaggaaatgttcaaactaagagagatggcgtgcgagcaaatggcctagacgaggagaatactcgttcggtagcgtcctggatggatggggcgggtccttgctcttcttggctccaaagatcttcttcatttccggcgcgtgtgtgcggcggcggcggcggcggcggcggcagcggcagcgaggagagagagtgttgggagtgagatgagatggagaaggggaatgggggacgggaggttgggctccatgctgaattctgctgtggattggtccagggaaggccctatccggcataccattaatcggatttgatttcattccctttctcctccttagtcatactccctcccttccatatttgacttattttttcttagttaattttttagcttgatcaaatttatagaaaaactaaacactatctatgacatcaaattatttttattaaatgtagcataaaatacattttgatagtatgtttgttttctgct

SEQ ID NO: 18273 - DNA, 1140 bp, Oryza sativa
  ref <308>: DATABASE ACCESSION NUMBER: AK068677
  ref <309>: DATABASE ENTRY DATE: 2001-12-06
gggcccaatccacccgcggcggcgatctctctctaccccgatctcctctcgccgtcggcgtcgcccgggtcgccgccgccctccgccgcgcagtccgcagctagtaggtgggggggttagccttagcgtgagaggcctttgccgccggctgcgatggcggaggagctggtgctggacacggcgatccgggactgggtcctcgtcccgctctccgtggtgatggtgctcatcggcgtgctccgctacttcgtcgccaagctgatgcgctccccgtcggcgtcgccctcccccgaccccaagctcgtcaaggaggggcaagtggtaattagggcgaggaacctgaggatcaattcgcagtacatcccggccaaggccttcaaatcacgcaaggtttattacactaacgaggaaaacggattgcttcatgtcccgaaagaggaagcacagaaagctcaggctgccatgttttcagatccaaacatggccatggacatgatgaagaagaacctctctatgatagttcctcagacacttacatttgcatgggtgaacttcttcttttcgggttttgttgcagctaagattccctttccattgactccgcgattcaggggaatgctgcaaaacgggatagacctgagtactgttgatgtgagctatgttagcagccgttcatggtactttctcaatttgtttggtttgaggggtctcttcagtctgatcctcggtgaagaaaatgctaatgatgatgcacaaaagatgatgcagatgggtgggggatttggcggtaatcccacaatgggtttggccgcagagaaagacaacctggatataatccagcatgactgggctttaccaaagatggagcatcatgctgaggaagtgctgaggaagcttctgaagaaatgataggaaactaggctgctccaatgcattactacatcttgcaaaatttttgttttaacctgtttattgaccagacagttaaaactttgtatctgtataacttatggccaagaatttccttcagaaagtttatgtatcatttttctgttatacggaccacagccaggctcaatgcagaatgaacaaaaatcttttttcttggcaaagaggtactgactcagtaaatttgattgc

SEQ ID NO: 18274 - DNA, 997 bp, Oryza sativa
  ref <308>: DATABASE ACCESSION NUMBER: AK068678
  ref <309>: DATABASE ENTRY DATE: 2001-12-06
tttttttttttttttttttttttttttttttttgagcgcagtaacaatccatttgttcttctctccagatcagaacaactgtattttctcgacgaagttgcagaatgtttcacagatgtctgcaaggaaaactaactacagagagtttaaaacccgggtggttctgtagcagcaagcctacacaaaagggtcgtcctctaacataccacctaaatcatcttcatccattaacacgccacctataatatcatcttcatccatgaactcttcaggtccaagaagcacattcattatcgctagatgcctcatccgcctgtacctagcaacaagtgagtgccactccagcgattcgctgccatcgtccagcattgcgtcctcggagcgtaggatttttgcatccggcaagtacttgaggactgaataaccagcaggatcagaggtatcaaccatgaaaactggagaaagtgaacgccctctcacttgagcatggcagatacatatgtagtacctatcatctgcttcctgtttttgtactctgcccaatagttcaaccttcactataccaccaatgcaaaggactgggcgcggaagcttgaaggattgtagcacattttcctgcaacatggggaactctggtgaagtgtaagtccacacataattctcgtcagcaattgccatcagattctcatcctcgaccgtaacaaaggaatccgagccatgaggaagcttggaatggcccatccggaatctgactgcctttgaagagtatataggatgtccatactgaaaataagctttgaatggctgcagcttgatctcatcgacgatgcacatatcacagttgagcctgtacgtcaaggtctctggtgtgtcgggatcgtcgtggccgccgctggaccagtaggaggggcggtgcttgacccgatcgtgtggtatgagcgtgttctcgatggtctcgtcggggaagttgtcggtgctggaggcgccgatgcattgc

SEQ ID NO: 18275 - DNA, 1879 bp, Oryza sativa
  ref <308>: DATABASE ACCESSION NUMBER: AK068679
  ref <309>: DATABASE ENTRY DATE: 2001-12-06
ggcctccctcctgctcagctactactactagtagctatgctgccatggaatcgagctgctccgtacagctaattcttcaccatcaacctactccatcctctctgctcactctgaattctcaaggtatagttctcatcaggtagatggccatggaagcagcagatgaggagagggcgcctctgcttcaacctcaacctcaaccttcacgggggatgcagattcagagtatacaggtgatggatcggtggacgtcaacaaccagcctgctctcaagcgcagcacggggaattggagagcatgcttcatgatcctaggtgtcgaattcagtgagaatttggcttactatgggatctccaagaacctggtgacctacctcaccaagattctccacgagagcaaagtgaacgccgcgaggaattcctctgcttggtcgggcgcctgctacctcacgccactctttggagctttcttggctgacacatattgggggaaataccggactgttcttacttttctcccgatttacatcctgggattgcttactctaatggcgtcgacgtcactcccatccagcatgacgtcctccgacgccggtcaccagcttcacagcgtcgccgtctacctcgggctgtacctcgtcgccttcgggaacggcggcgtgaagccgtgcacgtcggcgttcggggcggaccagttcgacggcggtgacgcggcgagctgaggaggaaggggtccttcttcaactggtacaccttcatgatcaacagcgggtcgctcctggcgtccacggtgctggtctggctgcaggacaatgtgggctgggggatcagcttcgtgatcgtcgtcgtggtcatggccttcttcctcgccgtcttcttcgccggctcgagggtttacaggtacaggccggtcagggtgagccgatggcggcagtgcacagtgacacaggtggaggaggtgaagatgctggtgcggatgtgccccatctgggcatgcctggtgctcttcttctcggtgagcagccagatgtcgtcgacgctggtggagcaaggcacggccatggacaaccgcgtgggccccttcaccatccctccggcctcgctcgccaccttccactccatcggcgtcctcctctggatccccgtctacgacgtcgcgctggtgcccctggcgcgccgcgccaccggcaagcccaaggggatcacgcagctgcagcgcatcggcgtcggcctcgccgtggccgcgctcatcatggcctactcggcgctggtcgaggagcggcggctggcggcggcgcgcgccggcgccgccaggacgagcatcctgtggcaggtgccggcgcagctgatgcacggcatggcggtggtgttcaccagcatcggcaagtcggagttcttctacgaccaggcgccgcgctccatgaggagcatgtgcaccgcgctcggccagctcgccatcgccgccgggaactacctcagcgcgttcctcctcgccgtcgtcgcctccgccaccacgcgcggcggcgaccccggatggatccccgacgacctcaacaagggacacctcgactacttcttctggctcatggctgctctcttgctcctcgacctgctcttatttgtcttctgcgccatgcgatacaaagggagcactgctgcttcttgatcgacccacccaaaaatgtcactctatgtatggcatttgtaggactgtacaaaaattgaattcgaaaatattttatgattcactaatattacatagatgaacccctttaactgcacgccaagtgtgtaaatgcaacctcagacacaaagcatatttaatttacaacctcttgtaactactaactattgatacaaaatagagctcttttttcacc

SEQ ID NO: 18276 - DNA, 1129 bp, Oryza sativa
  ref <308>: DATABASE ACCESSION NUMBER: AK068680
  ref <309>: DATABASE ENTRY DATE: 2001-12-06
gattcggggaagagagaagggaagggcctcttcgtcggcggcgaccgcgagcttccgcttccgacatagcatcgccgctcgccggatcggagagcgaggggagcacgccgtgcgcgaggagggcagcgggggcgcgcgggggatacggttggaggcgcttcagctacggccggccgaggacctgcggcgagttggttcctcttcagctatgcatcaagtaattagaatgcaagaagaacatggaaatgaaggaatcttgaatatcatcatttcgcctctgcaaagtttcagagatattaatgattaaattggtgttagctgaaagtaagaggaacgagcacctaagaactataggaatgggaggcatcaggaaaatcatcagaccaaatctccaataccagagctacaagaaacagaagcttgaacattttcttcagagtactagagtatatatagacctatgcagtgcagggctgtgaaggataaatgaattgaatctggtagatggtgcacaataggacactgaagtgaatgatcacatatattggccaagaaacatgtacaagtcactgtacaacatctgcagggatgtgatcttctgggtacatcagaaagctgattgacataatgaagagtaagcagagaacagtgcagacacttgggatcttttgagaggactggattctgatgaataaacatggttgatgtcaatgagcagacgattggatcagcttggactgaacacgtactattttctgactgcaagtccaaggagagtaacaaatcatgacagcctgcggaatggatcaaagaacaccttaatgcatattagaaacatcagcggttcagcatatgacttatagtttgctcttcagccatgcgcaacggcatcaaataactcgaatgcaggaagaacaaggaaatgaagaaatcgtgaagggcatcatgcaacctctgcaaagtttaagagatattaataaactcaaatattcttgtttcaattttggtgagaggcgtatatataggtactacctttctgttcggactaagttacaatgtgcaaatagatgctaatttatgtacttgtccatttggttgatgttatgttccatatgagatctcaatagtg

SEQ ID NO: 18277 - DNA, 1181 bp, Oryza sativa
  ref <308>: DATABASE ACCESSION NUMBER: AK068681
  ref <309>: DATABASE ENTRY DATE: 2001-12-06
gagcttctcccctcctcaaccaagcagaaatggcggcttcttgcgcgctcaccctcccctccgccatctccgtctctgtctccgtctcctccaattcacctcgacggttcaggcgctctaggagggtggtggccatggccagcgtggggcagaaggtgtacgcgcccggcgtggcggtctccgagggcaatggcgggctgccaaagatcgacctcaagtccccgcatgggagtgaggctgaaatttatctatttggagcctgcgtaacatcttggaaagtccccagtggaaaagacctcctatttgtcagaccagatgcggtgttcaacggccagaaacccatcagtggtggaatcccacattgcttcccccaattcggtcctggtaccatgcagcagcatggatttgcaaggaacatgaattggtctatcactgattcagaagctaatgaaggagatccagctgtaactttggaactaaaagatgactcttatagccgttcaatgtgggattttagcttccaagccctgtataaggttgcattgcactctacaagcctgtcaacaacactgaaaataacaaatacagacgataagcctttttcatttaactcggcactccacagctatttcagtgcttcaatttctggtgtttcagtgaaaggtctcaaaggttgtaagaccctaaataaggatcccgatcccaaaaaccctttggaggggaaagaagagagggaagaggtgacttttccaggatttgtcgattgcatttaccttggtgcaccgagtgagctcaccctggacaatggattgggtgacaaaattgtgatatcaaatgcgaattggtcagatgcagtgctgtggaatcctcacttgcagatggaggcttgttacaaagattttgtctgtgttgaaaatgcaaagattgaaacattacaactggggccgaaccaatcttgggtggcagagcagaaaattgaactgatatgaattatgaagctaaactgggcaaaacaatagagtacaacaattatgttgcaaaaatgaacttctctttttctttacatcatgaaatgcaaatgtcatagcccctaatgtatcatctagtaggtggcataagtcatatttttgaaattgttttatgtaataaataagtaaataaataaattcagttctcccatt

SEQ ID NO: 18278 - DNA, 2119 bp, Oryza sativa
  ref <308>: DATABASE ACCESSION NUMBER: AK068682
  ref <309>: DATABASE ENTRY DATE: 2001-12-06
gcaggagagggcaaagaggggaaaagaaaaaaaaaagagataaaaaaaaaatctcctcctcctcgccgccgccgccgccgccgccatggacgcctccgccggaggcggggggaactcgctgccgacggcgggggccgacggggccaagcggcgggtgtgctacttctacgacgcggaggtggggaactactactacgggcaggggcacccgatgaagccgcaccgcatccggatgacccacgcgctgctcgcccactacggcctcctcgaccagatgcaggtgctcaagccccacccggcgcgcgaccgcgacctctgccgcttccacgccgacgactacgtcgccttcctccgctccgtcacgccggagacccagcaggaccagatccgggcgctcaagcgcttcaacgtcggcgaggactgccccgtcttcgacggcctctacagcttctgccagacctacgccgggggatccgtcggcggcgccgtcaagctcaaccacggccacgacatcgccatcaactgggccggcggcctccaccacgccaagaagtgcgaggcctcgggattctgctacgtcaacgacatcgtcctcgccatcctcgagctcctcaaataccaccagcgtgttctctatgtggatatcgatatccaccatggggatggtgtggaggaggcgttctacacgacggacagggtgatgacggtctcgttccacaagtttggggattatttcccggggaccggggacattcgcgatattgggcactcaaaggggaagtattactctctgaatgtcccgttggacgacggtatcgacgacgagagctaccagtcgttgttcaagccgatcatggggaaggtgatggaggtttttcgccctggcgcggtggtgctccagtgcggtgcggactctctgtcgggtgataggttgggttgcttcaacctgtcaatcaggggccacgcggaatgcgtgagattcatgaggtccttcaatgtcccgctgttgctgcttggtggtggtgggtataccataagaaatgttgcgcggtgttggtgctatgagacaggagttgcacttggtcatgagctcactgacaagatgcctccaaatgagtattttgagtactttggtccagattatacacttcatgttgcaccaagtaacatggagaacaaaaacacacgccagcagttggatgatataagatcaagacttcttgataatctttcaaaacttcgacatgctcctagcgtccaatttcaagagcgaccccctgaggctgagctacctgagcaagatgaagaccaagaggatcctgatgaaaggcaccatgctgattctgatgtggaaatggatgatgtcaaacctttggatgactcaggaaggaggagcagtattcagaatgtgagagttaagagagagtctgctgaaacagatgccgcagatcaggatggtaatagggtcgctgcagagaacaccaagggcacagaacctgcggctgatggagttggttcctcgaaacaaactgttcctaccgatgcaagtgcgatggccatagacgaaccaggctccctgaaagtcgagccagataactcaaacaaattgcaagatcaaccatcggtgcaccagaagacataatagttctctctaccttaaaacttagtaactgatgccatctatcatccattgattatattggagaaactcccaactttgaagcagagagttcatgccataccaaaagttatataccaaatttcgaatggtatgtacacctttcgaactggtggtgttttgtgcaatacatttatgccaggctgactattatgtggtatctattattagctttagtttaaccctgtctgctgtcgagcaatcggtatagtcgtgcaatatattctggatctatcaagcaatgtgagacggatgtcaaaccattggttgtgacttcagcaatgtatgtatatgtaagtatagggacaggcagcaggcgttactttggtggaagctacaagctttgtctctcttctcatccctaatacctacgtggggtgcgtctcgttgttgtttaggtattactgcattcttaaaagtgctcatttagggtgaaattct

SEQ ID NO: 18279 - DNA, 2480 bp, Oryza sativa
  ref <308>: DATABASE ACCESSION NUMBER: AK068683
  ref <309>: DATABASE ENTRY DATE: 2001-12-06
ttgtctctgttcaaaagacttcttcagatggtgagaaacttgagagccgaatcagatcgtatgcatgcattggcatgtatttgtcggactgctctttgtgttgatctttttgcaaaggagagtgttcgaagaggtcagaagcctgttccaggaacagatgtgatctctctttttgaggatgtaagggcgaaggacgacctaaacagcattacaagcaaaagcttgttcagggaagagctggttgcttccctggttgaaagttgtttccagctatcgcttccactacctgagcagaataattctggcacagagagcagagttataggagcattagcctatggaactggttatggtgcattgaattggacagaacctgctttggatgtggtagaagtttgcaggccttgtgttctctgggattgtaatgggcgcacctatgcaattgattgctatctgaagttacttgttcggctttgtcatatatatgatactaggggtggtgtaaagacaattaaggctggtgcatcccaagatcagattctaaatgagacaagacttagaaatttacagctgcagcttatcagggatcttcgtgaggtccataccccaagaatatcatcacggttgatatgggcgatttctgaacacttcgatcttgaaggtctggatcctctcttagctgatgacccagaggatccactgaatattatcatatctaacatgcacaagattttattcaacaccgaatcctctaccactacatcgaataggatacaagatatgcagtctgtcctcatatgtgcccaacgtttgggaacaagaaatgcaagagctggccagctcctcagtaaagaattggaagaatatagagcaagtacttcagctgattttgtcaccaaacatcagtcacgttatgtcttgcagataataaaatatgtgacaagccatccagataacaggtgggtgggcgtaggtgatgccacaggggattatccatttagccaccacaaactcaccgtccagttttcagaggcgtctgctgctcaagacaggaaattggaggggttagtacataaagctattctggagctctggaggccaagtcccacacagttgagtctgctacagacaaaagggattggtactttgcataaagagctcccaaaagcgtatactttgaccggcagcagtgatccatgctatattgaagcgtatcatttggcagatccaactgatggcagaatcacactgcatctaaagatcttgaatttgactgagccggagctcaacagggttgatatccgagttggactctctggagcactgtattacatggatggattttcccgcaccgttcgacacctccgtaatcttgtttcccaggatccagtccaaagtagtgtaactgtcggagtttcacattttgagagatgctccctctgggttcaagtcttgtactacccatttgatggaagtgtaggatctactgattatgaaggagattatgaagagagctcacaaatgacgaggcaaaagcgcgcatttcgggcagagcttggggagccagttgttttgcgctgccagccatacaagatccctcttgctgaacttctcttgccatatgaatgctctccagttgagtatttccggttatggccaagtttgccagccatggtggagtgcactggcacatacacatatgaaggcagtggtttcaaggccactgctgctcagcagtatgatagctctcctttcctcagtgggttgaagtcgatttcttcaaagcctttccatcaagtttgctctcatttcatcagaacagtagctgggttccagttatgctacgctgcgaagacttggtttggtggatttgtgggcatgatgatctttggtgcaagcgaggtcagccggaacgttgatctgggcgacgaaacaaccacaatgatctgcaaattcgtagtgcgtgcatccgatgaatcgatcacaagagagatcgaatcagacctccagggctggatggacgatatcaccgatggcgccgtggaatacatgcccgaggatgaggtgaagagcgcggccgctgagcggctgaagatctccatggagagaatagccctgctcaaggcagccaaaccgaaggtgccgcctgcgaaaacaaaggaagaagaggaagaggagaagaagcaaaacgaggacctggatgaattcgggaaccccaagggcccctcgacgctttcaaagctcacggcggaggaagctgagcaccgtgccctccaggcggccgttctgcaggagtggcatcagctgtgcaaggagaaagccatgaaagcacagtgaggttctgttttttttttcctttttttttggcatgcggcacatgtacaattttgtatctgtttctcattttttgcccccaatttgtgtatgtattacatgtgtgtcccttttacccccattttgtgtatgtatgtattatcagt

SEQ ID NO: 18280 - DNA, 2530 bp, Oryza sativa
  ref <308>: DATABASE ACCESSION NUMBER: AK068684
  ref <309>: DATABASE ENTRY DATE: 2001-12-06
ggccgtttcctctccacttccgcccccatctccgcgtgcggaagtcaacgaagcggagcgcctctgccgcctctccttcccacccacctctgctctgctcctcatcgtcgtcgcgcggccagctcagccggccggagaatccaccgaatccggcgcgaatcccgcagccatgttcggcgactccgacggatccaaggacgccaaccccggggcgccgccctccaccaccgacccgcccttccccaaccgcgagctcaccctcagcagctacctctgcgagaagccgacgctcgcctccgccgccgccggtggcggtggcggtgccggcccgtcctcgccgccgaaccctgctgcagccgcggctggcgacgacggcaagcactgcgtcgagcgcgacttcctccacctctccgcgcccaagcgcggggatccacccggcgacgactcatccgtcgtcggcggtaagaagccccgcctcgactccctccagctctcgctgtcccttaactccgacggccccgctgctccgccgtcgtcccagccgccgctcgcctcgctcctccagcccgtccccgcgaccgatggagatctacggggagcggcggcggcggcggccgtgcccgcggcccccgccaggaggacctacagcgcgacgacggcgcgcacccgcagcatcaactccgacgacatgtcctactcctactccatcttctcgcacaaccctagctgttccctcacgcacaactccaccgacatctacgccgccggtgaaggtaccaacggctccgttcacagccgattcaatttccgccccatgggggacggcagcgtcgccttcgccacgccgccgctgaaggagggcacgtcgtcgttcttccccacggagctccctgcgaggatggcggcggcggccgcggcggctgctgccagcgcgggtggcagcttcgacggcggtcgcggtgggcttcacgcgtcgcgccctgacaagatcctgcgggatattgtgtccgactctgtgacggctatggcgcaggtgctgcaggatttcccaagcgaacgactggagttgctgcgagaggcagtgcggggcatgattgactctcatgagaagagggatgagctggccagcctgcagcggaagcttgagcgccggtcagacctgaccaccgagacattggggagggcgaacaggacgcagcttgagatcctggtggccatcaagactggaatcgcgacgtttgtcaccggtaaaggccgggtaccaagcagtgagcttgtagaaatgttcctcatgacacggtgccgcaacctgaactgtaagagcacgctgccagtggatgactgcgattgcaagatttgctccaccaagaaagggttctgcagcgcatgcacgtgttcagtatgccacaagtttgactgtgctgcaaatacctgcacctgggttgggtgtgatgtctgcggacactggtgtcatgttgcatgcgcgctggagaggaatttaatcaggccagggccgacgctgaaggggccaattgggacgactgagatgcagttccaatgccttgcttgcaatcattcttctgaaatgtttggatttgtcaaggaggtgttcaattgctgcgcagagaactggaatgctgagactctgatgaaagagctggattttgttaggaagatatttgctggttgtgaggattttgagggcaaggggcttcatgccaaggctgaagaggtcctcagcttgcttggaaagaaaattatttctcctttggatgcaacaaacagtatcttacaattcttcaaatatggagttacagattattctgttactggtagcacgtccaaaggtatattggcagctcaggcaagtcaatctacagatatgcggtctcttcaaactccaacgatcacaccaccgaaatcctcattcaacttcaagaccactacttccattcttgacaccgatgcacttaagcccagcccaaagccactctctattgaaccccatttcagcaccgcttctaaggaggatgactctagcctcgaaaccatcgtgaaatgcaaggaagctgaagcaaaactcttccaaaagttggccgatgatgccaggaaggaagtagatagctaccgccagattgtccgctccaggactcagaagctagaggaggagtatgctgcgaagctggcaaaagtatgcttccaagaaacagaggagaagaggaggaagaagctggaggagctcaagatgctggagaattcgcactacgactacctcaagatgaaaatgcggatgcagaccgatatccagggcttgctcgagcggatggaagccacaaagaagatgtgggtataggctggtaaaaattcatctgacgccgctgaatgtgtgaaaaatctgttgtacaccattaggatgttttccgagttgttgtattcatcctgtgatttgtgttaccagttaaaactgttataagcagagggccgcctaacctcgtgctggcagataacataactagacaccatctcattt

SEQ ID NO: 18281 - DNA, 1878 bp, Oryza sativa
  ref <308>: DATABASE ACCESSION NUMBER: AK068685
  ref <309>: DATABASE ENTRY DATE: 2001-12-06
ggtccacctctctctctctctctcccacgccacgccacgccacgcttctcctcctccagatccggttcgcctcgccggcgatggccgaagatccggcggggtcccgccgctggcggtgcgacgccggcgacgagcacggctgttggctctcctcctccgccggcggcggcggcgacgaccacttcgaccgcctccccgacccgctcctgctcgtcatcttcaaccgcatcggcgacgtcaaggcgctcggccgctgctccctcgtctcccgccgcttccacgacctcgtccccctcgtcgactccgtgctcgtccgcgtcgactgcgtcatccccgacgaccccgcgtcctcgtcgtcgtcgtcgtcctcgccgtccgccgcgccatcctcccctacggcgtccgcgcgcgcgcgcaccgtcttctcccagatcgcgcgcatcgtgctcggcggcatcgtcaagcccatccaggcgctcggccagatactctcccccgccaactccgcctccgtcctcgcagcatccgtcacctcctccccctcctcctcctcctcctcgtcctcctcttcgccgccgcttcccggtgacgtgtcgcaccactcgccatcggaggtgctccgctccttcaaggagctacgccgcctgcggatcgagctccccgccggcgagctcagcatggaagaaggcgtgctgctcaagtggaaggcggacttcgggtccacgctcggcagctgcgtcatcctcggcgcctcctccgccggcaaggacggcggcgcgggagcagctcccgctgttgactgtggcgagtccgacgagacagggagtattccggagtcgttctacacgaatggggggctgaagctgcgggtggtgtggacaatcagctcgctgattgctgcgtctgcgcggcattacttgctgcagccgatcattgccgaccacacgacgctggagagcctggacctgacagacgccgatgggcagggagtgctcaccatggacaagtggcagctgcaagaactgcgggtgaagccggtatcggcatctgggggctcacacaggacgctgatgccagcgcttagcatgcggctgtggtacgcgcctcacattgagctgcccgggggtttggtgctgaatggagcaacattggtagccattaaaccaaccgaggaggcaacaagggacacggttgggagtgggattgctgggtctgcaggtggatgctgggtttcagatgcctttgaggagccgtatcggacagccgtggggatgctcctgaagcggaggacatatagccttgagatgaactcgttctaagctgatggcaatttggaagttctatccgtgaggatgttaatttattgcaagttgcaactcaaagtactacgcggcataagaaatggagtagaagttcactggctgcctgttttactccggcacacgccctacccagacatgctgcaagttcttatttaacacactacttgtcttgagcatctgtcagcaaggacctgaacggaggctatacaaccgatgatgacgagaagccgaacatgcatcctagtttgttggaattgctgggctactcaatgttgagcttgttgtttgcctctttgaggaagcccgtacctctcccagacgttggtagcacggataatttgtgccatgccaagctgttaagtgctaatcctaatttatcttccagtactcaggagtcctgtaccgtactttttgcagaaaaagtttgtagtagtacatgcgaggttactctgtttctgtacatcaatattcaagggcacaactagcagaatcttgtgtaattgagcactgacgtacgtagcattatcaattatgcagtgaatccgagtgcttacgc

SEQ ID NO: 18282 - DNA, 931 bp, Oryza sativa
  ref <308>: DATABASE ACCESSION NUMBER: AK068686
  ref <309>: DATABASE ENTRY DATE: 2001-12-06
gtcagcctcacccgccgcttcgcccgtcatcggcgatcgcagcactcgcccgccgccgccgctccaccagtccacccacagcgcgagcagcgtgctcagcatgtacaccagtagcctccccgccagccgtggcgccgaccgatagtccaccccgccgtcccgcatcagccctaacaagaacccctcgtcgtgcggcaccctccttgtgtagcacagccacctcgccgccgaggcgcttctgcgggactcgcccgtgccggcgtcggtgtcctcgccgcccccccccccccccacatcgtccgtggccctgtggaagtagatgcggcgggagtcctcctcgaacgcgacggcggtgacgtcgcccgcgcggaggccagtcaagaggtccgagtaggccacctccttggctgcattcttgggcagcgcgaggcggacagcgaggaggaggaacgccaggacgatgggcgccacccaccgcccttcccagtagtcacatctagcctcctcccctcctcctgccattgatggatgcttacctaatttgccggaagtgacgacggaccggagcgcggcgttccacagcgcgtcgacagggtaaaaccagaggaggttgaagagaaacaaggtgagcacggcgcagacgagccaagcggagacgactctattgaggaagctgcaaaggttgctggtggtggtggtggtggtggtcgccggagttggacacgacagccgggtggcgccgtggcccgtgacgcggtggctcgcgcgtggccatagctagcgcgtacgacgaggacgacgaggtcgtacgacgtcgaacaggtgagagtggtgacttcagatagtttgtacatgtagagaggagatggatggagtgtaacttggaaagcacagcattattgcttaatcgaacataaaggggattaacatc

SEQ ID NO: 18283 - DNA, 1292 bp, Oryza sativa
  ref <308>: DATABASE ACCESSION NUMBER: AK068687
  ref <309>: DATABASE ENTRY DATE: 2001-12-06
ggcgaggaactctctctctctctctgtgcacaccccgggaggaggaaccgagggaggaggacaagtcagagcaaggggcctcgacggcggcgaagccctccaactcacaggcgccatgtcgatgtcactgttccctgggatggatcttacgaaaatggatgctcctactcttaccctccttggagcagcctgctgtgtaatgctatcgatgcattttacagtacagttggtgtcgcagcatcttttctattggaagaatcccaaggagcagaaggctatacttattatcgttctcatggctcccttatatgctataaattcctttgttggtcttctggatatcaagggaagcaaaacatttttcactttcttggatgctgtcaaagaatgctacgaggcactggctattgctaagtttatggcactgatgtacagctatttgaatatatctattagtaagaacatagttcctgatgagatcaaagggagggtgcttcatcattccttccctgtttcccttttcctgccccgcaatgttcgattggagcataaaacactgaagcttctgaagtactggacctggcaatttgttgttgttaggcccatatgcgccattctaatgattactcttcagcttcttggtctgtaccccagttgggtcagctggacattcacaatcatactgaacttttcagtctccatggcattatacgcactggttattttctaccacttgtttgcaaaagagctggcacctcacaaacctcttgcaaaattcttatgcatcaaagggattgtcttcttctctttctggcagggttttgcattagaggttttagctgccgtagggatcattcagtcccaccatttctggttggacgtggagcacatccaggaggcaatccagaatgtcttggtgatcatcgaaatggtcttcttctccgttctccaacaatatgcttaccatgttgctccatacagcggggctgacagggcgaaattcgagaagaagaatgaatgatccaggttttgtactgagtaataccctccagctcttgtatgatatctctctgtatggactcacagtgttataaactcagtgtttcttatgcacacgagtagagtaagtacattacaatcattagaaagctagaggtgcctgaataagtggtggtttcgtcttgttgtacacaatatcatgttggactgaggatcttgtgtgtacactgtacagtgcagcctttggaggcaagcaaatccattatcaataaagctatgtacttccaagtgcc

SEQ ID NO: 18284 - DNA, 1106 bp, Oryza sativa
  ref <308>: DATABASE ACCESSION NUMBER: AK068688
  ref <309>: DATABASE ENTRY DATE: 2001-12-06
gggatattcagacacacaccttcaataacttgcaaggataactcaaactacttgaatcagatcagacaaaaacatcataagaatatcacgatgtgtggaggagcactgatcccgaacgactatggcgacaagccgccgccgccgccgtcggagtcgtcggagtgggacgccacaacgaagatgaagaagaagaagaagcgtggtggcggcggcgacgacgactgggaggccgccttccgggagttcatcgctggcgacgacgacgacgacgacggcggcgtttccatgttcccttctggtgcagggacgatggagacgaccacagaggtggcgccggcggcggcggtggtggagaggccgcggcggcggcgaagggtgaggcggagctacccgtaccgcggcgtccggcagcggccgtgggggcggtgggcgtcggagatccgcgaccccgtcaagggcgcccgcgtctggctcggcaccttcgacaccgccgtcgaggccgcgcgcgcctacgacgccgaggcgcgccgcatccacggccacaaggcaaggaccaacttcccgcccgacgagcctccgctgccggcgccatcgcaggcgccgttctgcttcctgctcgacgacgacgacgacgacgacggcgtggcccgtggaaacagcccggcgtcgtcgtcggcgccggacagagcctccgcttgcacgacgtcgtcgacggtggcgtccggcgagcgaggcgatgagctcatactgctggagtgctgctccgacgacgtgatggacagcctcctcgccggcttcgacgtgtccagcgaaccacgcagtgttttgggaatggttaattagcagcgcgcacgcctgattagatcggtacatgtgaagtacaagagaagtagttactactagctaagagcaaattaacttggagtgcaagaataaaatatgcatgtctctgcactactactgtagtgttagcaagtttgctcattgttctgttgtatcctttcatgtccatttcagacttcccaatgctacataaggatgtacatatgtatgatgttgtgtgccttgttaatcaatgaatgtaaaaatctttatattgcttttgt

SEQ ID NO: 18285 - DNA, 2349 bp, Oryza sativa
  ref <308>: DATABASE ACCESSION NUMBER: AK068689
  ref <309>: DATABASE ENTRY DATE: 2001-12-06
gcttccctcctctctctcttcgattcccctttccccccctcacccacccacctccacgcccccgccgccggccggccggccggaaccctagctccggcgagcccctcccaccccccggccccgggcctggctccacccgacgccgcgcccctcgatcgggtcccttgcgggggaccgcggcgtcgaggagggcgatcgcgagatcgggggaggttgctgctgctgctgggcgggtgggcggaggggagggggtgagggctgccatggcggggagtgggaggccgccggcggcgcagaagaagatcctgcagtcgctgcgcccgccgctgccgttcgccgcctcgtcgaggtcgcccttcgcggcgcccaacgactaccaccgcttccccgctggtggcgcggcggcggcggcggcgtctggttcgggtggcatcggcgcgggcggtgctggcggcggcggcgatatcgaggaggggctggtcatccggacgccgcaaaaaagaaaagcaccagaagaaagtgatgttgctgagtctagcgactgtatgattactagccctggatttgctgtcagtccaatgctcactccagtctctgggaaagctgttaagacttccaagtcaaagactaagaacaacaaagctgggcctcagacacctacatcaaatgttggttcaccacttaatcccccaactcctgttggtacatgccgttatgacagttcgttagggcttctcacaaagaagttcataaatttgctgaagcaggctccggatggcattctagatttgaataatgctgcagaaacactagaggttcaaaaacggcgtatatatgatattaccaatgtacttgaaggaatagggttgattgaaaagacactcaagaacagaatccgttggaagggcttggatgattcaggagtggaattagataatggtctttcagctttgcaggcagaagttgaaaatcttagtctgaaggagcaagcattagatgagcgcataagtgatatgcgtgaaaaactaagaggtttaactgaagatgaaaacaatcaaagatggctctatgtgacagaagatgatatcaagggattaccctgctttcagaatgaaacactaattgcaataaaagctcctcatggcactacacttgaagtcccagatcctgacgaggctggtgattatctccagagaagatatagaatcgtattaagaagtacaatgggcccaatagatgtctacttagttagtcaatttgatgagaaatttgaggacttgggtgggggtgcaacaccatcagggcatgcaaatgtaccaaaacatcaacctactgaagtcttcaatacaacaaatgctggggttgggcaatgtagcaactcagttgctgtggacaataatattcagcacagccagacgattcctcaggatcctagtgcttcacatgattttggaggaatgacaaggattatcccttcagatattgatactgatgctgattactggctcatatcagaaggggatgtcagcattactgatatgtggaaaacagcaccagatgtgcagtgggatgagagcctggatacggatgtcttcctatctgaagacgttagaacgccaagttcacacaatcagcagccatctgcagtgggcgggccacagatgcaggtctcagacatgcataaaccctaggatcacaggggttacagaagtgaaaagatgacatctggaattcctggagcggtgtttgtagtgaaaagtgaaagcatgacagcaaatgctcattgccaaattgtaaagagccgggtggtcttcatcagaatatctgcatcttctcgagacaccaagtccgtgcgagagatcaggatgacaccattccggattcacatctgctgtggaggctggtggcgtcaactaacttaccagcctgctgtttcagcaccctgcttcagtcgaacgggagtaaatcttgctgctgctttcgctgtgaagcctgctgcggtgctcattaaggcactgatatattttttgcattcaaaactaactagtcatcagcaaggaaacggtgggctttgctgtgctctgtcgagtattctttgaaaattctttgtacattgggaggtataagggcatgcagggctcgagttattggtttgacgggagcaatgagctgagttaatgatgtaaccgagccgtctttgtaaattgttccatgctcttcctcaaatacaatggatagactttcattttgagatatgatgcttcagtagtcatttgctagtcaccatggagtgatgtgatatctttgctactggtatgaacctcaaaatgatactcgccgttaattttt

SEQ ID NO: 18286 - DNA, 1325 bp, Oryza sativa
  ref <308>: DATABASE ACCESSION NUMBER: AK099065
  ref <309>: DATABASE ENTRY DATE: 2002-08-28
gggcgagcggtggcgccacgggggaggaaggcggcgagctgggcgtcggcgagaactcgaggagaccgacgagaggccagtccaccaccgcgcagccacacaggcacggggaagagtggcgcgcgcggccgccggagaaggctatggcgtggatctggatgctcatggcggcgggggccgtgctcctgtgggcggtttctctggggcgggtgctctcctcctcctcgccggcgtgtctgcctgccaactccaccttcctctcccctcctcgcggcgacaggatgagccggaatgtcctcctcgttctcgcccaccccgacgacgaatccatgttttttgctccgactattcttttcctcaagtcaaaaggtcacagcattcatatcttgtgcttgtctcaaggcaatgctgatggccttggaaatatccgcaaagaggaactctaccttgcctgtgtcactcttaagattccagctgagcaagttaaagtcttggaccactcagaactgcaggatggatttcataaaaattgggatcatggactaatagcagaacttaccctggcacaatcccagttatggaatatcgacacgattgttgccttcgattcccgaggagtatcaggccatccaaatcattgcgatgttcatcatggaatctgcaagcttctgcgtgacaacgggcaaggacacattgaagcatgggagcttgtaagcttgaacatttttcgcaagtacagtggtccagttgacatttggctatcttccaccctctcctcaagctcaaaacaaccaacttatactcttgttaataatagcccttccagaagctttgaggcaatggcttcacacaaaagccagtgggtttggttcaggagattgtttgtcctattctcaagctacacatacataaatgtgctccaaaaaatttgaagtttgttgtcgtgccaaagcaagcaccttccggctcagattgtcaaatgcctgtacatgcagagtgccagagtgtaagcgggaagcttctctgaagaaagacaacaatgttgacattggatcaggaattcgaaagatactgaaatgtgatgatgaaatgcaacagtttaggaacctttgtgattatatgccctttatacttgtgttgtaggccatcgattgtgttcatagagttagattggacctctgtatcctcagctagtttctcttgcttgaagagttattgccgttgttggacgatcaatctctattgcagtgttacacaaggtaactgatgaactgatattactatgctgtcgctcaagctgtattcaagccagacaattttgtctt

SEQ ID NO: 18287 - DNA, 1399 bp, Oryza sativa
  ref <308>: DATABASE ACCESSION NUMBER: AK068690
  ref <309>: DATABASE ENTRY DATE: 2001-12-06
gcccacttccctcttcctccattcgattcttcccaccacaccactccctccgcccctccgcatcgcttcctccgccgccacccccatggccaccaccaccaccacctcctcctcctcctccaattcccaaaaccctaaccccttcaacctcccgccatggctccgcagcctccgctgccccttcaccttcctctgcccgcccccaccgcccccgccgccccctcctcctccgccgccgccgccgcctcccccgctggaggtggtgtcgccgtccccgcggtggaggcggccggggctgagggtgaccacggagtacgacagcgaggaggccatgttcgcgcacaaggtgtcgtgcaaggtcgcgggcgggctcgccaagctgcggctgtcgttccagagcgacccgtcggggcaggggttgggggaggagggcgacccgcggcggcagctattcgtcgcgcccgtggtcgggctcatcgccaagaatttctccgtgctgtacgacgtcgaggcccgcaacgcgctgctcagcgggcagggctccctccccggcggcgccatccagctccgcggctcacacgatgtcaaggagcgacaaggagaagtctcagtgatcactaggctgggtgatccgtcttataaacttgagctatcatccttggtgccttacaatggtctgccgagagcaaccctccactttcctattggtcaagtgtcagttgaagagaggagaaacgaagcggatgagaaaatgttatccctttatggaattgcaaaatctaatttcttggatggcattcttactgcccagtacagtgaaaacgatattaatctgagatattgttataaggacaatgaactaactttaattcccagcgtgtccctgccttccaatgctgtatccttaggcttcaaaaggcggtttggtccttctgataagttgagctatcgttatgactttaccactgatgactggaatgctgtttataagcgcacagttggtaaagatttcaaagtgaaagctggttatgattctgaggtgcgagttggatgggcttcagtttgggtgggtcaagaagacggcaaggcaaagaccgcaccaatgaagacgaaacttcagctcatgcttcaagttcctcaggacaatttccgcaatcccaccttcctgttccgtgtgaagaaaagatgggatctgtagcatatgctacattatatactccatttgtatggggataccagtattgggtactcgggatttggccaacattttgttgtaagctgcgtaggatggcttgaaaaaaaaaatccatgaagcctttccaattctcatcatgtaattctgcctgctgtacataacggccatcgttcgttccgcacataagcaatttgatttccatgt

SEQ ID NO: 18288 - DNA, 2035 bp, Oryza sativa
  ref <308>: DATABASE ACCESSION NUMBER: AK068691
  ref <309>: DATABASE ENTRY DATE: 2001-12-06
ggcaccgcgcgtaggcggcgcatccacgaggcgcgcaagagctaagctaataatgcggaatagcgatggatagcttcaatagcttggagccttggatctccatatatatgctcgtagtagcgccatcacggccttttctctcttccttctcctgcggtatatgtgctgcatatgtgcaaaagcctatgactactagcttgtttggagtttttgtaccgattgatcgagtaacgtttgcccacgcactccgcgggtgttcgatgtattcaacaatattttgagcatgtgtggaggccggacgcgcatgtatgttcgtggtggtgtgagtgtagcatgcgtaacgtgaatataagagactgtccaaacatactccctccgtcccaaaaaaaagaaatccaatatagtattggatgggacgttttctaatacaataaatctgtacaggagtatgtctagatttattatactatgaaacgtctaattcaatactagattgagattattttttgagacggagggagtactttcgttcgagctatatatatatggcctatggctaataagtgtaaaatcgaaaagtaaatcgaacaagcaaaacaaaattatatgtacgtacaactatatatctatgttattaatcagtttaaaagaccgatgctaaaaaaatatgctaaataaatgaaccctaaattaaccctataactatgttttaaaaaactaaattttgaccgtggctgactgtgaccctgccaacatacaattgatagtctctcggttgcataattcgtagttaccatattccttgcatgtgggtctcgtggtcttgcgtatgtgtggttaactgcatgcatgtgatcaataaaaatttgagtatttttactatgcattgggtccaggtacctaggtacctgcaatcagagccattcatcgagtgtgatattcaattgttgtcaatcttcggtactatcaggtacaagaatcctcttggcggtacccccttcgttgaacaagcggaagtgcaaaactgggtttaaaatagttttttttttgtgctgattccgcacctcaggctcttccccatcgccgcggtgcaatcaaccttgctagccgaatccaagctaccgagacaccttcaactccctcgctacaaactgcagccacgacgacgtgctcatcagcgcggcagtaacctcaggaaacatggctaatgttgggtcgccggctcgactacttcccagccttctcccacctccttggtgctagtacatctgaggtaattgttgggtgacgcgacgactttgggggaacctcctaaccgccctccccagtaccctcccaacgacacagctacttcctccctcctccctgatcaaatctcaaacgaaccgagattagcaacagttgcaagtccagcttcatctcaacccaccatcaggaatgaaggcgaggtcaagagcaggtacaagtccagcttcatcttgctaagaatcataagaagcgaatcctggaggtggtgatcagggacttctgctatgccgcagcagcagtcaggtcgtggtgccatcggtagccttcaaccctaaatacaaaccgtcgcccgtgaaggatagtacgagactaggaggtcgcgagggtcttgtttccttctttttcctattgtgtccttgcttattcaacggttagattttgtttggtaccttgcagtaccagtatttggaggtaccatttaatggaccataaaaacactccaaaaaattacatgcatcttgtgtgttactagggagaggagttccactcttctctctcaccttctctccctaactcccgaagacttggatagagtggggctttgtgttggttgtaagggtcgggttttggctgatctcggctatattctgttgttggcctagcggcggtcggtcacgcttagcggcggctggtctggtgatagccttctcctggatgtgtgttggtgctgtcggtgtatgtgtggtggtatactttttcattttcctggttacgaccttacagggtt

SEQ ID NO: 18289 - DNA, 1638 bp, Oryza sativa
  ref <308>: DATABASE ACCESSION NUMBER: AK068692
  ref <309>: DATABASE ENTRY DATE: 2001-12-06
gaggagcgacgtagacgagctaccgaccaatccccatggagctgctgctgtaatccacacgacagagtcagagatctggggactaagtcccaagaacatccctccctcccctcccagccaggagaaatccaaggctgttcttagcgctttgctgaattgcatttcttcgaattcatttcatcgcgctgcaccgattgctgttcttctatggatttgacactgaaaaagggggacagcgtgattcactcgagttgagatttctcaggtgtcaaaaggcaaaacgacattgatgcatgagtgttcttggatgcttctttacatatgtagcaggaaactataggatgaggaaaaggaactccttgaagttcagtatttctgtttggttgatgcatatttgcaggactgaaaacattggaaagtgtaactaagcagtaagaagatctgaatatgagtggaagacgtgatgattcagctaagatggcaaaactgaaggagctattgcacagaagtgaaaaccgtatctgtgctgactgcagcgcgcctgaccccaaatgggcctaatataggagtattcatatgcctcaagtgttccggtgttcacagaagtcttggcacacacatttcaaaggttctgtcagtcacactagatcagtggagtgacaatgaaattgataacgtgatcgaagtcggtggaaattctcacgccaatgctatatatgaaaccttcctgccgcagaaccacagcaagccacatccagattctacccaggaagagcgagaaaaattcatcaggtcaaaatatgagttacaagagtttcttgagccaagcctacggattgtttctcatcagtctagcgactccgggaaacatgcaggcagtgcctcccattctgtcagttccaagagcgaagtaggcatgattgagttcatcggaatattgaatgtcaaggtgaaaggaggcaccaacctagccatcagagacatgtcaagcagtgatccttatgtagtcctgacccttgggcaacagaaagcgcaaacctcggtgatcaaagccaacctgaaccctgtctggaacgaagaactcaagctctctgttcctcagcaatacggccctctcaaactgcaagtgttcgaccacgacatgctgtccaaggacgacctgatgggggaggccgagatcgacctgcagccgatgatcaacgcggcggcggcgttcggcgacccggggctgctcggcgaccggcagatcggccggtggctcaagtccggcgacaacgcgctcgtcagggacagcgccgtcgtggtcgccggcggcgaggtgaggcaggagctggccctcaagctgcagttcaccgagtccggcgaggtggagctggagatgcagtggtttccactcaacatgtagaacaaatcacgctgtcacttcggatttcaagctggagaattttagaaaaagaaaagatgggttttgataatgaagttcattgcatgaactgtttcagcaagtttttgcgttgtttacatggcaaattttgctgcgttcagaaattttaaatttttggtttggcacgagccattgccctgttaacttggttcatttgtgattccaataaaaaggattcttttgtgctctgggtt

SEQ ID NO: 18290 - DNA, 2801 bp, Oryza sativa
  ref <308>: DATABASE ACCESSION NUMBER: AK068693
  ref <309>: DATABASE ENTRY DATE: 2001-12-06
gatcgcaacgcacgcacaattcacagcaacacaagcagaagcacagtagaacgcctaggaaatactacgtcgatggcgaggtgggccattgcgatccacggcggcgccggggtggacccgaacctgccggagcacaggcaggaggaggcgaagcgcgtgctggcgcggtgcctgcaggtgggcgtggacgcgctgcgctccggcgcggcggcgctggacgtcgtggaggccgtggtgcgggagctggagagcgaccccttcttcaactccgggaggggctccgcgctcacccgcctcggcaccgtcgagatggaggccagcatcatggacggccgcggccgccgctgcggcgccgtctccggcgtctccaccgtcaagaaccccgtctccctcgcccgcctcgtcatggacaagtccccccactcctacctcgccttcgacggcgccgagcagttcgcgcgcgaccaggtaaattatctttcgctaattaacccacacccaactaataaatcccttccaattaattatgctaatttcctggttaatctaacctgcctctgcacgctaattaacaaaacatttttaatgtggaattattctgtggacatggcacgagggaacgacggatattaataccggacagccaaaatctaatggtggtaggaaataattaaaaactgggacatgttcgacacgtgtaaatgacgtccgggaagccatgtacaagtgtgcaacatgaacctccaaacagtaaacagagcagcaacagctctgcattaccaaaaatggctccttgtttccttgcacagttcaatccagcaagattccattccaacacgacaacacatgcatgtgaatcctactacggctttacatgaaaaaaaaaagtaaccttttttctgttagcttatttgtaggatataagtgcaagaaatctttagtttcgtttttttctatatcccttaatcctattgagtcatttgggtgaacatgtcatctaactatgtgagttgcatgcttatctagctttacgtgatttagtgggaaatacaattgatgtgatagaggtttaattcaataggccaacaagttaagcaatcttgcttaacaatttctatgtttttgctgcatgtgcatacaaatacatccacgcatctgaaaatttttctgtgtttttgctcacgagttttaccattttcctttttgtttatgcttgtgcacaccttcacgtgctgtcgccttttcgtccccgggtctttggagaaagctgtggaccaaaaacgagctggtttctagtagtatcaatgaaagcaacagcggcgcaactgcctcctgctgtgcttgaatttccctatcaatcgctagagcggccattagcttgtaggtgtagtaatttcttcgttagtgttggcgaaggtattcatttctttcccttacatcaagtgctgagaaaaaagaaaactaaaaaagtgccacccaacatgcatcaatagccgccatgcaggtttgcacctaccaaatcctttttttttcatttatttggtcgacacgattcgtgttaaaccttcctgcggtattttgtatcgcctagtagtatagtcgttcgagtcctcaagtcaagattgtgtagcacccagccacccacaccaagcaaagcctaggagcactgaaaatgaaatgaccagtccgatgcatgtgccggaaaaaacatttttcttcactaaacaaaagtaaacactagaaccaactactccgtggcactgtagcaactactagcatgtactaggatggattctatgcacagctaggcaggctctccactgtgccagattcggcgctgcccctgtttctttctgcccggtcgaattttggcaggaccagcagctgcaggaggaatccgtcctaccagcgtggtccacccgaatcctgcagatctcacggtgtagtggtggctgcgtagccaagtacaggagtattagtaggtctagaggtcgtcgacaacagctacttcatcaccaaggacaacgtcggcatgctgaagctcgccaaggaggccaacagcatcttgtttgactaccgtatcccgctgtccgggtcggagacgtgcggcgcacaggccgtgtcgtcggacaacagccacggcaacggcatggtgatgaacggcctccccatcagcatctacgcgccagagacggtggggtgcgcggtggtggactccagcggccacaccgcggcggccacgtccacgggcgggctgatgaataagatgacggggcgcatcggcgactcgccgctgatcgggtcggggacctacgcgtgcggcgcgtgcgcggtgtcgtgcacgggggaaggcgaggccatcatccgctccacgctcgcgcgcgacgtcgccgccgtgatggagtacaggggcgccgggctgcaggaggccgtcgactactgcgtcaagaagcggctcgacgaagggttcgcggggctcatcgccgtgtccagcacgggcgaggtggcgtacgggttcaactgcaccggcatgttcagagggtgcgccaccgaggacggattcatggaggtcggcatctgggagtgaggtgggcagcctttgtgcgtgcgtgcgtgggcctgtggccatcatgcgattgccatagagtggtgtcttggggtcatgggccgcctcccgtgtgttcgtgggctagaattagtgggtattaattagtggattggggagattggaggtgggcttgaataatgacgatgatggcgataattcgtctggaaataataatgtgaaaagttatattgct

SEQ ID NO: 18291 - DNA, 3046 bp, Oryza sativa
  ref <308>: DATABASE ACCESSION NUMBER: AK068694
  ref <309>: DATABASE ENTRY DATE: 2001-12-06
ctctctctctctctctctcctctcgctctttctttctcttggccgagcggagcagcaggggcgggctggcacggcggggcggcgcggaggggagagggaagggcggcgccgggcaaggaaggggaggaaggtgggggcggcggcggcggtggaggccctcgcggccggctcgacctggggccgagcatcccgcattgcaataagcagacaactggactagtccaaagagttgtacatgagctttttcaatctctacaatcatcagaaagcatcgctatgtggagtgtgaagttgccgatggtaaacgttccagcctcatgttctgaatttgaacccacatcactaaatctttactcacattgatatgccatttctcaggtggagtatctggaataagtaaggtcagtgtttgtcatgggcattgggctggaaggcagagacccataggcagcccatatcaattaagttaggacagcattatttgttaagttgaagataagattagattgagttagagataagattagattgaatccttacttaggggtcaagctatgccatctatataaggatgggattgtgtctattatcatcaagtaatgaatatcaattagtctaacctctccatcccaataatgttcttctccgtagcctagatctacatcccttctccaagagccgacgccacctggctatcttcccggcagtgtttatcctgtcatggcctcgggtcatgacaacttggtatcagagccactcaccatagcttctgatgccgagtgagttctccgtgtcacggtgagtcatctattgtacccggtggatgagtatctactccaccaattgtttgatggctatggagtagaaaagaagattgaagtgcaccagatgggaacatatgtggaagcctctgttccgtttcaaactcgagcagccgctgagcatgcttggaacctcaacggccgtgccatctatgatggttgttggttggacatacagtgggagcaaccgtccaacaactccacgacaccggtgacatctctctccatgatcatcacggagtggaaggaagacatcaaggagttgagggctgtcctgcaggacttggtagcatttttgcaggaggagctggcaaaagaaaaggaagaagggcggcaatgggactaacggtgacgccggcgcttgatatgccatcaattcagtcaatccgtccagtggcctccatgtcgtcacaacttcaagatctccaagcgagcagatctgcgtcacaggccatgccaaggcggccatcgacctcttggagttggacttggcaacggcgtcatcgtcggcaaggtggagtgatggaggcgagcagagccgttgttgtgggcccacgaggacgacgaatgatggacgaactatttccgcgagctctagatgcggcagcggcggcgctgatcttggaggtggcagttggtgggttggatgggcggcacgtcttgctgggcgagaaagaaacacatcaacgccattcttttcacacagtaggttcgcgtcctcattgtttggaggcgctacggacgagagaagctgacgatagggttttttctctgcttctaatgggccgacaactattcatttgggtcgatcaagtggagtggccttccagtgccgcaactcatggcttggctgttgggttggccaggtagacctcggctgcagactaacgggcccatcttggatgtgagaccttggcccatctacaacatccaagatatcatgtgagataagtagtattaaatttaaatatagaaaagtggtgtttgttttgaaagagtagtgtctagtactagtttcttgatgatgtggagtttatgtaaactatgtctagtgtcttgggttgggactagccgtagaatttatatggagttgcattggttccaggcttgtggcacggcatggcctcgtcctttctttacgagacgtaggacgggatccacctcctgctagtagaacatattttttcgtattggctttatcttctattccaattaatctaataagtcgagatgtaaaaagcttatgttatcttagattggagtcatttgagtttagaagtccgtgttgcagctcgaggacgagctgctcaaaaggaggggtataatgtcattggcattgggccggaaggaagaggcccatatgcagcccatatcaattaagttagatataagattagattgagttagagataagattagattgaatccttacttaggggtcaagctatgtcatctatataaggatgagattgtgtctattatcatcaagcaatgaatatcaattagtctaacctctcccttccaataatgttcttctccctagactagatctacatcccttctctaggagccgacgccgccaggctatcttcctggcggtgtttatcccgtcatggcctctagtcatgacagtgttgttgagaatattttcttatgctttccctgtacagattcgaatgttagagagtatcaaactttatttcattgtatctcagggaccttcttgacttgtccaaagacaacctatagatcaaggagagtaaaactcaagggatctacatttctagagcaacagaagtaagaaaaaagtgcttaagatatgtccttgtgttttcaatttgacataggaaatttgcacctaggaatttagacttaggacatatatatgcaaatgttttcaatttagacttgggaaatttagacttaggaatttctgtcttaggatatatttgcaaatgtttaggatttagacttagaaggttttgaacttaggatttttagacttaggtatatatatttgtaaatgtgaatgatttggctatgaatatgaatgtgcctatatgcaaatgtgatgtgaatgtgaatgtggctctttgttggtgaatgcatgtgaattgtgtgatttggattatgtggttgtgaatataaagcatattggaattgtcaggtgctgctatttgtatgtgaaattgtcaggtattgctatttttaatttttttttaccc

SEQ ID NO: 18292 - DNA, 3151 bp, Oryza sativa
  ref <308>: DATABASE ACCESSION NUMBER: AK068695
  ref <309>: DATABASE ENTRY DATE: 2001-12-06
ggccttccgctcccttctctctcttccctctcaactcctctctctctctccttcgtcgtctcctcctccccctctgctcctccccctcgtggcgcctccggcttgccgcgcgcgcccgcccgcccgcccgcgcccaccggcgcgagccgagggtacacgaggagttcggcctttccggtttccggttgtgttgtgaggagtggcggcggcggcggcgaggcggcgacgaggcgacgccattgcggggtgtggcgcacaccacacccccctcatcgccgctggaccggcatctctgcgtgtgattgtgtccgagaagaaagaggaagtcgtcgtgcgtgcgtcccctcggcgtcgactgctgtattgatgcgatggagcagcgtgaggatcataccaaatcatcagaacctgcattcattccatccaaaaggactcatcagatgagaaacatatgggcatggggaggtccttcttcaactacagtcaacggatcaagtgacgcggtcttgttctccagctcgttgccatcagttctgcaatttggaaaactgccaggtaaagaaagggagtacaatgctcaaccaaaggatgatatgtttcccatgatgaagcagccaggcactaatgctagagtggctgaccccatggatgatgtagcacagcatttgattggaaatctgttaccagatgatgaagagctattggctggggtaattgaagattttgatcatgttaaactgagaacccaagttgaggaatcagaagaatatgatgttttccgcaatagtgggggtatggagctggatattgaccctctggaaagcatcacctttggtacagcaaaggctagccttgtcaatggtactggaagtagcactaatcagtacagcatccaaaatggtgctggaacagttactggtgagcatccttatggtgagcacccgtccaggacattgttcgttcggaacattaatagtaatgttgaagactcagaactgcgctcattgtttgagccatttggggatattcggtccatgtacactgcaacgaaacacagaggattcgttatgatatcttactacgatatccgtcatgcaagaaatgcaaagactgcattgcaaagtaaaccattaaggaggaggaaacttgacattcactattcaattcccaaggagaatccgtcagataaagatatgaaccaaggaaccctggtgatctttaattggaaccagctgtttcaaatgaggaactccttcaaatttttggtgcatttggtgaagttagggagataagagagacaccacataagcgacaccatagatttattgagttctatgatgttagggctgcagaatctgccctccgttcattaaacaagagtgacattgctggaaaacgggtaaagttggaacctagccgtcctggtggagctcgccgaagttttatacagcattttaatcacgaatttgagcaagacgaaacaaagcataattcatttcagattggttcaccttctgccaactctccaccaagtttgtggtcccaacttggcagcccaacagatgaaaataaattaaatgcactcaatgaaactgcatttaatgggggaatgagccctttgggcagtaaccatctttctgggttctcttcaggatatcctcccatgaaatcacccgttgggaagagctcctattggaataaccgtgctgacaacatattccatgggtcaccaactttgcacaattcacattcgtttccagaacatcatggtggaattataagtgccagcccgcttgtgtcatccgcagcttcgtcagcctctactgcatctggttttactgcactgactggaacatcatttctctggggtaataacaataacttaagggatcatggccagccttcatctatccaatctcaagctcttagcaactcactttttcccaataaccagccacaacgccagagtaatctgtatcagaatctgcgtggttcctttggggcatccgagcacttctcccagtttaatgttgggtctgccccatctgttttcccttttgagagtaatttcggctatttctctgattccccagacacatcttacatgagacagggaaagtttggcggcacaggccccacacgtgttagtggaagcctcatgacgaactttggtgcctatccccgcattaatgttgcttccatgcaaaacggttcagttggttttgaaggtctgcttgaccgtggccgaaatcagacagttggaaactctgggtgtcaggaagatagcagagtgcaatatcaattagatttggagaagatcattgctggtaaagacaccagaacaacgttgatgataaagaacataccaaacaagtatacatcaaatatgcttttggaagtaattgatgaaactcatgaagggacttatgatttcttctacttgcctattgatttcaagaataaatgcaatgttggctatgccttcattaatatggcatctcctggttatattgtatctttctttaaggcatttgctggtcggaaatgggaaaaatttaacagtgagaaagtagtctcgttggcatatgctcgaatacaggggaaagccgcacttgtaaatcatttccagaattcaagcttgatgaatgaagacaagcgctgccgccctatgctatttgatcccaagcatactgaaaacaacaatcagatcctgttgaacggaatatttatctccatggcccagcaagatgccacacaagaaaggcatgacctccctgaaaacccaagggaagataatttcagttaaaagattcaagtaatcggcctaccgggaggtttttctgaaggaggctaatttatctgcagtagacgctgactgttggattgtgaaatgtacaaaacagagagaacttgatgccgcattttgttggtttgcattgacggtgatgcatggatgcagaaagctcccagatgattaggggagtaaaagtgtttcccttttgtgtatagtcttaatgacagtggaaaggttagatttatgaagaaaaaaggttaggttgaaggcgacaaaaggctttactgtagttgtgaacagaaaggcagaaaagtcctgctttctgtgcagtgctgtagtaattccctcttatcttcc

SEQ ID NO: 18293 - DNA, 1006 bp, Oryza sativa
  ref <308>: DATABASE ACCESSION NUMBER: AK068696
  ref <309>: DATABASE ENTRY DATE: 2001-12-06
ggccatcacagagtgcttagctagctcacactaaaagatatagagatagaagccactgagagcttgagaacaccatgtcttcctcggttcttctcttcctcgtggcgctgctgctctcgtgcagcaccatgggcaacgctgcacgacgcctggaggtggagtacccggcggcgcaccccgccatgccggagcttcccaagcctgagctgccgccgcaccccgtcgtgccggagctgccaaagcacgaagaaccaccgccacacccacaccccgccgtgccggagcttccgaagcctgaactgccgccgccgcaccccgccgtgccggagctgcccaagcacgaagagccaccgcaccccgtcgtgccggagctgccaaagcccgaggtgcctcaccctgccgtgccggagttgccgaaacacgaagagccaccacaccccgtcgtgccggagttgccgaaacacgaagagccaccgcaccccgtcgtgccggagctgccgaagcccgaggtgcctcaccctgctgtgccggagttgccgaaacacgaagagccaccacaccccgtcgtgccggagttgccaaagcctgaggtgccacaccctgtggtgccggagttgccgaagcccgaggtgccgcatcccaccgtgccagagcatgaacagccgcccaagcctgagagccattatcccgagaagccatgatcgatccagagatcgatcgatcggccggtcgtatcgtatcctgaaattactacgtgttgctgtatgtgtgtatgttcatgtgtaagctttgatcgatgtttgcctaagatattttcagtgatgatctagctagctgtgtgagtgtgtgagatgatgtacgttgttgttgtgttttgttttgtggcagctttctttgttcttggatgagttattgtgttatcgtatgtgctgatttatgtgtgtgcacacacgatctacacttgtatcatacatgcttcataaatcaataaaatagctatcttcct

SEQ ID NO: 18294 - DNA, 4248 bp, Oryza sativa
  ref <308>: DATABASE ACCESSION NUMBER: AK068697
  ref <309>: DATABASE ENTRY DATE: 2001-12-06
gggattcccaccacctcctctcctctcctctcctctccttcttcctcttcccctgcactgcactgccactgcattaatccccttcaccgattcctcctctcctctcctccacctccacctccaccgcacgcaccaaaccgcagtttctctctctctccctttcgctgttcctgtgtgccttgcttagctgccgctttcctctctccctccctctctttctttcttcctctctctgctcaacctcacaaaaattccccccttttgctctttctctttctttcctccccgatcgacttcttcttcttcttcaccttctccagttctcctcatccgtcttcggcgatctttgccgctgtgaacatttgacagtttacaggttcctccatttcagttgttggattaagaaagaggctttatgctttataaataagtaagcatcatcatcaatataagttgtggctgctcttaaagatcctcagattctgtacaagttcagagcttcctctgtttggcagtgtcagtacacgtgcttgcatagttcataactggggtggagatatcttagtttcatgttctttgtgcttcttggctcttacccagctggtttaacatctgatgggctgctcaccttctaaggtgtgttcatgtccacattataagggcagtttgtgcttctgtgactgtggatgctttggacaaacacctgactccccaagagagtcaaggggaaaatcaaaccgggttaggggaaagacagattctagtgcttcagatgcttcttctgatgacctagaggaagatgatgatggattgcaccaaatgaacattacaagggactctaatgttggtatcaatcgactctcaagggtctcatcacaatttcttccaccagaaggttcacgtaaagttcgaatcccattggggaattatgacctgagatattcctacttgtctcaaagaggctactacccagaatcattggacaagccaaaccaagacagtttttgtatacatactccatttggaacaagccctgatgaccatttctttggtgtatttgatggccatggagaatatggagctcagtgctcacaatttgtaaagcgaagactatgcgaaaacctgctcagagatgaccggttccgtactgatgttgttcaggctcttcattctgctttcttggcaacaaattcacagcttcatgcagacagcttagatgattctatgagtggtactactgcagtcactgtgctggtgaggggtaaaactatttacattgcgaatacgggtgattcacgtgctgttattgccgaaaaaaagaggggaagatgttgttgctgttgacctgtccatagatcaaacacactacaggactgatgagcttgaaagggtcaaggagtgtggtgctagggttatgacgttggatcagatagaggggctaaagaacccagatgtacagtgttggggcaccgaggaaagtgatgacggtgatcctccaaggttgtgggtgcaaaatggcatgtatccaggaactgcttttactcgcagcattggagattctgtcgctgaatctatcggtgttgtcgctaatcctgagatttttatcctggagctcaatgccaaccatccattctttgttcttgctagtgatggagtttttgagtttctttctagtcaaactgttgtcgacatgattgctaaatacaaggatcctcgtgatgcgtgcgctgcaattgttgctgaatcctatcgcctctggctacagtatgaaactcgtacagatgacattacaataatagttgttcatattaacgggttaactgatatggaatgtactcaaactgtaatgaaagtatctttgcaaccttcccaacaagtcgtagaattggtaggctcagaatcaccatcgacaataagtttgaatcccaagaaccagcgttccaggcaagatctatcacgtgctcggctgagagcacttgaaagttccctggaaaatggtcgactatgggtccctccatccccatcgcatcggaagacatgggaagagcaagcacatattgagcgaatactacacgaccatttcctcttcaggaagctcactgactcacagtgccatgttttacttgattgcatgcaaagagttgaggtgaaagctggggatatagtggtgcagcagggcggtgaaggcgagtgcttctatgtagttgggagtggtgagtttgaagtgctagccattcaggaagaagatggaaaggaagttacaaaggttctacatcggtatactgctgacaaactatcttcttttggggagctagcactaatgtataataaaccacttcaagcttcagtccgtgctgtgactactggaactttatgggctctaaagcgagaggattttcggggaattctgatgtcagagttttcaaatataccatcattaaagttgctccgatcagtggagctgtttacgagattgacaatgcttcaactaagtcaacttgctgattctcttgttgaagtaacttttggggatggtcaaatgatagtagacaagaatgatgatgcatcttccttgtatattattcaaagaggtcgtgtgaaacttaaattggctgcagatcaggtaaattcagatgcctgggatcttcttagttctcaaacagaggtggcccaatcaagtcgagaagatggtaattacgtgtttgagatagatgaagggggacactttggagagtgggctctctttggggagacaattgcttttactgctatgtcagttggtgatgtgacttgttctactattgcaaaggagaagtttgactcaattattgggcccttgccaaaagtttcccagtctgattccaagctcaaagattccttggttcctaaagggcatggtgcagatgatagttccttcaggaaggcgcagctatctgatttggaatggaaaatgtgcatatatgccgctgattgcagtgagattggtcttgtccaactaagaggttctgacaagatcaaaagcttaaagaggttttacatcaagagagtaaaagaccttcataaggaaaaacacgtatttgatgagaaggatctcatgaaatctttgagccaatcaacttgtgtgccagaagttctatgtacttgcgctgatcaatcctacctaggaatactgctgaattgttgcctttgttgctcactggcttcaatacttcatgcaccactaaatgagtcgtctgcacgattctatgtagcctctgtcgtcgtagcgctagaaaatctccatcagaggtccattctttacagaggtgtttctgcagacattcttatggtcgaccgatcagggcatcttcaactagttgacttcaggtttgcaaagaagttgcaaggtgaaaggacttacacaatatgtgggattgccgactctctagctccagagatagttcttggtaggggccatggattttctgctgactggtgggcgctgggagtgttgatttatttcatgctgcaatcagacatgccatttggctcttggagggagagtgaactggaaccttttgcaaagattgccaagggtcaccttgtcatgccatcaacattcagcatcgaagttgttgaccttattacaaagctactcgaggtaaacgaaaatgcgcgccttggggccaagggagcggaatctgtgaaaagacacccctggtttgatggcattgactggaaacaaatagcagatggtacttatacagtaccccaagaaatcaccgatcgtgtcgacagctatgtagaaactcttacagaggacttgacagcatccccttccatgccaagtgaagaaacagctgatcaggctgctccagaatggatccaggattggtgatctcagttgttgcatgaacaaaaagatgtttgggaaaacttgtttagcatttcaaatgaaaaaaaaaacgggtacatacatgattacagcatgtgaatttttgtcgaaatggtggattatacgtagcaacaattctgtatagaggaatcatcagctcaacctgcaaccatctgatggatatgctagcaaaaatgtgaaaaatggtgttgcagtagttcaagcaggagccagaactggtctgcagggagaactaatgattcctgtggtacatatgtatagacccttctttcatttgtaaatttatttgtattattcatctgtaggtgaaaattataactgcctacctatgtaattttgtataacattttgat

SEQ ID NO: 18295 - DNA, 2158 bp, Oryza sativa
  ref <308>: DATABASE ACCESSION NUMBER: AK068698
  ref <309>: DATABASE ENTRY DATE: 2001-12-06
gtaagccatcagttcttgagcccaagctgctagatctccttttcccctgtattcctacactgtccgcatgttctgcttgcaatgcgaggaggcttgggatgaccgcacagcggctgcgaaggagccacttcccgagcagtcgtgccatgatcgataagagtgatcgatggatgcgagcatatggtgtccattgtgcagtcgtgcaggtatttacccttccttctcttcgatttggttttccctactcatatatctgtctgttaatcttcaaacttttctgacgcaattttggaatagaaaattttaccgcttatctaagcccattttctggatgaacctttctagaataaattttcttgaattgatttgactaacctgataattcattctaatttgaccaaagactgcaccacggctgtgccgcgggaggtacacaactgaatttattttttggtaccgaccattttctgataggcaacatttgaagttgcagtatctgcattattaaagcgatcaactatgtttcagaactcattatctaaaagctatctttcagaactgttattaggacttcttggaccttactggactgtaaggtgctttggattaatcgccacttcatttagtggatcatttcatccctgatttttggacactactgaactgctatcttgctaagtgctttggaattatgctggtcatttcattcaatctcatgaataaatggctgcattgagtactaggttgtgctttaaaacccacctcgcaaggtgctagcctggttgagcagctttgagagttagacactggttgtggcgtgctaagttctgcataagggaaattttgcaactctgtttgtgcagagaacaggagatattggattttgggttgacgaattcacttcgttgtccaagcaacactatttgatctcttcaggttttctgtcctcaatcattctaccatttattccttgctattttgtttggttatctagctagcaattaaaatttgtgcccttctataattttgtcaaatgatggaaactcctattctaattttctagcactgttggatctgggtttggcaaagttccattttccactgtttgttggtgattactccaatactatctaatcatgttcttatttagtgaaaaaatgatgctgccatcacaccacctgcaaactaaatcagggtagcgattcagtctatataaatataggtgtatgtttcccagattcaaatctttgtgacctagataatggtgaagtatgcttatccaattgaatcaacctaaaatgagattatgttttatgtgtgatggttgaaagaaacttactcctttctccatctaacttattgatatgaagtgcaatcctaacaaacacgtctacagtaacctagcagaaattatatgtgattttcatatgaactattctagcaagaaggagagcatgtagttggttgatatgaagtaatgctttagtgttgtgcgttgacaagtgaggttaatcaatctttggaaatgtgagaattgccagttagctttaagctttctttgaattccttgacaaattcatgtttttaaatatagtgcgggtatcgctacatagttgccaacacaataacaaatcaactgacataagaatttggtgcacgaattagattatctcatccttttattttgtttattgtcaggctttccctataaattaattgacaggaggaagaaatcacaggtggtttaccaatttcaatgacattttatagttcattaaagaattgaacttctatatggtagccgggcaaatggcagggatgtttctttctctacacctgtatcttggctgatcatttagtttactaggatcatttagtttctttctgtatatatatgctgttaagtgctctatgaagcataataagttctcatggcttctggatttacacttagctgattttatctcgcagaattcaacaatttttttttatcgtcgcatagatgtaagatttcaggttctgtgatggtcacaaacttcagaattcaagttgtattagcctatgttggaacgaagaccttcagaagaactatatgtaatataaacggtgtaaatgatgtaaatgttgtgacacttagtctttccaactatattctttc

SEQ ID NO: 18296 - DNA, 3376 bp, Oryza sativa
  ref <308>: DATABASE ACCESSION NUMBER: AK068699
  ref <309>: DATABASE ENTRY DATE: 2001-12-06
gggagtagacgaggactgcgcagtggaggaggcagaggcagaggcgagagagatggagatggaggcggaagaagagacattgtaggcggcgagagagagagagagagagagagagagacggactagactaggcgcgattgccttgttgttgggtcgtcaagcccgatgaccatcgcaggaggaggagaggggatccctctcgatcgccgccgcctccattctctttatatccgccgcgctccccgctgcctccacctctctcctcctccgccgcccctccccgccccgtttatagatgaatgctaatggaggttgccaatgccatggatgccatcaccaaggagaccgtcgacctggagcacatccctgtggaggaggtgttggatcacctaaaatgcacgcgcgagggtctcacctccgaggttgcccagcagaggatccactccttcggctacaacaagctcgaggagaagcaggaaagcaaactgctcaagttcctcggctttatgtggaacccgctttcctgggtcatggaggcggcagccatcatggctatcgccctcgcacacggaggaagagatgccaggggaaagagaatgcgcatagactaccacgacttcgttggaattgtactgctactctttatcaactctaccattagcttcatggaggaaaataacgctggcaatgctgccgctgcactgatggctcgcctggcaccaaaagctaaggttttacgtgatggaacctgggatgaattagatgcatccttgttggttccgggcgatataatcagcgtaaaactcggggacatcattcctgcagatgcacgccttctcgagggagatccgctcaagattgatcagtctgcacttacgggtgaatcgctacctgtaactaagcatcctggagatggaatttactctggttcaacctgtaagcaaggtgaaatagaagcagttgttattgccactggaattcatactttctttggaaaagcagcccatctcgttgaatcaactactcacgttggtcactttcaaaaggttctgacttcgattgggaacttctgtatttgttcaattgctgctggaatggttattgagttacttgtaatgtacgctgttcatgaaaggaaataccgccagattgttgataatcttcttgtgcttcttattggtgggattccaatcgccatgcctacagttctttctgttactatggccattggatcacacaaactggcacagcagggtgctattaccaagagaatgacagcaatagaggaaatggctggaatggatgtcctttgtagtgacaagactggaacattgacactcaacaaactgagtgttgacaaaaatttaattgaggtttttgaaaaaggcattgagaaggacgatgttgtattgatggctgcaagggcttcaagattggaaaatcaagatgctattgattttgctattgtttccatgttaccagatccaaaagaggcgcgagctggcattcaagaagttcatttccttccatttaacccaacagataaaaggacagctctcacatacttagatgctgagggtaaaatgcacagggttagcaaaggtgctcctgaacagatcttgaacttggcatcaaataaatgtgagattgaaagaaaggtccatcatgtaattggaaattttgctgagagagggcttcggtcgctcgctgttgcctatcaggaagtacctgaagggacaaaggaaagtccaggtggaccttggcaattcgttggtcttctcccactctttgatcctcctcgtcatgatagtgctgaaaccatacgcagagctcttgaccttggagttagtgtaaaaatgatcacaggtgatcagttggctattggtaaggagacaggccggaggttaggaatgggcacaaacatgtacccttcttcatctttgctgggtgacagaaaagatggtgatatcgctgtcctaccagtggacgagctgattgagcaagcagacggatttgctggagtattcccagagcacaaatatgaaattgtgcagaggctgcaagctagaaagcacatatgtgggatgactggagatggagttaatgatgcacctgcactgaagaaagcagacattgggattgctgtggctgatgcaacggatgctgctagaagtgcctctgacatagttctgacggaacctggattgagtgtcattatcagtgctgtgttgaccagccgggcaattttccaaagaatgaaaaattatacgatatacgctgtatctataactgtacgtattgtgcttggttttttgctcttggcatgcttttggaaatttgattttcctccatttttggttcttgtgatagctattcttaatgatggaaccataatgactatatccaaagataaggttaaaccatctccctatccagacagttggaagctaacagagatatttgcaactggagtgattattggggcttatctggctgtaaccactgtgttgttcttttgggcagcctacaagacacagttttttgtgcacattttcaatgtagacactctgaacataaacaaggttgacaccacagacaatgaattggtggcaaggaacacagagaaattggcttctgcagtttaccttcaagtgagcaccattagtcaggctttgatatttgttacacgttccagaggttggtccttcttagagagacctggcctcctgcttatggctgcatttgtcatagctcagctgattgccactgtgttagctgccattgccacctgggaggttgctagcatcagaggtatcggttggcgctgggcaggggctatttgggtgtacaacattgttgtctaccttttgctagacccaatgaaattcgccgtgcgatatggccttagtgggaaagcctggaaccttgtcattgataacaaggtagcttttacaaaccggaaagatttcggaagggaagctcgcgtggttgcttgggcacacgagcagcgcacactacacgggctgcagtctgctgcaagccgggagaaagctgcatcaacggagctcaaccaaatggctgaagaggccagacggcgtgctgagattacaaggttgagggaattgcacactctgaaaggaaaggtggaatctgtggctaaactgaaaggaatcgacttggaggatgtcaacaatcaacactacactgtttaacctacaacacgacaatgcattatgcattatgccatctctgaacatcgatctgactccctagacagtagtattgtttagtattttcctttcccatcccatttggtttattgcatgtggatcgaacatttactctcctcgtaataaagttggatttattgtacccc

SEQ ID NO: 18297 - DNA, 2840 bp, Oryza sativa
  ref <308>: DATABASE ACCESSION NUMBER: AK068700
  ref <309>: DATABASE ENTRY DATE: 2001-12-06
gggatgcaaatctccattcccatcgtattcctctccttccagctcgagactagggctcgcaggtggcttattccccctaatttgctcgggaccagaccacacctccccaaggtgagaaccaaatctctgattccaatcttgttacgttcttggttgttctttgccttgcgatttgggagcggcagcagcagtaaggcgctcgtcaagatctcttcttttcaattgttggggtcgcgctagttcgtcgaaatttatcctttccgattgctggattgcgtcatttcgttaatatttctccttcccaatacctatcttgtgctatttggaaacgagagcactaatctacttcttcgatctaatatgtttgtacaggcccttgtatataaacgaacaaactttactcatatattcagtccattaattttaggtcctaatagttgttttttaacttatgcgaaaattgcaatgtgctgaacagtgcaggtgatatctctttcttaacgaaaaatagagtcagcatgtaattatctatatggtacttaagatcctaaaaattaagcaagggctaggttgattgcttgctgtttgaaaattgttccagttagcattttgctccattctttgttattagtcagactctcaactgctgtcatgttatttactcaggaattagatttttacttcagatatcatattatgcaaattgtattctatttctcatcgtgcttttatctctgtgcctttttcttttcttttcctttcccttccatttcacggaatatattggcatcatcagcttgttgattattcttcgcattgcatcatctttgcttcccctcttttgcatgctcttgctgtccatgctgattggggattgtatcttgagaacctccccgtgtaatcctttgtaaccataccactgtttcctcatttgttccatatacattttctttctatccagttggatacccatggctgcatcctgtttgacattattgcataacaagtactcttgtttatttggttgtttttcttcctatccttgtatcatcactttgctctcccaatattgttggctcctttgctctttccaaagttgccttggaactttgagcttttcaagatgccaaggaggacagataatgctgcttctgccaattcagttgaaccagaaaaatcagaagaatgtttggagtttgatgatgatgaggaggaggaggtagaagaggaggaaattgaatatgaagaaattgaggaggagatagaagaggaggaggtagaggaggatgaagatgtcgtggaggaagttgaggaggtagatgaggaggaagatgaggaggaagaagaggaatctgatgaaactgaaggtgtaagtaaaactaaaggtgttcaccagaaggatgttactgaaaagggaaagcatgctgagcttcttgctcttcctccccatggttctgaagtatatgttggaggcatctccagtgatgtatcttctgaagatctgaagagactatgtgaaccagttggagaagttgtggaagtgagaatgatgagaggaaaggacgatagcaggggatatgcttttgttaattttagaacaaaaggtttggcattaaaggctgtcaaagaattgaacaatgcaaaactgaagggaaagcggataagggtttcttcctcgcaggctaagaacaagctttttattggaaatgtaccccatagttggacagatgatgatttcagaaaggttgtggaggaagttggtccaggagtattaaaagctgatctcatgaaggtctcaagtgcaaatcgcaatcggggttatggttttgttgaatactacaaccatgcatgtgcagagtatgcaaggcaggagatgtcttccccaacattcaaactagattcaaatgctcctacagtcagctgggcagatcctaagaataacgactcggcctctacttctcaggttaaatctgtatatgtgaaaaatctgcccaagaatgttactcaagcacagctgaaaaggctgtttgagcaccatggtgaaattgaaaaggttgttcttcctccttcaagaggaggtcatgataataggtatggttttgttcactttaaggacagatccatggccatgagggctctgcagaacacagagagatatgagcttgatggtcaggtcctggattgctcacttgcgaaacctcctgctgctgataagaaggatgatagagtaccactacctagttcaaatggagctccattgctcccgagttatcctccacttggatatggtatcatgtcagtaccaggtgcctatggtgcttctcctgctagtactgcacagcctatgctgtatgctccaagagctcctccaggtgcagcaatggttccaatgatgttaccggatggtcgtctcgtatatgttgtacaacagcctggtggacagttgccgctggcttcgccgccgccgcagcaagctggacatcgtagcggcagtggaggacgtcatggcggcagtggcggccgctatggcggtggtggtggcagctccggcagtagcaggccaggtgcaaagcggcagagaggagacgacaacagcagtagccgccacaaaggccggcgccgcccgtactgatctgatcagcatagctgtagctaccacttagaagatgtagtgtcgttgcagaaaattaccagaaaatctggtagaaataatttatactgtttgtactcgtcgatttattagaggaatgcgtttctgaaacaagactgtacatgcgtattttacctgtatcgcagagtgctgaatctgatggtgcactggtacagtataagccagttcc

SEQ ID NO: 18298 - DNA, 1342 bp, Oryza sativa
  ref <308>: DATABASE ACCESSION NUMBER: AK068701
  ref <309>: DATABASE ENTRY DATE: 2001-12-06
gatccatcctcaacctcccaagttcggcgcccaatcccggcgatggagatcgccgacctccccatcgccacctcccaccgcgccaacctcctcgccgccggctactcctccctcgccgcgctctccgccgcctcccctccccgcctcgcccgagatttgagcattgaggtacatgaggctgaagaaatcctcaaggttgccgtgggcgccaacaagtccaagggagcagatgggcctagcaccagcagtgttctcaaaggtgtgcaaaatgcatgggatatgctatctgatgagcaatcacggaggcacatcaatactggatctgctgacctcaacaacatccttggtggagggattcactgtaaagaggttactgagattgtttgattcaggtggtgtcccaggagtcggtaaaactcaactggggattcaactagcaatcaatgttcaaattccagtggagtatggtggacttggtgggaaagctgtttatatagatacagagggaagtttcatggttgaacgtgtctaccaaattgctgaagggtgcatcagtgatatactggagtactttccacactgccatgacaaggctccagccggacaagaaaaactgaagcctgagagtttcctggctgacatctactactttcgaatatgcagctatactgaacaaattgcagtcataaactatctggaaaagtttcttggggagcataaagatgtaagaatagttattattgacagcgttactttccactttcggcaagattttgatgatatggcactaaggactagagtgcttagtggattatcattgaagttgatgaaactttcaaaggcatataacttggcggttgtcttgttgaaccaagttactactaaattcacagaaggatcatttcagttaactcttgctctaggtgacagttggtcccactcatgcaccaatcgactaattctgtattggaacggcaatgagcggtatggattcctggacaagtccccttcactaccagtagcatcagcaccatatgcagtgacagttaaaggggtgagagatgctgtgaattcaaacagcaagcgagtccgggtaatgtagcaatcttggtgttgaacccttttaccattagtagccatcgaccgtcatgtctaaactgtgcagcattctctgatctttctaactaagctgattgaaatttggatcatgtgtaacgctgtcttatttgcttctgccggtagctaattgtacaaaggtaactgaagcaaaagagggtgcttcattttggttgatccaaacatgtaacagctaacaagtactctacaggcctgttacaaactc

SEQ ID NO: 18299 - DNA, 2903 bp, Oryza sativa
  ref <308>: DATABASE ACCESSION NUMBER: AK068702
  ref <309>: DATABASE ENTRY DATE: 2001-12-06
gattccccaatgacttcttcttcctcctcctctccacagtccacactgttcatctcctcctcccctccctcccaattcgattcccaaatcccaaaattgaccacccaaatccgcgccaatccatggattggatgcctcctccgaagcccacctcgccgcgctcccctcccctcctctgggactgggccgacgccgccgtgccgggctcctcctccggcgaggtatccgccgccgccgccgccgccgcggctcatccgggaaggcggcggaaggagaagcgaggcagggcggaggaaggaggaggtggtggtggggaggtgaggtgccaggtggaagggtgcggggtggagctcgtcggcgtcaaggactaccaccggaagcaccgcgtgtgcgaggcccactccaagttcccccgcgtcgtcgtcgccggccaggagcgccgcttctgccagcagtgcagccggttccatgcgctctcggagtttgatcagaagaagaggagctgcaggagacgcctgtatgaccacaacgctcgtcggcggaagccccagaccgacgtgttctcctatgcatcggcaaggccgccgtcgtcattattatttgatgataaccgacaaataagttttgtctggaacaaagctccactcagccatgtaaggcctttcgcaatttctccatgggaaagctcatctgaagttgggacaactgatggacatatttatttggataaatctcacatatccaaatctctcccagcatttaacaccgacatagatgagctcttaccaatgaaaggtatgattttccaaagatgtaagttttcgtgaaaaatgtcatcaattaagactactttcatggttcagcacattgcatagatctttgaaaaaattcaacctatacactgtaccaaatgccaaattcagatgctgttttgtcattgttgttgtttgttaaaaaaagtatcctggagttgtgcacacccatgaaaaaaaattagacccttgagcacatttgggtttagaaaataagatggtgtgcagtgtgctgctaagcttatgtcactatagttgacgaagtgtttcaaacataaaagacaacagagtttttagtaagattctaattggaaaagaaaaaaaataccgtgttttgtgtgatagtaaacatcctacagtttcaactatataagtagttctcttgtggtcattgggcagagaattacttctccagttagcaatacaagttgttttgatttaacttgcaggtatacaacaaagaatgatgttgggcattcttttggtcctttgctctcttttgcccaaattagttatgttagatgcttttaactacagttaatatgtgcttggaagtggagcatgcaccaaaaaatggatagcaaatgccacaagtttccatatgaggctttggcgctaatatcgcatcaatgatgtgttagtttttgtgtttggtacaagtatctgtacaaggttttggtgccaacattgcatcattaatgcgcagctagttgtttcatttggtgtgagattgtatataacggcagcaattattttcatgtaatagtattccaacagggatttaacaggggcagtattgtaccaaaaaccataacttaatgctatgtgcttattagtctacaacgacttcgaagtgctgactagagggggtaattatatttatgctatgttttgttagataatggaatgctatggattttgataacaagaaaaaaaaatgcaaagtgattccagatagctgtgattcttatctctgacaaaacgagggaattccaatacttagcacaatatgcgaaagtcagctcaggaatgccctaaatttaccttattatgcctgttccctaaactctccgcatgcgggagaactagttaccatgctaaaattctacatactaccaagcatactgcaatttcttggataaccttgctaattttatgctaaattctcaaaatatatttcaaatgaatatgagccattcaatccatttccattgcagacttctctgcagccactatttggatgttcttcggtgtcctttttatccgaactgcgcaggagagctgcatgtcatttcattaaggagaaaacaatgtacatattttgatggaagaatgaccattattccattttgcaggtccggacgcatctttaactgcttcaaaatttgatggagcaccggatcttcagcgtgctctctctcttctgtcatctagttcttgtggattacctgatcctgtacagcaagcatctcgcgtcatccaattcacaggcgccagccaaaacaaccgggaacttcctccacttaatggagggaattctgcttcagcatcatgtgccaatgtacaaactatagcacaaccggctcagctggttcgttttaccatgaatgctagcagcaatgcttgtcagtccaatttcttcggtttaaaccagataaactaaaggcctggactgaaagcccgtcgtcgatttcgaccaatatccaccaaggtggccttgagaagatacaagaattgcttctatcaactatcagagtgcaaacaatgtcacagttaatgttgtcatcataaatatcggtattggtctcccctgaactaaaatcgaacggagtgatggcttgcttgtgttttcgataatcgttatgcagttctaattttttttctattgttttctgccaatgtaccgattttcaaactgtgggtcttgtcatttatacttgtacaacctaatgtcaaaatgtcatgtatctttgaaactgtttttgatggatttgggacatggtttcgcttgtatgattgttgttttggcagcggcatgtggtttcagtggtggtggtatgctttggcgccataacgtgctgttttttcccc

SEQ ID NO: 18300 - DNA, 3033 bp, Oryza sativa
  ref <308>: DATABASE ACCESSION NUMBER: AK068703
  ref <309>: DATABASE ENTRY DATE: 2001-12-06
gatcccgctcacgagttcctcacttcctcctccgcccgcgtcgcccctcctctcctctccctcccggctcccggctaccgccgcagccgccccgaggaaatggctgccctgcaaccctcattctcttcagcaatggctatgaaaagtctgaagttacccaaaactgcagttttacctggatttggtggtattgcacgtcctcaagatgtgcaggacaggagcgctaacttcacttgttcaaggcctagagcagcttcagtgactgaccagtcaacagcagagccagcaaaacccaggcaaaacaagcacactgttgatccttctgctccagaatttctgccactcccatcatttgaagaatgctttccaaggagcacaaaagaatcaagagaaattgtgcacgaggaatctggccatgtcctcaagatcccatttaggagaatccatttgaccggagatgagaagcattttgacacatacgacaccagtggtccacaaaacattagtccaaggattggacttccaaagataaggaaggagtggattgacaggagggagaagttaggtggtcctcgatacacacaaatgtattacgctaagcagggaatcataacagaggagatgttgtactgtgccacacgtgagaaccttagtcctgaatttgtccggtcagaggttgcccgtggacgagctataattccttccaacaagaggcacctggaattggaacccatgattgttggacgaaacttccttgtaaaagtgaatgcaaacattgggaattctgctgttgtgagctccatcgaggaggaagtacacaagctccagtgggctacaatgtggggagctgatactgtcatggacctttcaacagggcgtcatatccatgagacccgggaatggatccttcgtaattcttcagtccctattgggacggtgcctatttaccaagcacttgagaaagttaatggtattgctgaaaatctaagctgggaagtctttagagatactttaatcgaacaagctgagcagggtgttgattacttcacaatccatgctggcgtgcttcttcgttacattcctcttacggcaaagagaatgaccggcatagtttcacgtggtggctctatccatgcaaaatggtgcctaacatatcataaggagaactttgcctatgagcactgggatgaaattcttgatatttgcaatcagtatgatgtggcattatccattggcgatggtttgagaccaggttctatttatgatgcaaatgatagtgctcagtttgcagaattgctgactcaaggggaactcacacgccgagcttgggcaaaagatgtgcaggtaatgaatgaaggcccagggcacattccgatgcataaaattcctgaaaacatggagaagcaactggagtggtgcaatgaagcacctttctacacactggggccactgacaactgatattgcacctggttatgatcacatcacctccgccattggtgctgccaacattggggctcttggcactgcacttctctgttatgtaacaccaaaggagcaccttggattgcctaaccgtgatgatgttaagacaggcgtgatatcctacaaaatttctgctcatgctgctgatttggcaaagggccatccctatgcacaagcatgggacgatacactaagcaaggcaagatttgagtttagatggttggatcaatttgctctatctctggatcctgtgaccgctatgtctttccatgatgaaacattaccatcggagggtgccaaagtggcacatttctgctcaatgtgtggcccaaagttttgttcgatgaaaatcacagaggatattagaaaatatgctgatgaacatggttacgggacagtggaggaagcggtgatacaaggaatgaatgctatgagtgctgagttttcagctgcaaggaaaacaatcagtggggagcaacatggtgaagctggaggggagatatatgttccagaaagctatacagctcgcaaataagatcgtcttggtgtccatctactccgggtggagcgtttatcagcagcactcctcaccatcctatgttaggaggtggggtgcctgtattctcaacgatctgaaggcctcttggcctggattgttgtgaattgggctgagaaagtccctttgaacctgaacaggataatgcctgcgaagggagtgtgcatttctacttttatgtttccagggaactctcaacacaacccctttttggtgggagatcgagctatccaatgttcctgaacgtgtgagctcagcagctggatatacctgtttcttacaactgaggtaacatggtaataatacttcatttgataagtggcatgctgacatttctccaacaggagaggatttctgcagataccacttcgtaatgtcccagaactgatttagtcatacatttattatccgtgtaaatttgcaaagcgttggccatgtcctatgcaattgattttaaaccatctatctgcacatatctaattaaagtataaaacaatttataaactctacataatggacattttagctgcatgccacttgtcaattgagcacacaatatactgactaaattcaatttaacttgatcatgattcatgtggaaggtgtttattaggaattaatttattgatatggccagagacttgtttatttttagctatttatttgtctttcccatagaaatgatcaaattttgtacttgcaccttgtgtaagtataatagaattatttagtctgttttggagcattcattaatacaatgatgctcagccgctcagatctttgcgtagcattatccaagaaaacaagtctttttgtatcccctagataatttgaaaacacccatacatgcacaatagcatgtgaaaaagaactttagctaggttctgttgaccgattatgttgtaggataggaatcatctgcctgtagaacataatttgggcattatcttctgatgttataatcatgtttttctcagcaaactattactccgc

SEQ ID NO: 18301 - DNA, 1135 bp, Oryza sativa
  ref <308>: DATABASE ACCESSION NUMBER: AK068704
  ref <309>: DATABASE ENTRY DATE: 2001-12-06
gaatcttcgccctcctcctcctcctcgtacgcgcccacgcggttctctttctgccccctcgatcgatttgagcagggaacggaagggggaggtttttggaggaggccatggtgccgtcggagaggggggacgtcgccaccgccatcagacccgccgctgccgacaagctcgtccatgggcctatctctgacaagaagtgccggaagaaggtcccgaggaaggttcacaaatctgagagggagaagcttaaacgcgggcatctcaatgatctgttcggcgagctgggtaatatgctagaagcggataggcagagtaatgggaaggcatgcatactaactgacaccacccggatcttaagagatctgctttctcaagtaaaatctctccggcaagaaaacagcaccctccagaatgaatctaattatgttacgatggaaaggaatgagttgcaggatgaaaatggtgcgctacgcagcgaaatctctgacctccaaaacgagctgaggatgcgtgcgacagggagtccaggttggggccatggcgcgactggatcacctctccccgttcctccctctccaggcacggttttcccatcgcagcagccaatgcagccatctcccatgacaacaagcacagtgttccccttgcagcagccactgccacaaccaacagtcattgagccctctgcaagacagccactggaactgaagctcttcctagaagcaccccccgccgaagaccctgaaccatcagaagaccaggaggctccgaacaatgtggcacgaccgcagccgaggtacccaacagaggcatcttcttggcctattagcctgggacttccaagaatggaagatgagcaaatgtagtggtagcacgatagatgatagcacaggtagagattgagagggtctgtttttaatgcatgcaggaattccacacgaaaacacttctgtccttgcatgaaaactggaaaatttcctgcattccaagtaagacctgagtagatcagctccaaccaatcagaaactcactttgagcctagaggatatactactgaatgatgtgcatgtaaatatttcaatctcccttttgtttctgtaaactctagtgagaatagaacccgttttatcccctt

SEQ ID NO: 18302 - DNA, 1360 bp, Oryza sativa
  ref <308>: DATABASE ACCESSION NUMBER: AK068705
  ref <309>: DATABASE ENTRY DATE: 2001-12-06
gcctttctcttagtatttttttttctctcggagaggagaagagagagacccatttcctcctcgcgtagtcgcgtgcaggggagaagaagggtttcggcggagggaggaggagccatggcggcggaggccggcagcgcggccgccggcgccgcctacgaggaggagcgccggaagcgggtcctcgagaacctcaagcacctcgaggatctgggcataaagaagatgtccaagagcttgctggaggcggcgagattgcagaagagcactcgtgccagccccaagccgcggaagaagtttgaggttggggccactgaagtgaggcgttcatcgagggcgcgcaactcggtttcgtacaaagagaattttgatgaactcaacagttttctatgccgtagaaggggcagtaggattaggagcacagagcaggggagggattacaccggaagagttgcctcttatgaacagcaacaacgtgctttcaaaaaagctgagagacttcaaaatagtctagaccctgagaacccgtcgtttgttaagaccatggttcgatcacatgtgtccagctgcttttggcttggtcttcgaactagattctgcaaattgcatctgcctcccaaagagtataagatggtcttggaggatgaagagggtggtgaatttgattctgtctacattgggaaccgtacaggcctaagtggtggatggagaggttttgcgatgcaccacaacttggaagatggtgattcattggtctttgaattggctgaaccagacagatttaagatctacatcataaaagctgttgatgaggatgcaaatgagtctgagcctgctgatgaggaagctattggggacaaggacaccagtacagaggatgcagctgagcaggatgactcacctaatgctgaacctttaaaaggaactaagaggagaaaactccgtggacgccggtagtaattagttctatcagactttaaatattggtactctgtacaagtatgctgcgtattatcaatttgctctcctgtcaggtcatccttattgatcttttttgttggcctttccatttggtagattatgggtgttccacaagaccataaccaccctttttgttgcagctacggacagagtgttcaccatcataggtaggtttagataacttgtaaagaaatgttgacaattgaacacttgtgtcctggagtccatctgtattgtgctgattcactgtgttcagcttacatgatggatgagaacagcattggcttatgtggcaatgctttttacctgtgtccatggcttcttaaaactgatctacagaccagaaagggaagacatcgacgaacatttacatttttcttgc

SEQ ID NO: 18303 - DNA, 3322 bp, Oryza sativa
  ref <308>: DATABASE ACCESSION NUMBER: AK068706
  ref <309>: DATABASE ENTRY DATE: 2001-12-06
gaccagaaaatgtgctgaaaatgagcttcgcgaaagctcacgcggtcttcttcagagagaggggtccctactccgtgtcgagctgagcagcagcagcagcagcagcccgcgagcccaaagatttcctctttcgtgggggagacacgccaaatccaatccgagttctccaactcatcaataatctgcaagatgtgaataagtctcaagtagactttgcaccatttgagacacaatgaagataggtctgctcatgttgcttgttctcttcctggtcatgtcccctgatgggatccgcaggagcttagccgcgaggccttctattgtgaatattggggccattcttcgatttaactccaccattggaggtgtttcgatgattgctatccaggcagccttggaggatattaattctgattcaacaattctaaatggaacaactttaaaagttgacatgagggatacaaattgtgatgatggtttccttgggatggttgaagctttgcagttcatggagactgatgtgattgcaattattggcccacagtgctcaacaattgcacatatcgtttcatatgtagcaaatgagctccgagtccctcttatgtcctttgcatctgatgcaactttgtcatcaattcagttcccattctttgttcgaactgctcccagtgatctctatcaaatggatgctgtacctgcaatagttgactactaccgttggaagatagtgactgctatatatattgatgatgattatggccgaaatggaatagccacattggatgatgcacttactcaaaggcgctgcaaaatctcctacaagattgcatttcctgcaaatgctagaaagagcgacctcataaatttattggtcagcgttagttatatggagtctcgtgttatcatcctccatactggtgctggacctggactcaagattttctctctggcgaaccaactaagcatgatgggcaatggctatgtatggattgcaactgattggctttctgcttatctcgatgctaattcatcggttcctgatgagactatgtatggcatgcaaggagttctcactttacgcccacacattcctgaatcaaagatgaagagtaatttgatctccaagtggagcaggttaagcaagaagtacagttatagttatctccgcacaagttcatatgctttttatgtttatgatagtgtatgggcagtagctcgggctttggatgctttctttgatgatggtgggaagatttccttttcaaatgattcaaggctgcgtgatgaaactggaggtactcttcaccttgaagcaatgagtatttttgatatgggaaataacttgttggagaagattagaaaggcaaacttcactggggtgtctgggcaagtgcaatttgatgctactggtgacctcattcatcctgcttatgatgtcataaatataattggaaatggcatgcggacagttggctattggtcaaattattctagcttgctgtcgactgtccttccggaggttctctattcagagcctcctaacaattctctagctaatcaacatctatatgatgttatttggcctgggcagactgcacaaacgcctcgaggctgggtttttccttctaatgctaaggagttgaaaattggtgtccccaacagatttagcttcagagaatttgtcacaaaagataatgttactggatcaatgaagggctattgcattgatgtctttactcaggcattggctttgcttccttatcctgttacatacaagtttataccatttgggggtggtaatgaaaatccacattatgacaaactcgtacaaatggttgaggataacgagtttgacgcagcaataggggatattgcaattacaatgagcaggactgtaactactgatttcacccagcccttcattgaatctggcttggttatcttggctccagttaaaaaacatattgttaattcctgggcattcttgcagccattcactcttcagatgtggtgtgttactggattattctttcttgttgtgggtgcagttgtttgggttcttggacatcgaataaatgacgaattccgtggctcaccgcgagaacaaataattactattttctggttcagcttttcaaccttgttttttgcacacagagaaaataccatgagtaccttaggacgtggtgtcttgatcatatggctatttgttgttttaatcattcaatccagctatactgcaagtcttacttccatcctgactgttcaacaactcgatacttctataagaggaattgatgacctgaaaaatagtgatggtcctattggtttccaagttggttcttttgcagaagaatacatggtcagggagctgaacatctcacggtcgaggctgagagctcttggttctccagaagaatacgctgaagcgcttaagcatggccctaagagaggaggtgtcatggccattgtagatgagcgcccctacgttgaactgtttttgtcaacttattgcaagattgcagttgctggttcggatttcaccagcagaggatggggctttgcatttccaagagactcccctttgcaaattgacctatcgactgcgatcctgtcactgtcggagaacggggaactgcagaggatccatgacaaatggctcaagactagcgagtgctcagccgacaacaccgagtttgtcgactcggatcagctccgccttgagagcttctggggcctgttcctcatttgtggtatcgcatgtgtcatcgcgctgctcatctactttttcaccaccgtacgcaaattcctcaggcatgaacctccagaagatccaacacctcgtccaggcggatcaacaactcttccagacgaacgaacacccccaaagaacggacaagagaaatgcaactgcagaaatttcatctcatttcttgatcacaaggagccaccaaagaagaagcggtccttgagtttgacgccgacaacgccattgagcaactttactgcccttgaaatagaaggacctgtgaggacagtcaggaatggtagtgtcgttgacatatagaactagtgtgtgtaaaaagctgagatgttatatattttggatctgagatatgccatctttcggtcaatctcctcaattttagttgagagaaaatataatcagaggctgcataagatgctatctgtagatttcaagcaaatccggtgatgggaaaaattcatttgaggccagtttggcaactgaaaaactgtatagaaagttattcttgtccttgatggtattttgaatggaggaaatatatacgtctgtttgatt

SEQ ID NO: 18304 - DNA, 2171 bp, Oryza sativa
  ref <308>: DATABASE ACCESSION NUMBER: AK068707
  ref <309>: DATABASE ENTRY DATE: 2001-12-06
ggtcttctctcacctcatcctcaacccaaaccttcgaggaacaagaggccccctggcaaaaccctaggcctcagatttgacccgcaccgatacggacagaggagagagaaatcgaagccgtcttcctccgctccggcatctcgcctcttcccatcgccgccaccgccggcggtcgcagactcgcagctctcgcaaagattgacgggcgaggaagcgaggaggcgtatcttgggtgggtgcggggatggcttccgggcagccgcagttcaggtacacgcagccgccgtcgaaggtgatccacctgaggaacctgccgtgggactgcacggaggaggagctggtcgagctcgggagccccttcggcaaggtcgtcaacacgaaatgcaacgtcggcgccaaccggaaccaggccttcgtcgaattcgctgaccaaaatcaggcaattgctatgatatcatattttgcatcatcagctgagcctgcacaggtaagagggaaaaatgtgtaccttcagtactccaatagacaagagattgtcaacagcaagagttcaggggaagctgcaggcaatgttttgctagtgtcgatggaaggtgttctgccagatgctgtgagcatcgatgttctacacctgcaggccattgtcacggagtttcatggcatcctggcaggctactgcatccggaacacatgtattttctgcttttggctttgttcaaaagattgccacctttgagaaggcatctggttatcaggcattgatacagttctgtgatactgaaactgcatcatctgccaaagctgctctggatggtagatgcattcctagctatttgcttccagaacttgatgtgccttgcactttgagaataaattattcagcacatactgttctaaatgtcaagtttcaaagtcacaggagtagagactacactaatccgtaccttccggttgctccttctgctatagatggatctggaccggatgggaagaagcaggaagcagagagcaacgttctgcttgcatctgttgagaacatgcagtatgttgttacaatagatgtgcttcacgaggtcttttctgcttttggttttgtgcaaaagattgctatctttgagaagaactctggcttccaggcattaatccagtatccagatattcaaaccgcagttgcagcaaaagaagcattagaagggcacagcatctatgaaggtggatattgcaagcttcatctcacattttcgcgccataccgatcttaatgttaaggttaacaatgagcgtggtagagattacactggagggaacactgcaccgaccagcaatcaaccttccattcttggtcctcaaccagtatattccggtgcttacaacaacgctccttcgtcagcgactggtgcagtagtgccaccagggactactctcactccacctggagcaccatctcatccttacacatccagcgagccgcttccgcaaactcctgccgttccctctggtggagctccgctgtacactagccagggaattcttcaaggcccccctggtgttcctcctgcacaatttccaggctatggatctccacagtttcccccaggctcagctcaagctcaaatgcatcaacaacatccagtccagggaagccagcagatgcctggccaaatgaaccatcaaccacctccaggatcgttcatgcagtaccctggcgacggaggccgtccagttcaagacgcacctgggcaacaagcaatgccgttccatggccatggaggagggcagcatctacctccaggctatggaggccagccgcagtttcagcaaggtccaaggccacctatgccgccgcagcagtttccgatgtacggcgaccagcagtttcctcctggtacggggccccagatgatgatgccctttgctgggcagggaggaggccagcagcacccgtttcgcccttataacagccattagctgctctgttgattcagtcttacgttacatgtcatatacgatgcatgtacttttgcctctctgccgccattttgttgtgaggtatggcacagtagttgatgctgtggaatcgtttggtggagagatgtggtagaaactactagtttaacaatccagaatttctctgattaatgatgagttgctgagcactgtcatctttcttcg

SEQ ID NO: 18305 - DNA, 1485 bp, Oryza sativa
  ref <308>: DATABASE ACCESSION NUMBER: AK068708
  ref <309>: DATABASE ENTRY DATE: 2001-12-06
tggcgtcatcgcgctgcccctaatcgcctccctcaatcccgcgccgcatcctcctcccttcctctctctctctcgcctatcgcctcgcctcccccagacgccgccgccaccgtcgcctcccccagacgctgtcgcctcgcctcgcccgccctatcgagcccaccccctcccttcctcactctcgcgcctcgccggggggcgggactggcatcctcaccggcaatggcgatggctactcggccgccttctcctggtgaacagtgggggcccacctcgcgtttaggaagcccgtggtggtgctggtggtggtaccatcggcaggccctggaagcgttgtagaagcggtggtcgcttgccatgcctccggccgagctccacggcggtgcccatcatcccttcaatcgtgcccactctccagcatcaaagctccatcatcgcccccatcctcgccgcgttctccgcatcttttgctagacgcggcatgctctccacgaatccaccaatggcatgccttgcctcactggctcacttctgagtcatcgtcctgactatgccggctttgccctccatcttgttgagattttacagagattgggcacactccaggactgattcacgcacatacggatttatgtggttgtctgtcctcgtaatggtggtggagattttatttccttcaggacatagatgttgcaagctattgcaaaagcttatgcctctaaacaatcatattcttgcagagtgggaatttaatctggggttttaacatattcgatggcgctgaacgtaacatcccaaatcatgaattgctggtggccaggtgaagccacctaatggttctcaaatcttagttgtgatgtggcggtgatgagcaagcttggacaagagcccaaataagatatgacttaaagtggtgcaagttaatcaggacagcaaagacgcttagtcttatgaagaaatgtcacatatacaggaaaggatgagattggccaaaatgtttttttagtcttctgatttgcagatgcttgattggagttatcctgctcctgccacaaacaggaaatggtaagaactaagtagagtgtatactcacatgcatatatatcattgagttgggtgattctaaattaatatttggcacattgtagaaaatattggtttcaagctattttttttatcaagcatacatgacctaaaaggcatatggtttctatcgtaacggttgataactccatattgatctgttctttagaaattcatgaaatagacatttgcatgacatctggaatggttatcttctttgttgaatgttctttcaagaacttgcacctttttgtttaatcttgtaaatttgatgtgtaattgagcttgtagggtgagagaatcaagtgtgattgagcagatctatactctatgtactgagattgtgtagagtaaagacgatgtagtatttccttttataatacaatttgtcacgcttcattt

SEQ ID NO: 18306 - DNA, 995 bp, Oryza sativa
  ref <308>: DATABASE ACCESSION NUMBER: AK068709
  ref <309>: DATABASE ENTRY DATE: 2001-12-06
tgcccacaccattcacagctcgcatcgcacgcggcgcaaccaatacgccattccaccggagcagccgggagcgcggaggccatggcgatgtgggtgttcgggtacgggtccctggtctggaaccccggcttcgcgcacgacgcccgcctcgtcggcttcgtcagggactaccgccgcgtcttctaccaggggagcacggaccacaggggcacgccggagttccccgggaggaccgtcacgctcgagcaccagcccggcgccacatgctggggtgttgcttacaaaatttcaacggaacaagataagcagacagctctggagcatctggaagtaagagagaagcaatatgatgagaagatttaccttgatttgtatatggactcctcaccaaaaacaccagccgtcaaaaatgtgatggtatacttagccacaacaaacaagcagagcaaccaaaactaccttggtcctgcaccgctggaagaaatggccaagcaaatttacctagctgaaggcccatctggacctaacaaagagtacctgttcaaacttgaggatgcattgaacaaaataggagttgttgatccacatgtccaggatctggcaaatgctgtgcgcaagtatccagacactgcggtatcttgctgaaggatggcatttccctcctctttgggagggtaaaaatataactgaaggaagttagatcaattcatgctcaaacatcttgaatcttgtaaatgtggacagcttctgccgatattcttgtccatctgtagatggcagtagaaaattcgcaataaggatttaagttgggggtatgaaaactgccacattactgcgttgggaatcaaacccttcttttttactttcaaaacaagattgttctctacttctcttatattgaagcataatcactgtgcatggtctagttagctgcagcctgcaggcttggtcactcgaccatgctttgtcgtataaaatgttttatgattcaagct

SEQ ID NO: 18307 - DNA, 1573 bp, Oryza sativa
  ref <308>: DATABASE ACCESSION NUMBER: AK068710
  ref <309>: DATABASE ENTRY DATE: 2001-12-06
gaccaccgcccacaacctcagctcagctagcaaaagtacaatatcccttgtacggacgcctagctaagctaagctaattaagctctaatttctcttttcttttttcttcgatctccggcgaaaaagtaagtacaatggccgaggtgaacggagccaataacggcaacggccaccacggccacggcaacggcagcggcgctgcggcggcggcgatcgtccagaagaccgggttctacgccggcttcatctccggctacgccgtctccggctccttcctcggcacccccgacgtcggcctcctcacgccgccggagatggcggaggtggcgaggcggatctgcgcgtcggcgcccaacacactcttcatcgccgacgccgacactggtggtggcaatgctctgaatgtgaagcgtactgttcaggacctgatggcagcaggtgctgcaggctgcttcctcgaggaccaggcatggccaaagaagtgtggacacatgcatggcaagcaggtgataccagcagaggagcacgctgtgaagatagctgcagcgagagaggtcgttggtgatcgggacttctttatcgtggcccggactgacgctcgatctgtcactggtcttgatgatgccattaggcgtgccaatctctacatagatgcgggagcagacgcgtgcttcgtggaggcgccgcggagcgacgaggagctgatggagatctgcaggaggaccaagggttatcgcgtgtgcaacatgctggagggcgggaagacgccgctgcacacgaggcaggagctcatggagatggggttccacctcatcaagtcccccctcaccaccgtctacgctgccgcccgcgccctcgtcgacgtcctcgccgccctcaagcgcgccgagaccacccgcgacgagctccaccgcctcaccaccttcaccgagttcaacaacctcgtcggcctcgactcctggctcgacatcgaggttcgcttctccgtcaactcctcctcctccgttcccaagccgctcccggcaccaccggcgctggagaccacgacggagatggagaaggccaaggccaaggcggccgccgtcgtcgccggaaacggagctaccaatggggtacactaagatcgatcaagatcaagctaccaatggaataaattatcaatcgaaatgtggctgtcatcagggagccatgaaatatggtggattacattgattaattctcctgcattattggtgaattttgtgaggtatgtgttattattgcatggtacgtagctatatattgctgtgtgagtgagtgagtgattatgttgggattgggtgcgtgattccgcacataaactgtaaggtaaatatgtgttgagtattcttcgttttccaattttttcgattcagtacagtatatgcagctatgcatctgtctgaattttgagtcagtatgctcgtgtgtgcacggtccagattgatcgtcgatccatgaagcatctgtactgtcagtcagtgtcatgttcagtgtaccttcaaatttatttggaataaatcggcccatggaccgtctaccattgggctgttcg

SEQ ID NO: 18308 - DNA, 1042 bp, Oryza sativa
  ref <308>: DATABASE ACCESSION NUMBER: AK068711
  ref <309>: DATABASE ENTRY DATE: 2001-12-06
gactcactcctccctcccactccccacttcactctcacagcaaccgagtactagtacaaagttcttcgaatcccaccgccgccgccgccgccgcagcattgcgcgatggccggattcgcgacctcgcgccccgcatccctcgccctcgcggcgctgctcgcgttcctcaacctcttcgccttcctcctcgccgtcggcgccgagcgccgccggagcacggggaaggtggtgccggacgagtacgacctgcggtcctactgcctctacgacaccgacgcctccaccgtctacggcgtcgcggccttcttcgtgctcctcctcgcccaggcgctcgtcaccgccgccacccgctgcctctgcctcggccccgcgctctcctcccgcggctgcgccgtcgcctccttcgtcctctcatggataacatttctcaccgcagaagcctgccttattggtggatctgtgaggaatgcgtaccacaccaagtatcttggttactacatgaagcatgacttggtcacatgtgccacgcttcgcaagggagtctttgcagcagctgctgccttgatgcttataaatctcctggcatctctcatgtactactggagttactcgagagctgcaacaggtgggttcatcaagcaccagaacgaagttggcatgagcatgacggattacggccttgacaagggtggctctatgccctgagtactggagtagcatcatgttgctctttgttcatctggcggctatgacgagttacgagatttctcagctttctgtgccagaaggtatgttcttgctgtgcacagtgatgcagtggatgacacacaaatgcggttatgatatatagtggtagttttattgtatgtctctaaattattacaacgttaaaactctttaggtcctggttgttaattgttatatggcatgtgcctgcttgccattgggcattggctatcagcactacttttagtgcaaatacaggtttagattgtttgtgctggacaattgaggccagttcttaacaggggtggtttacatc

SEQ ID NO: 18309 - DNA, 1954 bp, Oryza sativa
  ref <308>: DATABASE ACCESSION NUMBER: AK068712
  ref <309>: DATABASE ENTRY DATE: 2001-12-06
gatttcgtcggcctctctcgagtcctggactcctccctcgccacctccccaaattagcagaagccgcgcaccacgcgcacgcgcacgtccgcgccgaggaggagctggcctcgcgcgctcttcgaggagagaccgcgggggaaaccctagaggctgcgccgccgctcgccgccggccggccgcggcgggtggtggggcagggcctgacgacgaccggttcaacaagcagtaagatctgaggttttgggggtgggattagggttgttgccggggtttgtttggtgttgcggcggcgccgcggagggggttcatggcggggtcgaagtttgggtcgttcaagtcggagaaggggagctcggcgggggcggcggcgggggccggagcggcggcgcagaggagggacccatacgaggtgcttggggtggggcgtaatgccaccgagcaggagatcaagagcgccttccgccgcatggccctcaagtaccatccagacaagaatgcagacgaccctgttgcctcggacaagtttcaagaagccacattctcttacaacatactgtcagatcccgataagaggcggcagtatgattcctcgggattcgaggccattgaagcagatagtcaggaactggagttggacctgtcaagtctgaacactgtaaatacagtgtttgctgccctgtttagcaagctaggtgtaccaatcaagaccacagtttctgcaacagttttagaggaagcattgaatgggtcggtgggaatttcccaactcgagcttggccagtccgtctttaggaaggtggaaaagcaatcagctcacttttattctgtggacataacagataaagaagccaaaatggggttagtgtgtagagttcaatcaactgctaaaagtaaattcaagttgctatatttcgagcctgaagaaaatggtgggttaagccttgctttacaggaagacagtgtaaagacagggaaagttacttctgctggaatgttctttcttggctttccagtctatcgctttgaacaaaataattcagttgctgctgcaaaggatcctgatagtgcattctttaaaagattggatggctttcaaccatgtgaagtaaatgaactaaaagcagggacccatttttttgctgtctatggtgataatttcttcaagagtgcaacctataatatagaggttgtatgtgctgaacccttttctactgaaaaggagaaactacgatgcgtggaggcaaagatacttgcaaaacgatctgagctgtctaaatttgagtctgagtatagagaggtcttagcgaagttcaccgagatgaccagcagatacgctcaagaaatgcagacgatcgacgagcttctcaaggaaaggaatgcaattcatgcatcctacaccaacaacacaactctgcaacggagttccagtagcaacaaagggaaaacatcctctaaagagtccaaaagtgatgatgaccaaactgtgaaaaaggaaaagaaatcgaagagcaagtccatggagggatccagaagtgatgatgatggtcctagaaaggaaaagaaacctaaggaacgacttcgaaggaagaaatggttcaacatccatttgaaagtagacaagagaagaccctgctgaggaaggtattccctgcaagttactactcccaggaaatggaacccaagggagttgctccgagaagaaatatctttttctttgtcgtccactccatgggatcaaataggcaggaatctcagtttgacattcggaaagacaccctcgcaaattattttttctcctgtgacgtaacattttgtttcctgaaaagtcaggagcctcggcagtttcagaaatgatgtaaaatattacatgtagtgttcttttggggatcttactggcgctgtatccgttcacccggaaccaagatggttaatgatgtgtgtatacagcttc

SEQ ID NO: 18310 - DNA, 2576 bp, Oryza sativa
  ref <308>: DATABASE ACCESSION NUMBER: AK068713
  ref <309>: DATABASE ENTRY DATE: 2001-12-06
gctctctctctctctctctcgccaaccaatctcctcccccctcctttcctcctcctcccgaaccaccggaatccgacgcggcgccgccgcgccaccccgttccgccggctctcttcctcacctctcctccccaggagatcgtcaatctcctcggtcaggtgtttgatcgattgcctgtgggaagcatatgggcggttagattcgtgaagttgagaggaatcagaagacgggaattgtttgaggggactgaatttgatctggaaaatggggtggtttcgggctgcgtccggattggctcgggtggcgctgaggaggaacctggcgcgtgctccggcgaacccttttgccggtcctgcgccacggtacttccactccacccgcccccggcggttcgccgctcctgtgccccgcgccgtgccgctctcgcgcctcaccgacagcttccttgatggcaccagcagcgtgtaccttgaggagctccagagggcgtgggaggctgatcccacctctgtcgacgagtcctgggacaatttctttcggaactttgtcgggcaggctgcaacttcgcctggcatatctgggcagacaattcaggaaagcatgaggttgctgcttcttgtgcgagcgtaccaggtgagtggtcacctgaaggctaagcttgatcctctcgcgctagaggagcggcctatccctgatgttctggaccctgcgttctatgggttctctgaggctgatctggaccgggagttttttcttggtgtgtggaggatggctgggttcttgtcggagaatcgccctgtgcagacactccgttctgtgttggagcggcttgagcaagcttactgtggtaccattgggtatgagtacatgcacatacctgacagggagaaatgtaattggctgagggataggattgagacggtcaatgcaagggagtactcctacgaccgtcgccaggtcatgcttgataggctcatgtggagcactcagtttgagagcttcttggcacagaaatggacgaccgccaagcggtttggtcttgaaggtgcggagacactgatccctggcatgaaggagatgtttgacagggcagctgatcttagtgtagagagcagaggtaggctgaatgtcttgggaaatgtcgtgaggaagcccttgcgacagatcttcagtgagtttagtggtggtaccaagcctgccgaagaaggggagggcttgtatacagggactggagatgtcaaataccatctaggaacttcatacgataggcctaccagaggtggaaagcatatccatctgtctctggttgcaaacccaagtcatttggaagcagtcgatcctgttgttgctgggaagaccagagcaaaacagtactattctaatgatcttgacaggaccaagaatttaggagtcttgttgcatggtgatggaagcttctcagggcagggtgtagtgtatgaaaccctgcatctcagtgctcttccaaactacactactggtgggacaattcacattgtggtcaataatcaggttgctttcactactgatccaagggcagggaggtcttcgcagtattgcacagatgttgctaaagcattggatgctccaattttccatgtgaatggtgatgacttggaggcagtggttcatgtctgtgagcttgctgcggagtggcggcaaacatttcattctgatgttgtggtggatattgtatgctaccgccggtttgggcataacgagattgatgagccttccttcacccagcctaaaatgtacaagataattaggaaccaccagagtgctcttgagatataccaaaacagacttttagaatctgggaagatatccaaggaagatattgataagatgcagaagaaggtcagcactatcttgaatgatgaattccaaaacagcaaagaatatattcccaataagagagactggctctcagcttactggactggattcaagtcaccagaacagatttcacgaatccgaaatactggtgtcaagccagagattctaaaacgtgttggagaagccatgactactctgcctgaaaatttcaagccccacagggctgtcaaaaagatttttgagctgcgtcgtcagatgattgagacgggcgaaggcattgattgggctgttggtgaagcacttgcttttgcaactcttataattgagggaaaccatgttaggttaagtggtcaggatgttgagaggggtacattcagccaccgccatgctgttatccatgaccaggaaactggagagcaatactgtccgcttgataatcttgttatgaatcaagatgaggaactatttactgtaagcaacaggtatgaattatgatccaccgacacattatagtttggatgtttttttatatcgtgcaagtttagcttatgaattgtgcaagtataggtgaccaacaaataagaaaaaagaaatcaggtgattggcaaatagcaaagctgttgttggttatgtaagtggctgtcccacttgtacatgtacacacacaacacaagtacatatgttatcactgctcatcaaatatgccttgagctagttgc

SEQ ID NO: 18311 - DNA, 3929 bp, Oryza sativa
  ref <308>: DATABASE ACCESSION NUMBER: AK068714
  ref <309>: DATABASE ENTRY DATE: 2001-12-06
gactcgacttccgcggcaccacctcttcccctcccctacctctccgtcctccgcccctcccatctggcctggacgccggtggaggctctggaggaggaagtgaacatgagcaggagcacgcgcaggcgcagatggatgtcaggagcaggtcgcacggaggcggggccggcgtgattgaggaaatcggccagcgacaggcaggccacatccgctaccctaacctcctcgttccggcgagcccttgatttatgtagagcaagcgtctggcagatgaggagttgtttgtttggacgacggcgctctagctaggaccaaatctccagcgctagctagctgctgcgtctgcatcgcagtacgagccctcgtcggcgggggacgaggtgcgccggctccacctgtatctgcatgccaaagaccatcgcggacgccaggcccgctattcgatccgctcattcgcagctcaagatccagcgaggagatggtcgtcgccgatgtaaacatgaacccggaatcatcttctcaggaacatgaagaagcaggcaaacagaaacggcaaaagagagagtgtcaagctttcacacacagaagatatcagcttgatgtctatgaggttgcaatgcggagaaacacgattgcgatgcttgacacaggagctgggaagataatgattgctgtgatgtttatcaaggagtttggaaagataaatagaacaaagaatgctggaaaagtcatcatatttcttgcaccaacagttcaacttgttgcacagcaatgcgaggtgactgaaactcacagattttgaggtggaacaatgtcatggcgcaaagggggttgatcaatggacaggtccaagatggcaagagcaaatctcaaaatatcaggtcatggtcatgacaccacaggtgttcctacaagctttacgcaatgctttcttgatcttggacaaggtgtctcttctcatttggattgtgaaggtcagttctgtgaattggaaaacctgttagatgccaagatctacagagtttcagatagagaagagatagagctttgcgttccttctgcaaaagaaatgtacagattctatgacccgaaaacaatttgttttgaagatttgagtgaagaattgggagttttatgtcccaagtatgatgcattgataacagagttgcagaataagcaaagctacatgtatgaagatgctgatgatataacaaaagaatcaaggagacgcctttctaattttagcaaaaatttgctactgccttgatgatgttggtcttgttttagcaagtgaggtatttgttatattcattggctttagctacttatgttacagctgctcgcgagcgccaagacggtgccttcgcttcccacatcgctgccaagtccacccccaagctgctccactgcctcgccttacgcctcacggctgagcagatcgtgtggcccgataaagagataagtactgtctgtttccttgatctgcttcagccgccatcaccatcaaccccttctagcttccacagttcgagcaggtgactatgcatcttgtagtttctaaggtctgcaaaaagcatgcttcagatacagttggggatatatacagaacatcaaaatgggaatatgggatgcattccttgatgcaagacagatagaagtgtccaaccattacgaatttctaaatcaaagaattcagcacagaaagataggtaccaatggcccgacttgcctctccaatagcactcatctattttatctttcatatcattttgattacaaaatcatcctagcataattcttgcagttttttaatttactaattattgcgcatagatatctacctgcaataattcttctggtgcagatgagtggcaatatattcttaaatggaaatagttcaccttatcctttcttttctgcctcctctgctaacccctcttgctctttgacacaaccaatttatgatcagagtatgtgctggcatgtatgtacctagaatagtgctttgttatattggtaatccatttagtaaaaatattttttgctctgatttgagcctcacttttagtataattcttgggcactaaacaattgattctttcttttttcaaatcaagcaggatgattaatgtcgttgaagcgatgactattatcctggcttgcctacgatcttggtatttctccctttccattttatgtaggtgctcatatatgtagatatgttgtttattcttggcatccccatcttctttgaggtatctagatggatatcataccaatagttgtcgaagagtcatcttttagggagatatggtttggtgtgcctatgtaagtttctacatgttgcatatatccgacagaatgtcaatataaatttcaagctaagaataattctatattgtttatttatgccttacatttacttaattaagataaacttccttttgggattttttactctttgagggatttgatgctcgtctctggggtcatttgcgtcctatgtaaatccaatccaatcataccaacgaattaaggtttggattatggatcctttcaatcatcttgatgagtatacaaccaacacatgtaagttgatttatttcacctctgtttgtatgaatcagtttcttatatccaacataatttaattgtccttgcattctttggcacaagcattgacacatcataacttggtttgcctgatttttatgattggcaacagaattcagtatacaccagctttgtcgcgagagtagacctcatgtaacatacacaaacgcctgtatatgaattcttttctcctcctatattaatgaaaagaggcagccctcctgccctctttttcgagaaaaaaactattaatgcctctgttctacaatttggtcttgggttctaaattcagagacttattaagaaatactcagttatctcttcaggaccagtaacacttctagactcactagaattagacatattatctttatagggcactactgtgttctgcttttcaaattgagcgtctaaatagaagatattgtgcctatgtaccttttctatatattcgatgaagtaagttttgattgtaaaaaaatatgcttgcagttctacataaatagcgatatggctgaaatgaggcatttcaaattctagattatatacaattttgatagtgctttcagtttaatagtgcttgcagtcatcagtcactgttcttggtgtagtttccagataattagaacttttcagaaaaataaagctgtgatatccaatgtgttctataacacactacaatgtacatgcatctcccattttgtgttttgtaattcttatgactgtccggaggtagatcattgaatcgacttgaaatgcacttacctggcaatatatgttcgctgcagctctttctgtttcatcatttcgtatggaggagtatggtgaagcctataatgaggtatgtctgcttcgcgttgtctttgctggtatataatgggcccattttttctgattcctggttaatatcaaggcttttctcattaagcaaaatgattccctaaccctgttccctttccggaaattgttttcagtgcctttaagaaactgttttgagcatgttgctacatcaatagtacaatcatcatctactgatgcctcacatgaagtcatcattgctcacaaatttgcatccaaaacaagaattgagattcttttaaattggaagcccctcaatgagggttaggataattgttaactattcccaagtgatatgtagaataaatgatcagctcttttttttaacttagtaggtgatagcttcgataacttttggaaatatttagaaacaacgtgtagttgaactggcagaatatttgtggcattgtaaccatctaacctttttcttaatgaattattccaatagttttttatcg

SEQ ID NO: 18312 - DNA, 984 bp, Oryza sativa
  ref <308>: DATABASE ACCESSION NUMBER: AK068715
  ref <309>: DATABASE ENTRY DATE: 2001-12-06
gaatcgtgctggacctcgcaaaattgcccctccaaccgcatcaacactcgtcgcgcgaagcgtaccatcgtctctctcatcttcctcgcggtctcatcctgatcgatctctgcgagtttatccaatatctgtactcgcaaactagctagagagatctagttagtagctaggcagttgctgcctctcatgtctaccatctacatgagtcagctctcagctgctctccctctcatggagggggagcaccaccatcaccaccaggatcatcaccaaggccacttccaagccttctccctgcagcctaaggatcccccagtcttattcccctttgtgatcagtagaagaagcagcagcagcagccctagcgacagcaccactctaagctatggttcagaccatcacttgacacagcagcagcagctggagcaagacccatgccgccgccaccgcctcctgcagcttccggccgtcaccggtggctcccggcttcgcggcggcggtgcaggacgagatcactgacgccgccatgctgctcatgacgctgtcctgcgggcttgtccggagctgagaaagaaaagctatacttcatctctgcatgcatccatcgatcgatcgattggcaccaagctagagagaccaatcgatggagatggagagaggtgcaggctttttgcagctagtgcgttagcctgttcttgctcgctcgatcgatcgtacactgccccccagttggaatgtctcttggcgtcttgtttcctgttcgagtcttgtgatctctgttactttgtgcactgtactagagagtgagagagagagtgaggtagaaacatcaagaggagattagaggagaaagaataattaagagaaaagtgtgagctagctaggtaagatttactgtactgtgagttcaatttggagtaagcttttttgggctgcttcacggctaattatgccactggctgctatatatgtatgtttgttctt

SEQ ID NO: 18313 - DNA, 3660 bp, Oryza sativa
  ref <308>: DATABASE ACCESSION NUMBER: AK068716
  ref <309>: DATABASE ENTRY DATE: 2001-12-06
tcctgctcttccaccgcctctccccggccggagctgggaaggggaggcggaaccctagctccgccgcccacgaaccaactccgaaattcgccgcgtccgatcctcctcctccgaaattgaaggtaggaatggattccccattcccgcgcccccctttcccctctcctccccaacctcacggcccgccggaattcgccggccgccgttctcggccgccccagctcaagccgccactacctacctctactcagtgctcgatcttcctcgctggaacccgccggagcgccgccgcctctcacgccaccgccggaatcggcgtcccctcgccggtcctgctcccccttcgctgctggccaccggcggccttgaaccgctgacgacccctgtaaaccgaagaaaaacgaagcagtctcttccttttgaaataaaaatacaatttctctggttcctctggttcagtgaccaactgaccattcgaaaatctgccacctgttcccaactcattgaattattatcccgagtccatccgcacaagtttcgtctcaatccgagcatccattaacacaacccccaaattttgattcttagggttcgctgaccgttaaagctacagaaattttcaaatttcaccatctaacctcttttgatcctaaacggcaccttccgaggttttagtgtttatttggattttatttgcttagctctttaattgtgtatcgatagattacgccatcggttcaggagaagggtcagagtttgctgttgatgcatacgccatcgctgctgcaggaggagacgtttggtacgactacgctgagcccaaaggcaagtcatctccctttatcataatttgaagccaattgtgcttgccttgaagtacgttttagggtgccttgaagcatacttaaaacctttcaaaatggcaatgaccagttatctcatattgctatatacagccatgccttgttgttgaacctggtatatccttggtaacccttgtacaacataacatgtgatgtttacagtttagttatatcacttcatgtgttcagatggaaatgttatggttcttttaaagtttataaggataaacccacttatactaatattaagtggcatagtttacgcccatacgtttgaccgagtaattagacttgaatgaacacatttccagtggattgaaatcctatactagaatttcttctctaaaaatgtttggagtggcgtctctccctccaaatctcgttttttgaaatcctgcactaggaccccacaacccgctcgctcttgaagtgaaccatatatcggcttgagattgtgctgaggctcttttgtgtatgccttatggtccttacagtgtattggacctattgcatcttttagctcgtcaaggtggtacattaacttcaactgagagtatcggagtaggtcccctacccatggcattgggtctcccgcacggtacgcgttgggggcgtgaccccgtacacgacggagatgttcacggtggccttcttgaacacgacccacccttcagcacgtggctgatgcccttgccgctgcccagccgtgtctaggcgtcctcctggaattgcaccctgctccacatgcctaccgctgctggcctccttgaccacctccagcgccgtgcacacctccacctgcgcgtgccggatcgtgcgctcgaatcgcgcctgcaccaacgcggccttctcctctcccagcaggaatgtcagcggtaccctacggcctgcgtgatgcaagagagaaagagagacagatttaaaccagctcagccaatcccctcccgccacatgctccatgacttattctcttctatctacagctcgctgtgaccgggagctccgagttggccactagcaatggcattgtcggtgagtttggagctctcgcactcgcctccgctgtggcaccttccctccctctgccatcaccgcccaggtataccggatccaagaaaatcgtggacagtaaagcaacccaagaggatctgcagccgcagtgtcaaaactgaagagctgcagagattcagtggccggaacaaccacggaggaggacgagggagcccttgaggcgcggcacggtgagtccgcgcctccctgtgcccgaccacatccctctccctccttacgccggcacgaatcgcctccctgatgttgaccccaatcgacagctgcatggctgcgagagcattgctcgtatgagagccgcctgcgagctcaccgctcgagttcttgagtacgcagggacactagtcaagccattggcgacgactgatgagattgacagagcagttcatcagatgatcatcgacgctggcgcctacccttctcccctaggctacggtggttttccgaagagcgtctgcacgtcggtgaacgagtgcatctgccatggaatccctgactcacgggtgctacagaatggagacatcattaatatcgatgttactgtctacttgaatggataccacggtgacacctcaaggacatacctatgtggagaagttgatgaatctactatgcaacttgtaaaggtgtaaatgaccttgctgatctctgctgattgtttcatgatacgataatgtttcatcctgtatctgaagaaacttatatattgttctgtaactaacatgctgaggggaatatcagcctgcaaacacggtgctagttttaagacaattggtcagagaataaggtgttaatctctcttacccataaatttcatgatgtctttcagatgaatcaagtactaatcagcatcgatctgaaagcactgaaaaaaggaacacaaaaattgatcaggatgctgtttttcccagtaataagcaaacattttcctctaaaatttactgagaaattttgtttcatgtacttatatatgtagtatattatctatcatacattttttctggtgcactgaaactcaaataagctgaacagtaagtggaaaaacatataatgctgaatttcaaatgccatgaatcataaatgcacttatcctgtcagtgatagtccagcttctacaaataatttcatgatttctgatttcagtgagtacgtggacgagtacgggtacagcatcgatccctttgtcggacatggaattgggaaaatattccactcggaaccgatcatttggcatacctatgattatgagccaggctacatggttgtaggccagacattcacaattgagcctactctgtccatgggaggcacccagtgcacactgtgggacgacgggtggacggctgtcacggtggacagcagcctcaccgcgcagttcgagcacaccatcttggtcaccggcgacggcgcggagatcctcaccatgcacccgcggtgagatgacgagaaattctacgcaactagcaccacttgcatatcgtgctggtctaaaagcatccttttctcagttttcatctttcacaaaacaaaggcaactcatgatctgtacagcattttcaaatagtagcaaaatgcccatactttgttacgggattaaaaacaaaatcttactgtatgctctagaatagtacttcccgttcaataattatgggattattaatgtgactgactggggattagtagaatcttttcagaatcatttagagactatactgctacaataattgag

SEQ ID NO: 18314 - DNA, 1528 bp, Oryza sativa
  ref <308>: DATABASE ACCESSION NUMBER: AK068717
  ref <309>: DATABASE ENTRY DATE: 2001-12-06
ggatcgaaccttaccgaagaaacgccacgattttttcaccccgtgccacgccacggccacggccacggtcggccactcggttggcgcctccccgacgcacgacgacccgcggttccctcccgtccccggccgcctcctgcctccacgcgcggctccacctccacctcccctcccctcctcgccgcgccgcgccgcccagcaatccaactccgaatcatcctcctcaccccgcgcggcgccgctccgaccgaccaaccaaccaaccgcagcggacgccacgcgaggggaatcgaagcggagacgtaggggcggggggaattcggccgaggggaagcatgagcttggcctcccacgcgcctagccgtcgagctcgaatcgcgtgagataaggggccgcgagcaccgtggtgggagagggagatggcctcgcgggaggacgaccgcgccggccgcggtggcggcggagggcggacggagcaggagcggcggccgtccaaggcgtgggggatcctcatcttcggcctcatcggcgccaccaccgccaccttcgcggttgctcaagttcgcagaagtgttgattgggtctacagtcagttcaataagatgcagacaacatcttggaggaatgcaagtaacagctctaaccgtggaagtttcagtgaggatgctaggagaagatattaccaacgtatgcaacaggaatatgaggaggaacaagagagagttcaaagaataagacacatgcaaagtgttttcaacagagagaggaacaagtttaggagaagttatgaagcttggagggagaatggccctccaggtggatataattatgtcccacgggacgactggtactggcagacagatacatcacactcggaacataaaaataggcggacatatactcctgcaggacctagggtgtattctatgtcacatcactatacagtccttggtctcaataggtcacggacaacaccatacaccgacgcagaagtcaagaatgcttttagaacaaaagcaatggaggttcaccctgatcaaaatcaagataatagagaggctgcagaagagaggtttaaggaggttgtcaaatcatacgaagcaataaaactggagagaaaaaatgatgcaagttgaatgtgaatatgtagcttcactggagctcattgggaagattgaaaggatcaatgaagacagtatcagcaggccttgcaatcaagtggatgatctgttaggttcggctgtatctgttgatagcctgtaagcacaagtttttatttgcgagttttttttttgggagcacacggccctgatgtagactaggatattgtcgacaaaggtgcaaaaggaaattgctcatttgtgcttagccactaatttggggtgcaaaatctggactgcgggtgagcatttttgttgtgtacacctgctggtttattttttattagtagaaagtagagtgaagatctgatagaaaataataagtagcccataatattatagcagaaaaacaatgtttattacgactt

SEQ ID NO: 18315 - DNA, 1036 bp, Oryza sativa
  ref <308>: DATABASE ACCESSION NUMBER: AK068718
  ref <309>: DATABASE ENTRY DATE: 2001-12-06
gatccatccatcctcgacaccaccgtctccgcttccctttccattcgcgccgccacctcgccgtcgcacccagcggcggcgccgccgtgccggaggagcggcgatgtggtgccagtcgtgcaaggaggagtacgaggaggaggacgccgggacgtgcaaggagtgctacgaggaggcgagcgagacggaggaggagctcaagcgcgagatcgacgacctccgctcccgcctccacttcctccgcctcccttccccttccctcgacgcctcctccctctcccactccgacctcctcctccacgccatccccgccgatgcatcccgcccgccccgacacccccgccgtccccgcccaccgcgtcatcctcgccagcagatctcctgttttcagagctatgcttgagaacgagatggaagagagccggagtggcatcatcaaaatatacgatgtgtcctacgacgtccttcgtgctttcgtccattacatgtacacagcagaagctctccttgacgagcagatggcatctgatctcctggtgttggctgagaagtacgaagtgaagaacctgaaggcctactgtgagaaattcttaacatccaaagtgagcaacgacaatgccatcacgcattatgcgtttgcgcatcgccacagcgcgaagcagctgctcgagacatccctggcagcgatcatggacaacatgtcaacgctggcagatcgggaggaatacaaggagcttgttgagaaggacccaaggcttgttgtggagatatatgaagcctatctgaacagacaagtgaacactgctgctgggaaggagacagattccagtagtaggaaggggtaattcaaaagaaaactgctatcagagatgtaattaatgttctaaccaagcttttgcatgttcatgctaggcaaagactggcacatcaaattgtcatcctgcggtgtaggcgcagaacagctatttctgtatatgcttgaattgatactgtgtgctcgctactgatagaatgagatctattgccatctttatgt

SEQ ID NO: 18316 - DNA, 1104 bp, Oryza sativa
  ref <308>: DATABASE ACCESSION NUMBER: AK068719
  ref <309>: DATABASE ENTRY DATE: 2001-12-06
gaagcttcgatcgatccatcgatcgattgatcaaatcttgtgtgatatagcactagtttgatgcgtgcgagatgggcgggatagctcgacgacgaggaggaggagatcaaggtggtgttgctgctgctgccggcggcgacggcgaggcggcggcgtccgggttctccagcggcgattcgtcggcgacgacgacgctgcggtcgccggcgtcgtcgagcctgaccgacgatggcggcgaggtgacgtcgtggacgtcggctgacggtggtggtggtggtgactactgctcgttttcgtgttcgtcggagtcggagttggagttggagtcagacgacgacgacgacgaggaggaggaggagatgatgcagctggatggtggcgggcacgccgccggcgggccgctctacgagctggcggcgccgctgctggcgcagcttcctctcaggacagggctatccaagtactaccaagggaagtcccaatccttcacatcgctctgcaacgccaggtgcgtccaagaccttgcaaagaagacaaccccttacatcaccaggatgaagctgcagctgcgcagaggccatggagtcgtggatcggttgtcgaattcgcgtcgcgctccagggccctgcagcaagacgatggcgaagaaggcgacgaggtgctcgtccgatcgattgctgtcaagagcaagggagcacaagcctcttcacagcagcagcagcacacctgcacaacagagcaagaaagagctgtcaagatgctagttgaaaggcagtacaggggtactgaaaaaaaaatggagatgaggtttttcaacaaaatgaactcttcagcaatcagcactcagctgcactggagctagaaatatagaatgtctccaggtctcctccaaacgatgctttcagaaggaagttttgctcagttttcttttcttctgtggatcattgtgtcattttacttgataaaatggctgagccgatgttagatacatcatgatcaagccaacataatctggagacatttcatcaagtttgtacatagatgcaatattcataagatatattattttgtctaatacataattattttgactttgggcaaagg

SEQ ID NO: 18317 - DNA, 1172 bp, Oryza sativa
  ref <308>: DATABASE ACCESSION NUMBER: AK068720
  ref <309>: DATABASE ENTRY DATE: 2001-12-06
ggttgcctctttcccagtttgtgctctctcctctcctcactccgccttatccccaaaaccctatcgatcccatcccctttcctcctcacccatggcggccacgctcttctccaccgccctctccccgcacctcctccccctcccctccacctcctccaaccccgcctcatcctccctctccttcctctccaagccgctgctccccgccctcgccgtcgcgggatggccgcggaggaggaccagccccttcgtgccggtggccgtggccgtgtcggaggaggtcgagacggaggaggacgaggaggaggaggaggagggctccgggggcgaggagttctccgacgacctgagggtcttcgtcggcaacctgcccttcagcgtcgacagcgcccagctcgccggcctcttcgagcaggccggctccgtcgagatggtcgaggtcatctatgataagctgactggaaggagtcgtgggtttgggtttgtgacaatgtctagtgttgaagaagttgaggcagctgtcgagcaattcaatggctatatacttgatgggagatctttgagggttaactcagggccaccaccaccaagggagcaatcatcgcagagagcacccaggggtgaggccaacagggtctatgtaggtaacctttcttggggtgttgacaatgcagctctcgcaaacctattcagtggggaaggggaggtcttggaagccaaggtcatctatgacagggagagtggcaggtcaaggggatttggttttgtcacgtatggttccgctgaagaggttgagaatgcagtttcaaatcttgatggcgctgacatggatggcagacagatccgagttacagtagcagaatcgaaaccacctaggagacaatattgaaattcgtttagatgccctgaagcctatggttagtccagatatgaatcatactatcgtcatgattgttctatagcatcgatggaattctagtcgtaacttccaccatatggttcaaaagattggtttggtgatgagatatatatcattttgttttaactttttgaacccacttttttttgttatgtatggcttgttccttgaattatagagtaaagtgcacggccggtctctaaacttgtgctattcaggtctcataatttgacaaagtgtgtcattccggtcc

SEQ ID NO: 18318 - DNA, 1745 bp, Oryza sativa
  ref <308>: DATABASE ACCESSION NUMBER: AK068721
  ref <309>: DATABASE ENTRY DATE: 2001-12-06
gcttctcttttttttcttttatatcactggctccctccagctcgtagtgctcgccgccgatgtcgagctcctaatcgctggcggccgaaacgccggccgcctccgcggcccgcatcgccggccgcgacctcaatcgtccgtcgaggaatcccgtattgctcgatcgaataatcgggatggtaatgacgccgtcgcctggctgcaagctgtggccgtcgcagggcgatgcgggaacggcggcggcggcggccctggactccctcccgccggagatgctcgccgacgtcatctcccgtctccccatccgcgagaccgtccgcacttcggcgctctcccacgtgtcgcgccgctgctgggagtccgtcccctacctcaccttctgttggccacgccgcacgccccccggcgccatcagcaccgccctccggcgctaatccggcctcgtccgcaagtttaccaacttgtatatcggggaggaggaggaggaggaggcgccgttccgctactccgaccgctggctgctcctcctcgccgggaagggggtccaatccctcttccttgctttctgacggtcggacgaggagatccctatgctgcattctctatcttctcgtgctgcgagctcacccagctcgaacttgcagactgctacatcccagggttgccaacctgcttcgcggggttcccaaatctaaccagtctaagattatcagatgttggcttcccagatggagcaaaaggattggagatattgctcgctagatcgccattgctaaagagcctttcactcctgatgttgctgtttcctgctaaaaacggggtgtatcaccagtgggttattcaggctccaaatctccagaacttttttattactggactgtatgacgatggttggcagatcggtgatctcacgttccttgaggaagcaacagtcgattggccattatactcatatgaccgtgatttcgtcaagcttattacagggttgtctcaagcaagggagctcgactttgcaatgccggtgagagatgttaatgttctggagggactgtcgtgctcctttaagaatctgaaatgtttatcgttatgtacaagtcttcacttgttgtcaaatgttttgtcgtttttttgtataatcaggaatgcctctaaactcgaaactttgcgtattaagctctttgatgattccactcaagacgatgaagttgataatgattttctaaatggacagtggactgatgacttattctccaatcttaaaagtgtttacgtgagaaatatgacgtgcaagttaagtgagatgcattttattgagtttattttgtcaaaggcaagaaatcttgaaaaaaatgatgtctgcctagctgaagattgttcgaaatctaatgaagaggcagttatagaacttgcaaaataaaatataggcgagcttctccacaagccaaggtattcttcagccgtgttgagtaagattaatttttgaagtatctgtaacttgcgtgaattaggacccaggctcccagctttggtcctcctcctaagaaaaaagaaagtcaagttaagcttgaaacttcaggcgctagatctgaattatgtggatgaagcagctacgattattgtaagaattatttggatgcggcacctatgattattgtaagtctaactctgggtgcgatgtagaattgtggaagtagtaatagattgttactgaacaaaatgttggattttttgtgcttttgccttct

SEQ ID NO: 18319 - DNA, 958 bp, Oryza sativa
  ref <308>: DATABASE ACCESSION NUMBER: AK068722
  ref <309>: DATABASE ENTRY DATE: 2001-12-06
gctctcccatagtagtatcgtcatcacgaaacaaattaaccatagcagcagcatatcctctcccatgcttccatggattccttctagcttcgccttagcttctcctcctctacagtctacacgcgcgcatgcatagcatctatagagagagaacaaattaattattaggatttagtcgcaatggcattagccatggcgcccaggctagtccaccacccttgctgcatgatgctctccaagaacccaagaacgccgccgccaccgccggcgatgcaccaccaccatgcccacaagccgctcatcaccgcgctcaccagcacgtcgtcgttcttgctccgctccgtcgacgtctccaaggacgacaagccgctggagacggcgactacgacaaccccgcctactccggcaccggcggcggcggctccggagaccgaacaagcggaggcggtggcgtcgccggagttggagttggagctggaggaggggccgaaagtggacccgcggcggctggaggagaagttcgcggtgctgaacacgggggtgtacgagtgccggtcgtgcgggtaccggtacgaccaggccgccggtgacccgtcgtacccggtgccgccggggctgccgttcgagcagctccccgacgactggcggtgcccgacgtgcggcgcggcgcagtccttcttcgagagcaagagcgtcgagatcgccgggttcgcgcagaaccagcagttcggcctcggcggcaactccctcaccggcgaccagaaagcgctgctcatctacggcagcctcctcgtcggcttcctcttcttcctctccggctacttcctccaatgaaccagtcaccccctcttcctaattctctacctctacctctacctctactgtgcctgtttctactaattaagtatatatcagtacgttttatttttattggctaattaattaattaatctgtgtg

SEQ ID NO: 18320 - DNA, 1968 bp, Oryza sativa
  ref <308>: DATABASE ACCESSION NUMBER: AK068723
  ref <309>: DATABASE ENTRY DATE: 2001-12-06
gagagtagacgacggagtttggattggaaatttggaatgacgacgacgacgacgactcggcaccgcctccgggatgcggcggtggcgtcagtggtggccgtcctcccccacgagatctccccgctcatcagcgccgcctccaccttcttcttcatcctcagcgcctactttgccgtgctgccgctgcgggacgagggggccatctccctgggcctctcctccctcccgggtctcttcgccggctccctcctcctcacccttgtcgccgcccccgtcgcctccctcgccttctccctcccatccatccccaaacccagggctttggttttcatacacagattcttcagtttatcccttcttgtcttttttgttctttggtttgcctctacccctgggcattccccttctatctcccagtcaagcgaagatgcttcaaataaacctcctggatggggaaaccacagttggttctacatattagtgagaataagcttgtttctttgggtttccttgcttaatctcattgcaatatcatcaacatgggcaagagtaattgatatcatggatagtgagtcaggttcaagattgtttggttttattggggccggtgctacgctcgggcaactttttggttcattatttgctgcaactatggcattgctagggccctttctgctcctgttttcatccctattgatggaacttgctgcattgtcatcgaaaggaatctgcactgatgatactcacggctcaatggaattgtcttctacaatagccgaacaaagccaaaatacagaggctgatgatgaaatgtcttcactggtcacttcacaaggattaccgtcccaagtctccgaatctcagaaaaccaaacctgagatttttgtgatgtttgaaggtttctggctgattgcacgctctccctatctgatgtatatatctctatttttgtggctgagcgctgttgtgtcgtccttcttttacttccagaaagtgacgatagttgctacaacaatatcaagcccaactgccagaagaagaacctttgcactcataaacagctttattgccgtctttattcttgcagggcaactcactttgacgggtcgtatccttaccatagctggtgtaacagttgctatctgtgcatccccattcattgccacattgaatatggttgcccttgctctatggccaacttgggttgctgttgctgtcactgaaacaattcgaaaggtaactacttatgttttgacaagacctggaagggaattgctattcacagttgtctcacaggatgagaagtacaaagccaaggtttgtatagatgttgttgttcaaaggcttggtgatgcaacagctgccggaatatacagtttgttgttcagcagccttgagaagaaggcatccatggtcaccctctacgcgttgccgctctgcttcgtgtggcttctaacggcatttcatttgggccggctccagacaaaccttgtcaaggttcaggttgcttcttttgcatcttcgattcctagataggtacttggttacctatagtaaggtgattgtagcttacttaattcacttgtagtgttcttaacacaaatgcttgatacggggaactgctgcacgtacccacagaaatgcatactgtaagtaaccagagtgcagaaagaaatatggcacaacgacaagtcaggttgccagtggcgttgatactccttttgccttgtaagactaatagaagatttatcgagaaacatttttgttttcaatatagcattaggattactacaggaaggatacaacatgcatagaggaagaaggaatactgtatgactagatgaataacagatgagtatgtgatctctgcgtctattgttagaaacaatactgtcttgcagacggcagtgtatgtgacttgttacattgctatttgctaatgagaaaacaaggctgaatttgttgggc

SEQ ID NO: 18321 - DNA, 1181 bp, Oryza sativa
  ref <308>: DATABASE ACCESSION NUMBER: AK068724
  ref <309>: DATABASE ENTRY DATE: 2001-12-06
gagtagagcctagagagagaaagcgcgaggagaggagaggagatggagcggccggcgccggtgaggaagtcccacacctcgacggccgacctcctcgcctggccgcagcagcagcaccagcccgacggccacgccgcctccaccccctcccccgctcgccgcccccaccagccatcggaggcgctgaggaaggtggtgttcggtggccaggtcacggaggaggaggccgagagcctcaacaagaggaagccatgctccgcgcccaagtggaaggagatgaccgggagcggcatcttcgcggccggcgccgacggggaggcggaggagcccggcagcgccgccgcgcccggccgcgccgccccgcgcaattaccagccagttactgtgagccacattcatttgctgaggatggaagtgttcctcccaaaaagccaacttcagtggctgaggtagcaaagcagcgtgagcttagcggtactctgcaaagtgaagcagacagtaagatgaagaagcagatttcaaatgcaaaatcaaaggaactcagtggccatggcctttttgaccctcaagatgtaaggcctaatggggcaaggaacacagcaaatggcaccggtgcctcacacacacctgtgagaaatgcaaatgtgagcagcttctcgtttggggaggccaacactgacagcgtgacgaaaactgcaaagaagataactggcaagaaattcaccgatctcacaggcaacaacatattcaaaggagacgaggcccctgcttctgcggagaagcatctgagcaccgcgaagctgaaagaaatgactgggagcaacatattcgcggaaggacaggcgccaacccgagagtatcatagcgggaaccgcaagcctcctggcggcgagagcagcattgcgctggtttagcattctggtggacaccgtcgctgtccgtgttttcctctttaggatgaaccctaggagtcgttctatcagcagattgagctgccagtttgctttcctgtttcgacggttaggcataaagtttgtttcctgctgatgtgggtaaagacaggctatgctctcctagcataacatttgttgtggtgttgtagtttggtatggtcagtcactttgctgtgacatactcaaatggaacagcctacatggtgtgcgctctcatttctgtgactg

SEQ ID NO: 18322 - DNA, 2603 bp, Oryza sativa
  ref <308>: DATABASE ACCESSION NUMBER: AK068725
  ref <309>: DATABASE ENTRY DATE: 2001-12-06
ctcctcgcgccttcctctctctctctctcctcgcttccccgcgccgccgccgccgccgcctgagctcggcggcagcagggggacgataggtggtgtggtgctttgctccggcgcagcgtgctgctgatcgcgcgcgcgatgcccgcgtggtggccacggaagtcgaggtcgaaggcgaagggcgtggggaagccccccggggcaggggcggcctccgcggcgtcgtccccgcgcaagtcgctcgacctcgttgacctctccgcctccccctcggtgaccccccgggcgagggagaaggcgcgcagcctcgactcgccgtcggccgccgcgccgcggcatgggggcgggcggtgtggtggggggttcggggaggtcgggtacaagctccccgtgcccgtgggtgacgcggggccgggggggcaggggcaggggcaggagccggagttggagccggctcctgtaaggttcgaggagaacggggatgtggtgggcggcgtcgccggcgacgcctcgtcggaggagttgagcgtgtgctcgcatgattcgtcggacgaggcgacggatcagcaagtatgtaggtctacggatccggcgtcttttgtcaggggaagaaatatgccatctgactcacataagatcctaaatgaagacaatcatttcatgtcctatagcatgccacgggagcatcggaagttcttcgaggttcctgtcactaatatgggagaacttcatttgcattgtgatgatctgtcaactagcgaaactagttcacgtggcagaatgttgcccgaggattttcttgctccaagaacaagaagcctctcccctggaccgaaaggccatacttttgctgtaaataatgtaaattcaagggaatttggttttagtccaaggtcaccagtaaaaatgatggatggattgaagagcccacctcatcctttacctcttcctccaggtcctgctacttgttcacctcttcccccatctcccactgcttactcgcctcaccctctaggtcccactacttgcttgcaatccgaatcacaatggaaaaaaggcaaattgttagggagcggtacatttggccaggtttaccttggatttaacagtgaaaatgggcagttctgtgcgattaaggaggtccaagttatttcggatgatccacattcaaaagaacgactcaagcaattgaatcaggaaatagatatgcttaggcaactttcgcacccaaacattgtgcagtactatggaagtgagatgactgatgatgcactttcaatttatctggagtttgtttctgggggctcaattcataaattacttagagagtatggtccttttaaggaacctgtgatccgtaattacactggacaaattctctctggtcttgcctacttgcatgggaggaacactgtccacagagatattaaaggtgctaacatacttgtcggccctaatggtgaagtcaaacttgctgactttggcatggctaagcatatatcatcttttgctgaaatacgctctttcaaaggaagtccttactggatggctcctgaggttataatgaacggtagaggttaccatctaccagttgacatttggagtttgggatgtactattattgaaatggcaacggcaaaacctccttggcataaatacgagggggtagctgctatatttaagatcgcaaacagtaaagagatacctgaaatcccagacagcttttctgaggaaggaaaaagcttcttgcagatgtgcttaaaacgtgatcctgcatctcgcttcactgcaactcagttgatggatcacccttttgttcaggaccatccagcagtaagagctgcgaaatctggtgcactgagaaatgcgtttgcaccagcagatgggacgcatacaacgtccaacagggagttctcaaggaaaagtatcactcccctaaaggatataggagtgagtgcaagagattttaccggattttccacagccgttccttcaccacacaccgccagtcctatttccgttgtgagaacaaacatgtctctaccggtgtccccatgctcaagcccattgcggcagtttaagcaatccaactggagctgcctgccatccccaccacacccaacattttccaatggtgctacttcctataatctatcaagctacatgatgaacgagacaagacgaattcccacgatttcggatacctggcaggatatcagccagttgaaggtccaaagcccctacggctccccaaagaggttctgagcgtcagtcatccatgagtgctgatgaatgttcagcaggagaattgttcccatgacatcgtagatatataatgttagagatgtcagcaacatgtcgtaactctgttactacaccgatctgattttactgtacagtatagaaaggctccacgaggaaagaggctgttgacaagagaggaatttctgtatatctgtaggcggttgtcgcctccactttgtattatgctgtactatatcagtacataaaaatacggcctgtaaattcgctagcttggagaagctgacgtttggatgatgtagttagtttagcgcttccctagcagatgtaaggatttctcc

SEQ ID NO: 18323 - DNA, 2219 bp, Oryza sativa
  ref <308>: DATABASE ACCESSION NUMBER: AK068726
  ref <309>: DATABASE ENTRY DATE: 2001-12-06
gtaacgcgacccaaccaaaaacccctcctcctctcgccgcggcctccatcgccatggccgccgggcgggccttcctccgcgccgccccctcctcgctggccgccggcgccggacgcttcgccttcgcgtgcccgacggcccttcccctcactgccgccgccgcggcggcgaccgggccacaccgtcgcggccgcggccgatgctactgctccgcctccgatgcgccgccgccgccgccatacgtgctcaccacgccgctctactacgtcaacgccccgccgcacatggggagcgcctacaccaccattgccgccgacgccatcgcccgcttccagaggttgctggataagagggtcgtatttattaccggaacagatgagcatggcgagaaaattgccacttcagcagaggcttgtggtagaaacccaaaggatcattgtgatacaatttccaattcatataagatgctttgggctgatctagacatagagtatgacaagtttatccgcacaactgatcgtaagcatgaggcagttgtcaatgacttctattccagagtgctagatagtggtgacatatatagagcagattatgaaggactttactgtgtgagctgtgaggagtacaaggacgaaaaagagcttggggaaaacaaatgttgcccagtgcatctaaagccttgtgtaccaagaaaggaagacaactatttctttgccttgtcaaaataccagcatcaactggaagatctactgacaaaaaatcctaattttgtacggccatcacatcgcttgaatgaggtccaaggatgggttaaaagtggattaagggacttctctatttcccgtgcatctgtagagtggggtattccggtgccaaatgacaccaaacagacaatatacgtgtggtttgatgcattattagggtacatttcagcattactagatgatggggagaaggcaagtttacaacaagcagttgaacgtggttggcctgcctccctacacttgataggaaaggacatattgcggtttcatgcagtatattggccagcaatgttaatgtcagcaggaataagtgttcctgatgcagtttttggtcatggatttttgacaaaggatggcatgaagatgggaaaatcattaggcaacacacttgaaccaaaggatctggtaaacagatttggagtagactctgttaggtacttcttcttgcgggaagtggaatttggcaatgacggggactattcagaggaacgctttatcaatatagtcaatgcgcatcttgccaacaccattggaaacctcctcaatcgcacacttgggctgctaaagaagaattgtaaatccacattagcttttgactcgattgctgccgcagatggaatttcattaaaggataatgttgaaaacttggtggacaaggcaaaggatcagtttgaaaatcttttgctgtcatcagcatgtgaaactcttatggagattggtaacttaggaaacttgtacattgatgagcaagcaccatggtcttgtttcaagcaagggggtgagagtgctgaaaaggcagcgaaggatcttgttattattttggagactatgagaataattgcaattgcactatcaccgatcaccccaagcctttctttgaggatttatacacagcttggtttcacagaagaccaatttagaacattgagatgggaggataccaaatggggaggtctaaaggcaggtcaggtaatgatggagccaaagccagtttttgcaaggatagaaacagagacggacgagaaagatcaatcaagttcgaaggcaacaaaaggcgggaagaagaaggcaagaagtcaaggacttgtggaagcatgagtcaagtttgtgatggtgtacatagcataaaactacctgcgaccttgtcgcttggtgacaaagaaggcctgaagcattttcttggggcgaattggtttctgcaattttgttctaacactggctttccaattccaagtagtacatactgatactgatagctgagttaattccccactcccgcaatgttttattccagtgaacgcagctattgcttctgtttgttattggaataatggagcatcctgagctcatccatctttatcgaatttagattaaatcttttgtacgattcctaacatgacatttatggaattgggagcaccctatttaagagggaaaagatgcatttgatggagc

SEQ ID NO: 18324 - DNA, 2619 bp, Oryza sativa
  ref <308>: DATABASE ACCESSION NUMBER: AK068727
  ref <309>: DATABASE ENTRY DATE: 2001-12-06
tggcgggttcctctcgtcggggatcaacatcgagcgcgcgcgcgaggagtgccgcggcatcggcgccagggacttgacccccggcgcgccgtcgccgtccggctccgggctggaaatggacatacccttctccggcagctgcaagcgggtgttcgaggtcgccgtggagttctcccggaacatgggctgcagcttcatctccccggagcacctcgccctcgcgctcttcaccctcgacgatcccaccaccaacagcctcctcaggagcttgggagcggatccgagtcaactagcatcagtagcgcttacccgactccaagcggagcttgcgaaagattgcagagaacctgcaggagcatcatctttcaaagtacccaagaaatctcctgctggagctggaagatctgccttctcgaaatctttaaattcaaagaaagaaaagggtgcgcttgatcaattttgtttagatctgaccacacaagctagtggcgggtttattgatcctatcattggccgtgaggaggagattgaaagagtagttcagataatatgccgacggacaaagaacaatcctattcttttgggtgaggcaggtgttggcaaaactgcaatcgctgaagggttggctcttcgaattgcaaatggagatgtccccatttaccttgtggcaaagcgtataatgtcattggacgttggcctacttattgctggtgcaaaagaaagaggtgaactggagtccagggttactagtttaattcgtgaagtccgggaagcaggggatgttattcttttcattgatgaggttcacaatcttattggatctggcactgttggaaagggtaagggtgctggccttgacattggcaacttgctgaagcccccacttgctagaggtgaattgcagtgcattgcagctacaactctagatgaacacagaatgcattttgagaaggataaggctttggctcgccgcttccagccagtattagtagaggagcctagtcaggatgatgctgtgaagatattacttggtcttcgtgaaaaatatgaaacatatcacaaatgcaaatttaccttagaagccatcaatgcagcagtttatctgtcagcaagatatattcctgacaggcagctccctgacaaggccatcgatctgattgatgaagctggcagtagagctcgaatggaatcatttaataggaagaaagaagggcagtcttcaatcctcttaaagtcgccagatgaatactggcaagagataagagctgctcaaaacatgcatgaagtggtgtcatcaaaccagatgaagtattcccctcgtcaagagaatggcagtgctgccattaaagcaccaagcgaggacatgaatgagttgacatctgaactccaagttgaggaaccaattgtagttggaacagaggaaattgcaagagttgcctcattgtggtcagggataccagtccagcagttaactgctgatgatagaaagcttctcgtaggactagatggtgaactcagaaagcgtgtgattggtcaagatgatgctgttatggcaatatctagagcggtgaagagatcacgtgttggcctcaatgatcctgacagacctattgccactctacttttctgtggtccgacaggagttggtaaaactgagcttactaaagctctagcagctagttattttggatcggaatctgctatgcttagattagacatgagcgagtatatggagaggcacactgtgagcaagctcataggctctcctccagggtacatcggatatggtgaaactggtactctgacagaagctgtcaggagaaagccatttactgtagtattacttgatgagatagagaaagctcaccctgatattttcaacattcttctccaaatttttgaagatgggcatctgtcggactcacagggccgcagagtgtccttcaagaacacattgattgtcatgacatcaaatattggttctacatcaatttcaaagggaagacgaagcatgggtttcatgacagaagatactgaatcaagctcatatgttgcaatgaaatctctagtaatggaagagttgaaggcatttttccgtccagaattgctcaacagaatcgatgagatggttgtattccgtcccttagagaaaactcagatgctagcaattcttgatatcatcctacaagaagtgaagggtaggctgttagcccttggaataggcctcgaggtgtccgatgcaatgaaggacctgatttgcgaagaaggctatgacaagagctacggtgcgcggccactgaggagagccgtcacccacctgattgaggatgtgatcagcgaagcaattctatttggcgaatacaagcctggggacacgatactgatggatattgatgccggggggaaactttgcatgagccacctgaatgagaaggttgtccagttgtctgatccgacacggacattctgaagttctgcatactgcttagtacattagagatctaatttttcattctttcgagattactaattctttttttaggtagacacggaatatatttcattatgtacataacagttaagggattcgttcgggcatataaatgtcttaaaacttgt

SEQ ID NO: 18325 - DNA, 3342 bp, Oryza sativa
  ref <308>: DATABASE ACCESSION NUMBER: AK068728
  ref <309>: DATABASE ENTRY DATE: 2001-12-06
ggcaccagattctccgccgccgccgccgggcgcgttcctctcaccgtgcgcgcgactcctcccttccccaccagcccgcgcgacgcgctcgcatcacgcatcccagccgcgccgcttctcctccaaccccctccccccggcgcttctcctccactcccccactccggcgcttctcctccccctccccctgcccctctcccttccccaggtggcaggccttcccgtgcaggtgccccaactcgccccaccgctgcccctcggtcttctcacgacgcttcctctcttgcctgtggccctcctgatctgctcgcctaccttcctctcccatcgctccataaacctgcttgtgggaaaacatccgcttcattcgtctccagtgccgtcggcctccccctcgactccattaaaatggaatgggcaccattagaggacctcatcggttggcacgcgcatactactgcctagaccctaagcacgccaaaaaacgacctgtttccctctgttgttgctttctttctattcatcaatattttgtatactaggagcctccaattatgatagaactataagatcagagatagatagccttctactgggtcgtactgctaccacctacaggctgcagcagaggttatgcctggttcccagcttcccttcacattcctgtctaaaatagttgctacataaggtactttgtccttcaagaaaatgtaaaaaccttcctggtcaaaaaaagaaaatgtaaaaaccttttctatctgaaatacatatgattcaattcgcttcatattcatctatgttcacctgatttccagaaaataatatatatgttcatcccagggtactagcttcgcaagaaatacaagaaatttcttccacaacagcacttccagatatttccagtgtaaactatctttggctaaaatttaaactgtcattagttcagtgttgacattaaaattgaggcacatattgcgccatattaatcctcctttgctataagatatccctaatttggaaacggatcctctgactttggcttggaaagtcacggtgttgcagttcgcttcatccctgccgaccactacatctaacggcacacatccatcttccctcgtttgcttgcatactgtgcgatccagttcggcccaaaatcacagcacggccggcgtggaaaaaacaggggtgcagcggtaggtagtggagggaaaaaggcagccctcgctcagttttagtgccaaagtatagaacactctgggttttgatcctttctttctgggttctaaaagaaaacgaagtaatgaagtacagggaaagcaagaagcaatcaattgaatatccatcttccaccatcggtcaatttctgctttggtgaagaaatggaagaagaggctcaaagagagcaccacgaatccaacaggtgaatagtactaatctaagttgtcattggtgatatgaggtcatggattttgagtgttgctatggacgtctaaatatcatttagaaatcaatgtaatctaactggactaatttttactctgaatctttcaaggctaagaatgatggttaggaagcagagcaaacagatattgctttgatgggcaacacaaaagattctgaggaatatagggtcattaatagttacactcaactattaacggagatcttgcttataatcctactgttttagtcacaatatccatggccttatagtgctgtccaaaactcatttgttggtttgcagtgcatgaatgatgctacttgaaagttgaaacttaggtcttattttgaattattctaaatggtttatatctgttttatgcttcagcagttcaggttctgttgaaagttgaaactttgcattcatgcatgtagtagcaggcgacagcatacaacaaagttattgtggccagatgggcgccgatggccgctgcatgctgaactgggccgcacagcatgcaagcaaaggaggaaagatggatgtgtgccattggatgcagtggtcggcagggatgaagcgaactgcaacaccgtggctttccagccaaagttagaggatccttttccccctaatttgtattcaggtctataagctatggttttgtgattgatgctttccaggtttctgttctttctgattggactacagaggatgttcttcataatggtagaataaaataaatcaattgacaaaagggagattcatcaggttagtgcaactatttatcttgagttgtatagatctttcagtccaaaaatgctacaagtgattttgtttctattggcgcacgcttatcaccaaacaaacaactgtccattaatattctcatgacaaagaaactaaagatggggagtttctggtgctctcttcacatatttataccaacagataagaatttaaataaaatagatgattttttactttccagatgacaagacatagttatttagttttaaaatcactacacactaggctatggtgcacgcaacaaatttcctcaaaacaactatgccatcttctcggcttcattttttcttcattcagatttgttcacatttattctttcaaagtttacaaattttcattgatgtttcatgcatgtgttttactaccaaataactcctccaaaagtagtgtttaattgtaatataatacttataatctccacatggcaaacattattatacctataatctccacaattaactcaatccaccattaccactcaacttatataactatcagggacacctcacttggtttctcccaacaatagcttatctttcccattcctcctatactcaacagcactatactcatccccacacatggaccatgaacaaccagccaacaggttttctctaatcctcaattagtaatgttattaccttcaattctgtgtttaggggcctcaaattatcttttatgacctttgcattattttcacatttttatacttcatagcataaactactattatttcctgtcatgaatctacccaaacctttgtatggtgatgttcatttctgttttgtccatattccacaagtgaaggcatgcaattgttcaaatgaattctcctacgatgccaacagtttctatagctgtcagtctgtcacgggcaaatccacaggcagagaccacagcaaaccgaagcttcaagacactcatgttcctactcatacatgaaaaatggattacctcacatgcagctaagtacaattgaagaggaggtaaaaaaacaaatttgtgatcaaacatcacttttgttgcttcggttaataaatttcatcgtatgaaaaatgtcattgtttgctgaatataataaaacagacatttcc

SEQ ID NO: 18326 - DNA, 2158 bp, Oryza sativa
  ref <308>: DATABASE ACCESSION NUMBER: AK068729
  ref <309>: DATABASE ENTRY DATE: 2001-12-06
gactcacttaaatagcggcggctcaaaggcgatgccattgccaccacctcgctctctccttccttctccgaccatccgctcccactccggcggccggagtccggccgggagaggtcgcactcatggctgtctagccggtgagccgctcatcggcggtcgtacgtcatcgctagctaagtagctagggggtcgaacggttgtgggtttgatggaggcagaggacgagtactcggccgggtgctccttctccctcatgtgccaggaggatagcaccgacctcgacgacgacggcggcggcggtggctgcttcgccggcgacggccgcgccgacctgctcctggtttacaatgccgccgccgccgccgacgacgaggatgaggaggaggtggaggagtacatggaccatctcgtgtccaaggagagcagcttctgctcctcttcttcttctacgtcgtcgtcgtcgtgctgcttctccgacgccggcggcgagtcggcggcggcggcggcgccgatggactggttcgcactcgcgcggcgcgccaccgtgaagtggatcctcgagacgcgagggtgcttcggattctgccaccgcacggcgtacctggccatcgcctacttcgaccgtttctgcctccggcgatgcatcgacaggtcggtgatgccgtgggcggcgcggctgctggcggtggcgtgcgtgtcgctggcggcgaagatggaggagtaccgggcgccggcgctgtcggagttccgcgccggcgtcggcgacgacggctacgagttcagctgcgtctgcatccgccgcatggagctgctcgtgctctccacgctcgactggcgcatggccgccgtcacgccgttcgactacctcccctgcctctcctccaggctccggcgacacgtcggcggcggcggcggcgcgggcgcgtccgccgccctcatcttctccgccgccgaagcggcgagcgtgctcgaccaccggccgtccacggtggccgccgccgcggtgctcgcggcgacacacggcgcgctgacgagggaggcattggagtccaagatgagcggcctctccccatctttcctcctcgacaaggaggacgtgttcgcgtgctacagcgcgatgctgagccagccaacttcaccggcgagcaagtcgacgacgacgacgaccggctagagatcgtcgtcgtcgtcgtgctccgagtccaccgacgccgcgagttcatacgacgccaccgccgcctccttcccggcggcggcgagctgtggcagcaagaggatgaggctggagctgccgggaggcatcctccgatgagcggcggcggcggccgggacacgcatggtttttgtccgtcgtctcgagcacgtcatcaccatttctcttccaatttccttacaaatttttttcacttctttgatcgatgcaacagcatttgccaaacaatttgttcttggcagtgcgctcgctgatcgatcccggattggattggcttggttaaattaatcccagcagcacgcgagatcgagaggatcaaacaaacaaaaacaccaaaaaaaacacaaaggatatcaagatcgatggagcttgatcgagcttctcctaaggagaggagaaaactcaaactgctcgtgtgagacagtgacagagtgagtgagagtgagagtgtatcactgtacacaaggatggaagaaaaaaaaaacactttagcctgcacattgcactcacactgcacttcccgggaaggagtcaagaagaagagagagaagctgaagaacagtgctactaggaacagtagctgcagataaaaacgatgggagtaatgtctaatccgtctgccagttcaatgcaagcgaaggagagagcaaagaaagctgttgctgcagcagctgcaagtaccatggtccatggccttaactctgatttgatcaaaagccttctcctgctcaaagtgagtgtgtgtgtgtgtgcgcgcgcatgttgctactatggcggcgccggtgcatggctgccaaatgcatgtggctgctacactggttgcctgtaacctgtagtagtgagctactgccattgttgtagcctttgcaactttgcattgtattttcttgagtgtgtgtgagagagatggataattcagacagagtttgtagggttcttggttgc

SEQ ID NO: 18327 - DNA, 2292 bp, Oryza sativa
  ref <308>: DATABASE ACCESSION NUMBER: AK068730
  ref <309>: DATABASE ENTRY DATE: 2001-12-06
gtgtgctccagttcctgtcgggagagagatggggaaaaggggtgggtagatagatattaggtaaagggactcggtagagagagttggctgctaacatataagacccatgtgggtctcacgctgactcaaccagattgataatagtcaactcgtcacattagttaaaactggatgttatactatcatgtgacctcggttacaccgattttgcaaattggttgaaggacacaatctaaactcatagtcaataagagagacctaaagtgaacttattataatgaatattgactattgagttggcccagcagcccaccatgttcataagaataaggtccatgacaactgctgctcacctactctccgcctctcccagtctcctgttcgttcctctctcccaagtctagggatgaaagtggttggaaatggtcggaaacggcatcattattttattattttttaaaaaacaagcagaaacggtcgaaaaattttcatattcatgaattcatctatttagtgtcaacttcaatgccacgccgatagaaattaaaaaaactaaattttaaaaacgataaccatcgataaaaatattattattatattagtttttcggaaacggtatcggtacggtcggaaaatttccataccgttttcacccccagccaagtcccaacaacgttccgaggtcacagcgctcgtccgggcgtccatcgctgccaatttcaggcccgttgttttggcgcccgaatccccctcccgcatttttccccttcagaaaaccccgcgcgcgcggccttctcgattcctgcccgtccgatccgccctcacagcctcaccgcctcatctccgccgtcaattggccctaaccccaccgaccacccgcggccctcgtcttcctcctcgccgcgccccctttcacaacggagccgggcgctgtccccccctccgcgctgcaccgcaaaccagccgccgcctcccgtcaagaccgtccttcgccgctgcagccgtgagggcatccctccccctccccgccgagcgagctacaccggcctctttccccccctgccccgtgctggacgccaccgccgcgtccgtttcttcactctccgtctttccaagcagcatgacgagaggcgagaaggggatgcagcccaagatcagtgcgttcttcaagcgtcaggcccccgagcccgagacgagcagtggcggtgacacgcatagggaaggaacctgcgggacggaggtgaagaggcccaagagctgtgcggatggcaaggtcctcaacaagaagaggaactacgcgcagttccacctggagcttgggcagcccgattttctcctccacatgtgctcggtttgtggcatgatgtatgcccgcgggaacgacgacgatgagaaggctcacaaggcataccacaagagttacttcgagggtgtcccgttcaagggttggcgcaatgaaaccgtggtcgcgaggtctgaaggtggggatcggataattcttgtgactgatgaaaattcatgtgctcggaacagcaaggtccaggaggtgatcaaagtggtacagaaggagctggggtttggtgaaggtcagctccttcacaagctttgtaaggtatatttgttcatatctagtcagaggatagtgggatgccttgttgtggaaccaatcaaaacagcacataaagtgattccaggctccacagaggaaaacggcagtgatctgcctgttgataaaattgaaccagtcaaaacaaaccatacattagcgttcgggaaaatcagttttaagagggaagtcctgaaacggcatgatcattcagacaagaacaaagaagagtaccgagatcctggtgctataatatgtgaaaaggaagatgttcctgcacattgtggatttcgagcaatttgggttgtaccgtcacgcagaagaaagcgaatagggtcacaactgatggatgctgctagaaaaagcttccttgaaggcgagactttgtgcatctcacagtgcgctttctcaccgcctacttcctccgggaaggcgctggcacgcagctattgcaagaccagcgcattcttagtctacaaggagcaagatgcataggagatgctgcagaagatgttacatatctgaaacttctcttcccattgtaaaaattgttttgctggggatatatgtgaaacataaacaggcatgttctgtttttagtgtaagtctaagcaccagaagcagtgcgtttttgcaggatctctatgtattgacactttggatttcctgatcagcagcattttctg

SEQ ID NO: 18328 - DNA, 1237 bp, Oryza sativa
  ref <308>: DATABASE ACCESSION NUMBER: AK068731
  ref <309>: DATABASE ENTRY DATE: 2001-12-06
ttttcggcttcttggagcgagcgagcgagcgagagagagagagagagacccacctcaccttctcctcctgtcctcttcctcaccctggtcccgctcaagctgagcctttcccagtgcaagattcaatctgctgctgctgttcttgagatttgcccggctcggatttcttgcgtgcagtttctttgttgatctggttggttcagattgatttgctgcaagtgcaaacctgttcttgggggggtttgatttgatgtggtgtgttcttggctccgattcggccgcggctcccggtgaagaaatccccaagtttgatgaggctctcgcactgtgagagctactgcggccctcccctgtgctacatcccctgcctccccaaatccaaagatgcagccggcgacgccgcccacaaatccaaggatgcagccgccgccgacgctgtcccggtggccgccgcggaggacaagccgccgccggttcagaagattgaggcggcggtagcggagaaggacggtgacgacagcaaggaggtcgacggcgacgaggaggaggaggaggatgatgatgatgtgaagacggcggtggcggtggcggcgccgcctccggctccgctgaagagtaacctgaagaaggccgactgcgccgacagcaagtgcgccgagaaaggcaatgtgaagtggctggatttgctggggaaggatctcaccgaggtcaaggaattcgagccaagtgaatcaggagattccatggatgaagatgacatcgcggaatgcgtttgcgctatccaatgatccagaagggtttcctccccaacgttgctgtaaattgtaaaatgggagtttcgcacgtaatcatcgatctttctttcctctcactggagggtcaggttgttttgttgacccccttcatgagttccactgaagctccccagcatccggtgctcagttccatcagtacatgccgccgccatagctgcctagctgtagatgtttctgccttgtgttgatcagattatgtgttgtttggggttggtattggttgctgaggagtgatacatttttcacaatgcctggtggtgtagccaagattattgcttctgtaaagtttacaatataaagttattgagagtggaaacagatcctgccatcctgtgcccactttgacaaaaaagcatatgtaaagcttattgatttgaagctgtcaactgaaaaagtaagagaacttggttggtgttagtatc

SEQ ID NO: 18329 - DNA, 1745 bp, Oryza sativa
  ref <308>: DATABASE ACCESSION NUMBER: AK068732
  ref <309>: DATABASE ENTRY DATE: 2001-12-06
gaacctccaacaaagagaaaacaaggacccatcgtcgcctcgcctaatcatcatcctttccgatgcctcgcaccgccgccgccgccgccgccgcgccgccgccgctgctgctgctctccgccgcagccgccatcgccatcgccatcgccgtcgccgtcgcggcccccgacggccacctagtcgccagcctcccgggcttccatggcgccttcccctccaagcactactccgggtacgtgacggtggacgaggggagcgggaggcggctgttctactacctggtgacgtcggagcgcgacgcggcggccgaccccgtcgtgctctggctcaacggcggcccgggatgctccagcctcgacggcttcgtctacgagaacggccccttcaatttcgagcgtggcagcgatccgggtggcctcccaaatctggagctcaacccctacagctggtccaaggtttccaacgtggtgtacctcgactcccctgctggtgttgggatgtcgtactcgttgaataaatcagattacacgacaggtgacctaaaaacagcggctgatgcacacaccttccttctgaagtggtttgagttataccctgagttccagtcaaatccgttctacatgtcgggagagtcatttgcagggatctacattccaacactagctgatgaagttgtaaaagggatagaaaaggatctgaagccaagaatcaattttaagggatatctaattggcaatggagcaactgatcaggactatgatttcaattcgtttgtgccgtttgcacatgggatgggtctcatctcaaccgaattgtttgaggatgcaagtactgcatgccatggtacattttggggcaaagttaataatctgtgccaagaaaagatagacagagtgcattgggaactcaaggacctgaacaagtacaacatccttgctccctgctaccatcaccctgaaattcaagaattagagttcaagaacagcagcttgccatcaagttttagaaagctaggtgagacagagaagcgatttccagtgagaaagcgaatggctggccgctcttggcctctccgtgctcctgtgactcgtggacgcatgacgatgtggcctgaacttggtggtagatcactcccctgcacgagcgacgaacttgctaatgcatggctggatgatgaagatgtaagagctgccattcacgcggaaccgaaaagcttaattgggtcatgggaactgtatactgcaagaatagagtactaccataatactggagacagcatggtgaagtaccacaagaagttcacagccatgggatatcgcgcacttatttacagtggagatcatgatctctgtattccctatgtcggaacggaagcatgggttagatccatgggataccgagtaattgatcattggcgaccatggtactttggagggcaagtcgctggatatacacaaggttatgaacacaatctcactttcctcaccataaagggagctggacacactgtcccggagtacaagcccaaggagacgcttgcgttctatagccactggttgtccgggaagaagatttgacatcaagatcaactcgtcgtaacagttttgagcctccgaatgaaaaaaaaaaagttgtaatctgtaatctcaacaggcagacaagtgcatttgtccgtaatctgcatctagggatgtgagcagtcccagtactacccccataaaaaccttcctgataatttatttgcc

SEQ ID NO: 18330 - DNA, 1224 bp, Oryza sativa
  ref <308>: DATABASE ACCESSION NUMBER: AK068733
  ref <309>: DATABASE ENTRY DATE: 2001-12-06
gagtcacagtcgcggagtcggtagcatcggggcgaggacttggaggcgacaatggcgtgctctctcctgccgccgctcgctcccgtttcccctccgcctcgtctcctcctcccctcctcccgctcggctctgctccctcgcggtcctagggttgcgccccgagtccccgtttccccaccgcgcgcgctgccggacaccgctgtgggggcggcggaggcgctccgtggcgcgctcgccgacgccttcctggcgtcgcctccgacgtggaggtcggccgccgtgagcaacctcgccatcttcgtcgccggctccccggtgctcctgtctggcctctccgcctccggtttcgccgccgcgtacctcctcggcaccctcacgtggcgcgccttcgggcccaaggggctcgtcctcgtcgcctcctacttcgtattgggcacagcagcaactaagttgaaaataaagcagaaagaagctttgggggtggcggagaaaagaggaggaaggagagggactggaagtgttattggttccagtgctgctggttgtgtctgtgctctgctatcaatctacaatgtaggcagtgcagcgttggctgagctctggagacttggcttcgttgctagttattgtactaaactaagtgacacagtttccagtgaaatagggaaggcctacggaagaacaacgtacctggtgacaacacttaaggttgttccgcgaggtacagaaggtgcgatcagtattgagggtactctagctggaattcttgcatcgataattcttgcaagtgttggttatctcctggggcaggttaatgtatcacaaggcgcagtatgtgtccttgcatcccagattgcaaatttttgtgagagttatattggtgccacactacaagataaagaaggttttgaatggctcaccaatgatgttgtcaatgtactaaatatctcaactggtggtatattggctgttctgatgcagcagttgctagtaagttggcgctcttgaatacttttttatgacttcttttgttcagcctccgttattataacttattatggagaaatgactggttgatggcaatgttcttacatgctgctgccatgtgaaatggaagtataaattccggtcttagagatcatatttgagcggataaacatttgtggatgtagttatctgtgtcaatccttctggtatatccatagttcggtttcttgtactgct

SEQ ID NO: 18331 - DNA, 2429 bp, Oryza sativa
  ref <308>: DATABASE ACCESSION NUMBER: AK068734
  ref <309>: DATABASE ENTRY DATE: 2001-12-06
ggcgtggtgagagttcatcacgcaagaaaaaggttttgccggaggctggaaagaaggagattatggatggggaaggttctgtgccaagtataggggcaacagaagatacattaagtaaaacaaagaagtcgaagaaccagaactgtgcagcaaagaagaacagaaacacctcaaaagatgcagatgggcttgatatggatgacaaaggttctgtgccaagtaaaggggcaacagttgatacatcgagacaaataaagaagtcaaagaaccagaacagtgcagtaaataagaataaaaacacctcaaaagatgcagatgggcttgatatggatggcgaaggttctgtgccaagtaaaggggcaacagatgatgcatcgagtaaaacaaagaagtcaaagaaccagaacaattcagcaaagaagaacaaaaacacctcaaagatgcagatgggcttgatatggatgacaaaggttctgtgccaaggaaaggggcaactgatgatacatcgattaaaacaaagaagtcaaagaacaagaacagatcagcaaagaagaacaaaaacacctcaaaagatgcagatgggcttgaaacagttggtgcaagcaaaaaactgtccaagaaggctgtggatgaaaccttgagtgacagcaaatcagcacgcagaacaagatcaacacgcatgaagggaggcaccccggtagccttgaaaggcaggggaaaggatagtggtgctgaatccttaaaggtggaagagaagaatactgctttgctcaaggagaataaggtggggcgtagagctggctctgcacgcaagaagtataaaaccacaggggatggggacggacttgaagatggcaatgccaatgtttctgtttcttctggcaagaggtcaacgcgtggtgaaacctcggtagtttcagaagcgcgaatctcagagcagggtaggaagaagaagaaactttctgaacttatggcagtgacagatgtgcctaatccttcttctggtggtaaaagcaaggctcgaggcaagcgttctatggatgcatcaactgagaaacttgaggatcctgatcgtgatttggaggatacaatgaagactaggaaaagaaagaaacttgacacattgggggatttgtcttcccagccacagcctgtctcccgcaagagcactacaaaggttggagaattgatgcacaaagctgctggacaaatgtcacagacacgacccgttcgcaaagctaatggcgcagtatctcagaagaattctcgtagcactaaagaaagacaagtaaatgctccagacaagtctgcacattctctgaaggtgaaaaagggcaagactgataccttgacagaaaattccctgtcttgttctgaaatgctgtcacagctctccctagcagtatttaatcttaagaaaaaggagagattttccagtgcaggcatgaacttctttactgatttcaggaagtactcgtatgcttctaggtctgatgttgagaaggagatatatgggaaggcaactaacactggatcctgtgcttcattttctgatgttgatgaggatattcctgagaaagctgccggcactgagcccactcctttggaacagcccttggctgatcatatgcaggatgattattgggctgacattctgattaatgtggaggaaccactgtctagtctcagaaaaaagaaagataagggtgtgaacagaacaagaaagaaggaacatgttaaaaaacctgccatgaaatcatcatcactgggaaatatagagggaccaactgttgaaggttcagagaacaagcaaccgaatgcagaaacacaactgagtgttgcaaatggaactaaagtaagttctgaagaaacggaaagttcctcatttgctggactagtgctgcacttcagcaggccaggtgctgttccgtcacgcagtgaccttatcaaaatctttagccaatatggacccgtcaatgaagccaaggcagagactgcaaacaatgctaactgcgctctctgatcttcaagaggcgcatggatgctgaggcagcatttgcaggcgcagggaaaatcggtgctcttggaccagctcttgttagctttcgcctctccgacttcccagccgctgcctcaggaaatgatcctcggcagggtgcatcgaagagtgactagagagtgtttacccacctgttgaacctgttgatactcggtgaggtgaaggagctgagttagtcagaaaaatgtctgttaggtggtagattgttacaggattaagcattcataggaacaaaaggttgtgcatttgtcatgtaaacatgtgattgttaagctgtccgcaggtcagatcagtgaccaataaaataggctggctctgtaagaacatgttgtaagctgatctatacctaaaaagttgagcttaatttgcc

SEQ ID NO: 18332 - DNA, 1210 bp, Oryza sativa
  ref <308>: DATABASE ACCESSION NUMBER: AK068735
  ref <309>: DATABASE ENTRY DATE: 2001-12-06
tggccactcaaagagcaagaaaagccacgaagctccgggcgaagccgagacgagccggagcagcagcaccccgcccgtcgcgcgcaatggcgatccccaaggtggacctgcgagggctcgagccggggacgccggggtgggaggcggcccgggccgcggtgaccgcgtccatggtgtcgcacggctgcgtcgtggtcgcgcacggcgcgctcgggccggagctccgggaggcgctcttctcccgcgccgcgcgcgagctgttcgcgctcccggcggaggccaagcggcggaacgtctccacggtggggccttacaggggctacatcaccaacacccccgggatgaactgggagagcctccacgtcggcgccgccgccgacgccggccgcgtcccggagttcgccggcctcctctggcctgatggcaaccccgagttctgtgacacgatcgtgtcgttcgccaagaagatgacggagctcgagcgggcggtggagaggatgaccctggagggcctcggcgtcggggaggaccacatcgcctcgcacctcgacgcgcacgacgacgccgtccgcttgtcccgctacggcccgccgccggacgccgcgagcgccatgtccatgggggagcaccgggacgacaccgtgatcaccatcatcgtgcagcacgaggtggagggcctcgaggtgcaggccagcgacggcagctggcacacgatcccccctgagccggacacggtcgccttcatggccggtgagctgttcacggtggtgacgaacgggcgggtgcccgcgtgcgtgcaccgcgtgaggacgccgagccaccgcgagcggctcgtggcgctgttcaccacgcggtgcaagggcggcaccgtggtgagcgccatggacgagctcgtcgacggcgaccacccgctggcgtacaggccgtgcaacgaggacgagtacgtccagttccgccactcggaggagggcggcagattcagcgaaccgctcaaggcgttctgcggagtagacgtacgctagctgcacaatgatccactgaagatgatccttggattggaagtatgagtggtagtacctatcatcttcagttagtgctggttactcgtctttatgggttgtttgaatgtttgttctcttacgtttctgaaaaattcaacggcttcatatattaaaaaaacgaaggaagtatcatataaaatctttcgagc

SEQ ID NO: 18333 - DNA, 2978 bp, Oryza sativa
  ref <308>: DATABASE ACCESSION NUMBER: AK068736
  ref <309>: DATABASE ENTRY DATE: 2001-12-06
gatggattccaactctcaacctgacgttcgcttcgtccacgtaactgagctctttgcctttcctgctaccctccagccgcctcctaaaagaagccatgaccacaaatgaaatatttggtgagcaacctgggtaactaccattagcattttttttttgttggcaagccgttttgtactaaaccatgccctactgggcttgtttgggtccttttgaactcttttctttcctcttaatataatgatgtgcagttcttcttttgcgcgttcgagaaaaataaatgttaactgaaattaccttcctggagtttatcttgcaaaatgcttaataggatgagacatttaggtgccagcaggagtggaggactgagaaaaccagtggcttgattcctcgatgcacagctcaaggcctgcgttctgcaagtgggaacataacatcagaagggggaggcgtgattgacataaaatctttggtgcgaattacaggaataaaatgggattccgcgggcccctgttggtcaagaataaatgtagtaggcctttgccttatctatctctgctttctgcgtccgctttatgtagagtccatcagctccgcaggcatattcctgtcatgataagaagattaggacgttgtattacacaaatcatattctgtcagaaagcaaggaagacagagcggcagacatttcaaaaggcaaatgcacccccctaggagtattcgtaagaagctgcattctgacctatttgtcagagatcatattccatcaggaaaactagtaaaatagagatgtacagagtacaataaacttctatagaaagtttattagcagaatatgcgtactgtcaacagcccttaagtgaaattctgagtttcgtgtgaaagtttgaatcttgagaacagctgacaagtgagtttagatgttcagttccgcaatatgagtgattgtgtgtcaagcaacttataaaatgattctagaaggcctactgcccttggaatgtgacttggactggtgttttaggtagtagcttgaactcgggggggtgagatcatagaactacagagacacagaaaagggtaaatattttggacaaaaaaaatagcagactgattttatattataattgactgcaccacctattatgcatattaaaataaaagaaaattggattttcaaattttgttacaatagagcagatattgtgacagttcaaaacatgccaaaatgtttgttccgaaagaaggctgttttagtctttgagcaaaatctcgcttgatagataaagaacaggactaatatgtttagaactttagatagacatacttggagagcagtgaataacagaatgttgtagatcaaataaagccaatttaccatcgtcatcattatctaagaacccaccctaacctataatctttgaatgacgaaaacttgattctgaattctagatgtcggcatgcactgaaataaaccacacagctgtaccactaatttgcttatcaagcatctacttgataaaagaactgctataaaggaagacaggaattattgatttggtagaagacagtgaacaagtgtcaagaaaatcctctagcacttttttattgttgcagtccaatattcccaaccaatcatgctcaagaaacctcttttgtaatttatattgagaaatgatcctcactgcaatgccatcaaatagtaggtacgctctaacttcttgttgtctacagtatggagatagaagtatagaaccttggcaagtattgccctaccagggggctgatgcttacttatcccatttgcctacaactcttactgaggaagagttacagaaagttcttgttgagaatgagaaacatgaggtgtcaatctaaaagacaagtccaaaggcaatctacttttcagcaggagcgtatcatgtctagggttgcagatatagggaataagtgagagtggtcagcagattttattcatcgatgtggaatagcaatgaacactccttatttttatgtaggctatgagagtggacataccacaatatttccagtgatggcaaccaatataatacagtacacctgcctacgccttaaagttaagattccaagtcttcaggagctaacaactcctgataccacgaatgccttcagcacttagattgtgagtatatatagggcacatacctgcactcatcagttcacccaagttcaacatttctgctcaagttagcttcttagcacagcctcttcttgctcaactcctgaagatcatcaatcttcactagccatgtcaagggacccacttgtcgtaggacatgttgttggggatatcttagacccattcaacaaatcagcatcactcaaggtcctatacaacaacaaggaattaacaaatgggtctgagctcaaaccgtcacaggtagcaaatgaaccaaggattgaaattgctggccgcgacataaggaacctttacactctggtgatggtggatcctgactcgccaagtccaagcaacccaacaaaaagagaataccttcattggttggtgacagacattccagaatcggcaaatgctagttatggaaatgaagttgtcagttatgaaagcccaaaaccaactgcagggatacatcgttttgtctttatattatttcgccaatatgtacaacagactatttatgcaccaggatggagaccaaatttcaatacaagagatttttccgcactgtataatcttggacctcctgtggcagcagtgttcttcaattgccagagggagaacggatgtggaggcagacggtacattagataaaagtcaggatcattcatagccctctacaagaagaggtgatattcatgtgagaagatgaatggggtcaggcacatcgcaacgtgctggtcaatggtggaccttttaatgtatcttcatttaagaactactacctttgatacgtatccaggcactaaacaaggtgctttacgg

SEQ ID NO: 18334 - DNA, 1829 bp, Oryza sativa
  ref <308>: DATABASE ACCESSION NUMBER: AK068737
  ref <309>: DATABASE ENTRY DATE: 2001-12-06
ggcaagaggaggaggccgcggctagcgagcgagcgagagagaggggagaagaagaggtgggacagccgggagatccatccctgtggagaggagggagggaggaaggaggcgttggaggaggagaggttgaccgatagatccattgcggagttgagtgttgatgcaaagctgattcgccatcgtttagctttttataagagatgggttcagtaggggttgcgccgtctgggttaaagaacagcagtagcaccagcatgggtgctgagaagttgcctgatcagatgcatgatctgaagataagggacgataaggaagttgaagcgactattattaacggcaagggaacagaaaccggccacataattgtcacaactactggtggcagaaatggtcagccgaaacagacagttagctacatggctgagcgtattgtagggcaaggttcatttgggattgtcttccaggcaaaatgtctggagacaggtgagacagttgctatcaagaaggttcttcaggataagcgctacaagaaccgtgagcttcagaccatgcgccttcttgaccacccaaatgttgtagctctgaagcactgtttcttctctacaactgagaaggatgaactgtatctaaacttggttcttgagtatgtgcctgaaactgttcatcgtgttgtgaagcattacaacaagatgaaccagcgtatgccacttatctatgtgaagctgtatatgtaccagatttgtagggcattagcttacatccataatagcatcggagtttgccacagagatatcaagccacagaatcttctggtaaacccacatacccatcaactcaagctatgtgactttgggagtgcaaaagttctggtcaagggagaaccgaacatatcgtacatttgctcccgatactatagggctccggagctcatatttggtgccaccgaatacactacagctattgacatctggtctgctggatgtgttcttgctgaacttatgttagggcagcctctgtttcctagtgaaagtggtgtagaccaacttgtggaaatcatcaaggtccttggaacacctacaagggaggaaattaaatgcatgaatccaaaccataccgagttcaagtttccacagattaaagcacacccatggcacaaggtattccataaaaggttgcctccagaagctgttgatcttgtctctaggctgctccagtactcacccaacctaagatgcactgctgtggaagcacttgttcacccattctttgatgagcttcgagaccctaatgctcgccttccgaatggccgctttttgcctcctctcttcaacttcaagcctcatgaactgaaaggaatcccatcagatattatggcgaaattgatcccagaacatgtgaagaagcaatgctcctatgcaggagtatgagacagcttccgcacgacccccctggaaatttccatgacaagtgcccatttcctcccccctggacgacgatggatcgtcagcatatgcgtgcatgatggttggtgaagatgtgaagttacgttgttgttgtatgaccaccttgttgaccagtgtagttgagtagcagtatgttgcgatggcgaaactttgacatgtaaccggtgcacccacaccatccctcccctactaaccctcacccacctgagaattgagaattcccatagctgatgatctgtaatatgttctagagcagtttaagaatgtatttattatggtgtagttgatccatatgttgggatcctcctcgtcgattttcttggttctttgtgccctagactgctacctggtttttagactgttccg

SEQ ID NO: 18335 - DNA, 2123 bp, Oryza sativa
  ref <308>: DATABASE ACCESSION NUMBER: AK068738
  ref <309>: DATABASE ENTRY DATE: 2001-12-06
ggcgcggacgaaaaatcgcgccgctctccggcgcaaaactgcagcgaggcgagctcgccctcgcctccggctactccgagccgcgccgcaatggccgccgcgccggtggcctccccattcccggcgcttccctcctcctcctcctccaccaccatcgcggcctccaccgccgcgcgccggtgccacgacgcgctgctcccaccgccagccgccgcggggcgcgagccggctcgcaccaggggatcctcctcctccttggctggcgccgcgggggagaggaggaggcggcgaggcgaggaggatggcggcgaggtcgaggccgaggcggagcggcggcgaaaggaggaagtgaaccgtaagatcgcgtcccggaaggcgctctccgtcatcctccgccgcgaggccaccaaggccgtcctcgacaagcgcaagcccggcaagggcacccgccgcctcctcccccgcaccgtcctcgaggccctccacgagcgcatcaccgccctccgctgggactccgccctcaaggtgttcgatctaatgcgcgaccaggtgtggtacaggccgtacgtcgggatatacgtcaagctgatcaccatgctgggcaagtgcaagcagccggagagggcgcacgagctgttccaggccatggtggacgaaggctgcgctcccaacctcgagtcctacacggccctcgtctccgcgtacagcaggagtggccgcttcgacagggccttctccttgctcgagcagatgaaggccacccctggttgccgacctgatgtgcagacctactccattctcatcaagtcatgcttgcacgcctatgattttgagcgggtcaagtatttgatggaagatatggcgcgggcgggtatccgtcccaatgtcgtgacttataacacattaattgatgcctatgggaaagcaggaaggtttgctgagatggaatcaactcttctggagatgctgactgaaaattgcaagcctgatgtatggacaatgaattctactctcagagctttcggtggcagtggtcaaattgaaactatggaaagctgttatgagaagttccaggcctccggtatctccccaaacattaagacttacaatattttacttgattcctatggtaaagctaaaatgtatgagaagatgggagctgtgatggaatacatgcagaagtattactattcttggacaatagtcacatacaatgtagttattgatgcatttggaagggctggggaccttgaacagatggaatatatttttagattgatgaaatctgagcgtataaagcccaactgtgttacactctgctcgttggttcgagcatatggaagggctggggatgttaagaaaataaagacagtgttgagaatcgttgagaattctgacataacgttggatattgtgttcttcaactgtttggtggacgcgtttgggagggtggggtgcttggcggagatgtgggatgttcttgatataatgaaattacaacgatgcaaaccagacaaggtaacctgcactaccatgattaaatggtttctcatcaaaggaattgatgatcatcgtgttcagtacctacgggacttaaaagacgggcgatctaaagataacatataggcactaacactaagcagacaatgtcagaacttcagtttgcaagatggaacaacctgtcagaacactaagcagacaatggtgatatttgttctccgtaattttccaagaaagatggaacaacctgtaagaactccagttagcagagacacatcaatcttagcctgctctttgtaggtagcttcattgttacttattcaacatgtaatgtacacaacacaacaatgaaagtttgttttacgatcttaacaatggagctatttgactgcatctggcaaaactgcctatggttatggcatcccataaatgaattatgtcttgaggatctgagcaagattttgctatccgagcaaacggatcaggacaatgaaataaagaagaaggccttgacgaacagtgaatcttaagtgtcggtgaccaatcagttagattgtgctgtgctgttgtgacttgatgtatggatcatacagctgtacatgatattcagtattgactcgtgc

SEQ ID NO: 18336 - DNA, 1168 bp, Oryza sativa
  ref <308>: DATABASE ACCESSION NUMBER: AK068739
  ref <309>: DATABASE ENTRY DATE: 2001-12-06
ggtctccagaagtccagaggaagccaagagatgggctccgcttcgctggcgacgcagccttcgccggcggcgtgcctcccgtccctgcccgccggcggccgtctccgcctccgcctggctccaccaccccgcgctccgccgcgcctctgcaagcgcgccggcaaactccgggttgttaccatcagatcagctcatagtggtgtgagcaatgtatctgtagaaacccctcctgacaatgaggcatccgtgaccggtgctgcttacggcttcagaggagcaacaacatcgcttacgaatgagatgttaactttgtcgaagaagattactcttgtcaggcatggtttgagcacttggaatgcggaaagccgcgtacagggaagctcaaatctgtccgtgttaacagaaactggtgccaagcaggcagagaaatgtcgcgatgcccttgcgaacatgaaattcgacgtttgtttctctagtcctatctcacgggcaaagtcaactgccgaaattatatggaagggaaaggaggagcctcttatatttcttgattctttaaaagaggctcatctattcttcttagagggcatgaccaatgcggatgctaagaaggaatatccagagttgtacaccagatggcgggaggatccttcaaatttcaaggtcaatggcatatacccagttcggaagttatggggaacagcaagagaagcttggaaggaaatcttgcttactccaggagaaaatatgttggtcgttactcacaaatctattttgcgcgcactcatctgcaccgcgctaggtcttcctcctgagaggtttcgttccattgatgtgaacaatggtggcatgtgcgtcttcactgtaaacaagcgaggagaggctatgcttcaagcccttaacatgacagcacacatgtatagtgaccatacataccagtattagttatctgttcttctcttttttgggggggtgtctgcatttctgtcaagtatattagcagtttagcacaccctgattagacaaacttcattctcgatgaaatagcatggataggtcacacaaatcgaccctctctgatatagttgttgatgtgaatataaactgtttacaaggatcaactactcaactagtgatgcgctgaaaagtgaaaactgaacattttttaacc

SEQ ID NO: 18337 - DNA, 2563 bp, Oryza sativa
  ref <308>: DATABASE ACCESSION NUMBER: AK068740
  ref <309>: DATABASE ENTRY DATE: 2001-12-06
gttgcatcacagaaccttatcctgttcgctcctgaccttcgttaaaacctcacccgctgctctcccgctgcgatggcagcgcgccatggccatggcgcccctcttcgttcctcctcctcatctcctcttcctcctcccagccaccacctcatcatcccccgctgcttccctcaggcgactcctcctcccgccgctctcgtgccacgcgcgccaggtgctcgacgtaatgccccagggagaccgcgtcgccggcccgagagccgccgagggagctggcgctaaaggcgcgacggcgcaggtcggcgtggccacacgggaggccggcacggcggggcggcatgggcggggccgtcatggcggcggcgcgaggccgtggaggagaggggaggacaggcccgcgcgcggaggacaacatgccgccgacgacggggaggttcagggaacgaggaggggtggggatctcaaacaacgcagggagggcaggcgctggacgagaggcgaaacgcaagcgcgggaatctggaaaggctggaaattcggggagatgccagagtaacggtagtggtggcaatgccagcaggaaggggaagaagaaagccaagggtggtgagaacgaagtcaagctgagagtcgagctggacatgtgctcgaagaggggagacgtgattggagccatcaacctgtatgattctgcggtgaaggaagggatcaaaatggggcagcatcactacagcgtgctcctttacctgtgttcttctgcggcgcttgggtttgtgcaaccggcgaaaagtggcaatgccggtagtgggattgctagtattgggcagttacattcatcgtctactcaaagcgtgggaaatttggagggagacgatgtacaatctgaaggccactctgaagatcaggagggaaacaagaccgatttgtttgcttcggatgatgggacggagaaaccgagtcgaattccagtgagtgatgagctgagggagtatgcaagaactcgagggtttgagatatttgagaagatgcgctcggaggaagagaaagttcccatgaatgagtctgctctgactgcagtggctcgtatggcgatgtccatgggcaacggtgacatggcctttgatgttgtgaagcaaatgaaggatcaaggtattgcgccaaagttgcggtcatatggtcctgctttgacggcattctgcaatagcggcaatgttgagaaagcatttgaggtggaagcacatatgttggagtctggtgtcagacctgaagagcctgagttggagacacttctcaaggctagtgtggccgcacaacaaggagacaaggtttattatttgttgcataagttcaggactactgtcagacaagcatcttcaaccacagctaaactacttgaggattggtttcagagcccaacagcatctaaagtggggaagagaaaatgggattcaggtgctataacaaaagctattgagaacaatggtgggggttggcatgggttaggatggttaggaagggggaaatggaccatatcacactcgcacatcgacaggaatggtgcatgccttgcttgtggagaaaaattgactattatagatcttgatccaaaagaaacagaagattttgccacattggtggcaaaattagctatcaaaagagagaggagatcaaactttgataactttcagaaatggttggaaaagcatggcccttttgatgcagttgtggatggtgccaacgttggcctttttagccataagcatatttccttgagtaagattaatattgttgctgatgttatacggcaaagatttcaatcaagaaagctccctttgatagttgtgcataaccgacatctcactggagagcgcatgcaaaagccttctaatcgtaagttggtggaaaagtggaagctttctaatgctatttatgcaacccctactggctcaaatgatgattggtactggttgtatgctgctatcagatgcaaatgcttgatggttaccaatgatgaaatgagagaccacacatttcagctcttggaaagagatttcttccccaaatggaaggaaaggcatcaggtacgcttcaattttgaggacagttgtgttacacttcaaatgcctcctccttgctcagttgtaattcaggaatctgagaatggtcagtggcatatccctgttgtctctgaggaaggttcactagagaaggaccggacctggttatgtgtcacgcggcgcaactgagagccagattacaatgaagctcaagttgatctagaaacacaatgtgaataaatcactacaacatggtttgacattactgtagggacaaagttgaccattcttttctgctcaggatcaagaactgaccgtaccttgtcaaggtgccgttacataccaacaattctttcatgcttggagttccttcttctgttaaactggcctgtttcaggtgttcagtagccagaataggtgaataacacgtgcagaaaaataggcctgactgctcaacattcagctactatatatggctatacaaatatgcatttggtcttccggtcc

SEQ ID NO: 18338 - DNA, 669 bp, Oryza sativa
  ref <308>: DATABASE ACCESSION NUMBER: AK068741
  ref <309>: DATABASE ENTRY DATE: 2001-12-06
gactcctttttccccaccccatagccccaagccgggccgagctcctccgctaccgacgggagaggcggcggggcttggcgctcgccggcgcaccaccctcctctccctcctcccacctcccatgaaacaacggcgaggtcggcacgcggaagcgggcggcggaggaatcggcggcgggggagctcggcggcgggggagctcgacgtcggccggcgagggcgccgtcgcttcaccacctctgcgggcgagctcctctcgtcgccgccggatgggatggcgaactcggcacggatctggctcggattcggcgcccctactcttcctctccggcgagctttttcactcactcactgtgtttctctcacaaaatttgctgaggttctcggagccaaaactagccatgcgaacctggtgaaaacgtgggccccatctccttctctcctccatgcacgcattggaccgacatggacagagattaccacacgccacctcaccgcatcgtgaatggcctaacgttgggcctgcataaccagtttttgggctagtcaggcccgtttacaaaccaagccacaaggttataagcccacacacacgtctctcttctctactcgtccccctccgccgcacccgccgacccctcctctctcgtccccggcccgacggaggtgg

SEQ ID NO: 18339 - DNA, 751 bp, Oryza sativa
  ref <308>: DATABASE ACCESSION NUMBER: AK099066
  ref <309>: DATABASE ENTRY DATE: 2002-08-28
gagtttgcgagaactctgagaaaagaacagcaaaagccactgcaatagaagcgcgcgagcgctgagagtatctcagatccatggagatggaggctgccacgccggtgccgaggagtgacggcaggaagctggcgaggtgcccgaggctgcagatggacgccaagacggtcactgccatcgagcagtccacgggcgcggccatcgccgacgccgctgcggctggcgccgagggcgccggcggcgggatgcgcgtcaagatcgtgctgagcaagcagcagctgaagcaggtggccgcggccgtcgccggagggggcgccttcgcgctgccgccggcgctggagcagctcgtgagcgtgctcaagcggcagcacgcgaagaagcaggtggcagcggctgctgatgtggtcgtcggaaggcgccgctgccggtggtcgccggcgttgcagagcatcccggaggagtgctttagctaggtacccacgtctacgaatgtgtagtcgattcgcaacatgtatagcttcggtgatcagtccctcctttttttggcgatattcccttccttcctactaggctgcaaccgatcgatctagttgggccaaagttagtgcccaatggttgcatcccaactttgaaatgtcatgtattttaatctggcatttggacccaaattttcctccgttttcctggttcgatgcatgtacatatctctgcacacgaatagtattcaataagatgatgagctgggaaaagg

SEQ ID NO: 18340 - DNA, 1820 bp, Oryza sativa
  ref <308>: DATABASE ACCESSION NUMBER: AK068742
  ref <309>: DATABASE ENTRY DATE: 2001-12-06
gtgagaccaactaccaatcaaccaactaaccgaacagcgcgcgcaagagatgaagcggaaagctagcagcagcagcagcccagattgcccacgactcaaactcccaatccccaaccaatcgcctataatccttagtatagttagtttattccaacccgaattccaacctcccaagaattcaatctcttgttccgtttcgcttcttttaattcaagattgaatcaattacatagcgtgtttgcttgtcgttgatgctttgcttcctggaggaggaaacgcccgcacacgccgccgaccacctctccgtttccttggatctttcagcttcctgttcctcacgagatcgagaaggggggaaaaagaaaacgtcggtttttagtctcgtttgcctcgatcctctcgttcttggttggtcggcgccatgagtaacaccctgcttcgaatctacccttccgagctgaagatacccttcgagctcaagaggcagaattcggggatcctggagctcacgaataagaccgatcatcatgtagccttcaaggtgaaaacgacgaaccctaggaagtactcggtgagaccaaccaccggaatcgttctgcccagagggtcttgcggaatcacaagttcgtcttgcttcctctgctgctgtacattgcccaactgatcagttcatcgtgtttataaacgcattgctgttcttgctctgaaaaatcgttgcagtatctatgcaaccgccgaaagagatccctacggattataactgcaaggacaagtttctcatccaaagcgtcgtggtagaggatggcacaacgcagaaggacattcacagtgacatgttcagtaaagaggcaggcaaggtggtcgaggagttcaagctgagggtggtctacatccctgccaatcctccctcccctgtgccagaggaagaagaggatgagattgattcccttgattcagatgtggaccatgaagtgcaaatgccatctacgttcgatgctgcatcaaggaagggatatacatctggatcgcaagcttcacatgacgagggcgtctctttgaccaaagctgtattgagtaaatatgtagatgaaaaccagaagcttcaacaagaactggtatggattttctttagataagaatttggagaaaattgatactttcaatgttttaaaaaagaactgaccgtttaattcgcttcaacttctccataattgaataattgagtgattcgtatgaaattattttttcttgctacctttaatgaggttcatatcatgatatttgttacgagacattgctccctttcgatagttcttttttacttaaccttttttgcatacaacatatcgtaaatttacaacatctgcgtgcaaaagcaccagatccaccaaaagaaaagagaagcaagactagggcagatcaattacttaaccccaagttgatctattgcaggatcttcttaagaagaaaaggtcatcatccgatgggggtttcacagctctgtttgtgccttttgtctttgcgttcttcgtcttcattggatacttaatggcgggaagcaatgtttagccagaatagctgcaaaacatacgcatcgttttgcagaattttgtccctctggctgatcaattctttctgtttctcttggtagaaatatatttcttcattataggtggttgtcttccgttcttgtgaagtataatatacctcttaaagaatgggagagaaccattcattgtagatagacaaataggcgttctatctctgaattgttcatatataataaacctctggttcattatacacacacgtttgcttgt

SEQ ID NO: 18341 - DNA, 2633 bp, Oryza sativa
  ref <308>: DATABASE ACCESSION NUMBER: AK068743
  ref <309>: DATABASE ENTRY DATE: 2001-12-06
ggttgtaatcgcttcattgtccaattttatttagacgtaagcaggcagtactacttatgtacaggtgcggagagttgcatcgggagaaaaagcctactatatgataattcgacggatttgctgttaaatccgagttaaccaaacagaagccgatcagagaccctaccctccgccgatgcgtcgagaagaagcctccgccgccgccgccgccgccgaggctgggaccccgcgctcaccggacctccacgacctctccgacgactccgactacgccgccgccgccgccgcgtcctccagtcactcggcgatgcggagcgatctggtggatcaagggtcgggcgagacggcgaaggtggatgtggtgtacgagaaggagcgtgtgacgatccacccgacgcagtatggctccggccggatcagcgggaagctgcgcctctacttgcagcagggctccctgttcctgagttgggagccaaatgagggagttgattctttatcaagcaattcagctaccatggaaatagaaaaatatagaaacctgtacactataaaggccttgccattaagtgatgtacgcttcatccgtaagcacaccccgacatttggattcgagtacataatcattgttctctcatcaggattggcttttcctccattctatttctacaatggtgggcttcgtgaattgtttgcgacactaaagaagcatgtttttattatcaggtcggacgatgatcctaatgtatttcttgtcaacgactttcaagatcctctacagaaaagtttgtcatcactggagcttcctggtgttgccaccgtagcaaatgccatgtcacgacagaactcactcagtttcactagttcagttgatgaagccagacatgggagtgatgccaaacatggggcatcttctagcatgactgaatatgtctcaaagcaaaagcacagatcgaatgatccgggtcgtgatctttctatccaagtactggagaaattttctctggttacaaagtttgcacgagataccacgtcaagtctttttcgggaaaaccacagtagtggtggtcatacttatggaaggcagcagcaagaatatgttttggacaacagagcaaatgataagtacaaagatcagcaaataacaccagataaggattctttgctgtcagattcaatggagtctaataaaattctagcgtggggaaaaccaagagaacaaccgttgagtgttgatgagtggagatccttcttagatcctgaaggtagagttatggattcgaaggcgctgaggaaaaaggttttctatggagggattgaccatgttctgagaaaagaggtctggaaattcctgttggggtatcatgaatacgattcaacatatgccgagagggaatatcttgctgtcatgaaaagaacagaatatgaagccataaaatcccagtggaagagtatttcgtccacacaagctaaaagatttaccaagtttagggaaagaaaaggccttatcgacaaagatgtggtgaggacagatagatcagttccatattatgaaggagatgacaatcaaaatgttcttgtgctacgggatatcctgttgacgtattccttctataatttcgaccttggctattgccaaggaatgagtgattttctggcacctatactttatgtgatggaggatgagtctgagtcattttggtgctttgcaattttgatggaacgactaggagccaattttaaccgtgatcagaatggcatgcatgctcagttacttgcattatccaagctcgtggagcttcttgatcctcagttacataactattttcggaagaacgactgcttaaactactttttctgttttcgttgggttcttatacaattcaaaagggagttcagtttcgatcaaatcatgctgctgtgggaagttctgtggacacattattggtcagaacatttccacctctacttatgcgtcgcgatcctgaaaaggtaccggtcgcggataataggagagcagatggatttcgacacccttctcaagttcatcaatgagctcagtggcgagataaatcttgaccgggcaattcaggacgcggaggcattatgtgatcaggcaggccctaacggggctgcctgcattcctcctggaaccccgccttctatgcccatcgagacggacggtggcctctacgtacaagaagacgaggtcatgtgagataccggcgattcagtggtcacctcatacgacaactgccatagaaagcattgcactggtttccataattccattgggtgcttggtacgttggtatatataaattatgaaggtgatcaaaataatgaaatctggctgttgtatatatgtacgttgaaatatcagttctcgatgaacccaacaatagttaacacaagtctcttttttttgcttaatggaaatggattgtcttttagacgcctatgtttggcttcactgcgtaaatatataatattatgtcacgtgatacttatcaactggcaaagttttgcagttgggtatttggataccagtaaaatcgactgtctgagtacgatttatagccttcaaggctgtttggactgaagtgatgttgagcacgtaattcgtttgtttcacat

SEQ ID NO: 18342 - DNA, 2919 bp, Oryza sativa
  ref <308>: DATABASE ACCESSION NUMBER: AK068744
  ref <309>: DATABASE ENTRY DATE: 2001-12-06
gactcttcactcccctccccacccccacccatcaatttcttcgtccgtctcgtgttaagccgcccctccactggcgacaaccaaaccctaggccgccgccgccccgggaggccaccagggggaggaaaaaggaagaggaggagatcggaagtgggagagggatttatgtcccagcgaggggacaggggcgaggggcacgcgaggagacccggccggtccagcagcttcggcggcggccaccgcggaggcggaggagtcggcggcgcgggcaagggcggcgggggctcctccggccagcctcccctcgcaactaaccgcagcttcaggaagtccggcaatggccatggcgggcaccagagggctgtgagccaacccgacacgcacggcttccagcctgcacctgccccgaccgctctgcagacgccgccgctgcgcccgccggcacctcagaatgcgccggcgcatgtccctgttcccgcaccacgtcctcagcaccatgatccgtctggagcgcgagcacccaccctaccaccttccagcgagaacacggccaatgcgccaccactgaaaggtattcctcatgccgctccaagggcaccatcaaggatttcaagcacgtccacttcacaaggagcaccaaaaggtggagcatataatcttcagtttggcagtttcccaatgaatggtggaactggtggtagcacaatgcaattccctgccaggacaagctcagctcctcctaatttggatgagcaaaaacgcatgcaggccctccctgaaggtcataaggttgtaccttctgggcttgttccacaagctccaaaacatcagcagcaacagcagccgttgcagcagcagaagcaacagccgcagtcacagccaccactgcagcaaacaagaagggatgttgttagttctaatcattcatcgaaacctatcaaccctcacattccttcccaagttaagagctctgtgcatgtctcaccatccgtgcccaatgttgcaccaccaagaccccctgttcagcagatacctgggatgcccatgtcaatgccatttcaccaccaggcacccttgcagtttggcggtcacaacccacaaattccaccacagggagttgtgcccagttcactacaaatgtctatgggattgcatggcgccaacgcaccccaggttgcacagcaaatgtacatccctaccattcagcaccatcatcaactgcaaccgccaacaatgatgcatcaagcagcaggtataccttatggtccagctgctcatcaactcactcagatgagtggtatgatgaatgtgggggtggcacctcagtttactccacaacagccaaataagtatgttacaggcccaactcggaagaccacagtcaaaattactcatccagatactcatgaagaattgaagctcgataagaggatggactcttctgggcaaaggggtttacctagtgtacaacaacaatcccagccggtcagtacttatggatctcctatgggcttctaccagcaaaattcgtataaccagtcaactatgttttaccccacaacctctggtgtcggtcaggttcccactgtatcacagggtcctaggtttgtatccacacaaacagtttcatacatcagcccatcgatgaacacaggtcctggcagtaacaaggacaacctagcagggtctacaacatctggacactcccaagtcacaggcaaaccacacccagctggtttgcacatggagaaatccggggtacaaacggtcacgataagtgcgccgcctggtaaatcagatgtgaacaagttaaaaccagctgaagatgttgtatcacatcgacaaaaggataatgaagctgtttctggggtccgtaaatcaggtgaaaatgagagcaaagcttcaccgatcacggagaagcatcccacaccagtgagccaacccttacaagctctagctgcaaatccagaaactacagcagctgcatcttttgttgtgaattctgttcctggagatgatggaaaaagcaaagaatctattcaaagaactggatcatttaaggatagcaataagaacgccactaaggacaccaggaatttatcacaagaaccacagtcagcttcatctgctgaagatttaaaggtgcatacttctgtaaaggatgtatgttgtggtgttagtctcatggaatccaagggtgtgaataaagagtctgaacagaccaatgccgcttccgcttcaccgactgaaatgttaaaagctgctgatgcttctagcattgataggagctctgcaagatcgacctctgagagcactgagaatgttcaagaagtaggaaaatctgatgttgctattggtgattctgagaaaagtggaataactaacaaagtttcaccagatcttacaaaggatgatatttcttctggttcaactgggaatgaatcacatgaagtttgcacgctagatttggcggagcaattacctgtgggagcttctaatcctgataatttagatactgcaacttctgtaactgaccagggacagcttctcaaagaacccagctcatcagtatctgatgagaatgttattatggacagatcgcatcagagtgctgaaaaaatgtcagatttggttgatgacactgttgcttctgttgccagttctgaaactttgccagaatctataattcaaaatgccaatgctaaaggtaacacaagtggtaatcaggaaacagggtctgctacatctagcaatattcttaatgtgttgccggtacctcattcagtggcatcagaggatccactgaaaccagaaagtatgttaaaggatcaatcgagtagtgcaccagcagcctctgctcgaccagtttcaagggaaaaacctagcgtggaaattaccagaacaaagtttacagctgtg

SEQ ID NO: 18343 - DNA, 1267 bp, Oryza sativa
  ref <308>: DATABASE ACCESSION NUMBER: AK068745
  ref <309>: DATABASE ENTRY DATE: 2001-12-06
ggctcctcccctcccactccgtcgtggccggcagcgggagcagccgctgcctcctccgccgccgccgccgccgccgcgcgcgcctccgcgaatcctcttcctcctcctctctcctcgccgccgcccaggcccagccgcaggagcatggccagcgccggcgtcggacgcggccgggtccgcgtcgcggtcgtcggcgacgtgcataatgattggacccttgaggaagactcaaaagccctacattttctccagccagatttggtactttttacaggtgattatggcaacgagaatgttcaacttgttaaaagcatttcagatcttcagctccccaaagcagctattcttgggaatcatgactgttggcacacgtatcagttttcagagaagaaggtagatcgtgtccagcttcagctagagagccttggtgagcagcatgttgggtacaaatgtttggattttccaacaataaagctgagtgttgttggtggacgaccattttcctgcgggggtaataggatatttagaccaaagcttctgtcaaaatggtatggtgtcaatgatatggctgaaagtgcaaagaggatatatgatgctgctacaaatgcaccaaaggagcatgctgtcatattactggcacacaatgggccaacaggtctaggctcaagaatggaggatatttgtgggcgggattgggttgctggtggtggtgatcatggtgatccagatctggagcaagccatatctgatctgcaaagagaaaccggagtttcgataccgctggtcgtgttcggtcacatgcacaagagcctcgcctacgggagaggccttcggaagatgattgcctttggagctaaccggactatatatctgaacggcgccgttgtgcctagagtgaatcatgcgcaatcaagcaggcagcctgcaatctccacaagcgaaaagactgggctcgaaggattaacaggactgatggttccgacatcgcgggcgttcaccattgttgatctctttgaaggcgccgttgagaaaatctccgaggtctgggtgacggtgggtgatgccaggacggagcttgagcaggaattagtcttgtacaagcaaccacgtgagcacatatgacttccacaaactggtaccgaaactaagtactccgtacatgaatgtaaatgtgatactagtatgatccgaatttcgcaatacagagaagtacaaaacgcactgtcaaaatgtccgtggagtgaagtaatgcaatgtaaattcgctg

SEQ ID NO: 18344 - DNA, 1012 bp, Oryza sativa
  ref <308>: DATABASE ACCESSION NUMBER: AK068746
  ref <309>: DATABASE ENTRY DATE: 2001-12-06
gacagatcctgagaagcgtcgacagccagtaggaagaggagttgctcgcagcagcagctccagcctctcgagcctccacgtcacatcgccggcgccggctcatgtctctcctcacctcgcccacgccgttcggcggcgcggccgtccgccgccgcgcccctcccgcttccgccgccgcggcgacccggctcgacctcccgctggtgggcagccgggccgcgctgcacgtggcgcgcgcgcgcagaggcggcgtctcgtcccgcacgcagcggcgcctggaggagcgcggcaagaataagcgccggggaggcggtagcgtcacggcgcccgcgccgcccgacatggacgaggacgccgccgccggggaaggggtggactgggaaggggagccgctggggttcgaggtgtcgacgacgccgatgcccgagctgccggacccggagaagcccgacttctgggaggggccccagtgggacgccctcggcttcttcgtgcagtacatgtgggcgttcggcgtcttcttcggcctggttgcatgtgggttcgctgtggcaacgtataacgaaggagcgacagacttcagagaaactccttcctacaaggaatcggtccaaacacaggagttcccggaagagtcagaatcatcaggctctgatgtgtttgaaggtaacccaaccgaggtggcaccggctcttgagtaggacgtcgggaagacatcggaaatggaaaaatgaaggttggctattggagctatagggttctacaagtcagcaagacatgtacgtgatggtacaagaacaagattcactcagctggaaaggggtagtttttatgataattagctggcgattattgtgtactaaatttcccctggatgatcctatgttggagatcagaaaacaagaatatagatgatagcggtatgaaattcagcagtgggttttattcatgcttgttgtgcctgaatgatttgcatacttcaactgaaaggggctcagtcaacgaagcatgt

SEQ ID NO: 18345 - DNA, 2141 bp, Oryza sativa
  ref <308>: DATABASE ACCESSION NUMBER: AK068747
  ref <309>: DATABASE ENTRY DATE: 2001-12-06
gaagcggcgcgacgcgagtagcagacgcggcggcgcgacgccatgtcgtcttcctcctcctcgttggcggcggcggcggcgcggaagcgcgcgctgacggagcagaggttctcggagctgtcgcccgcgctgtccccggaggtggtgaaggccctgaagggcggcgggttccggcggtgcacgccggtgcaggcggcggccatcccgctgctgctttcgcacaaggacgtggccgtcgacgccgccaccggctccggcaagacgctcgccttcgtcgtccccgtcgtcgagatcctccgccgccgcccctcgcctcccaagccccacgaggttcttggaatcatcatctccccgacgagagagctgtcttcgcagatatacaatgtggctcagcccttcttcgcgacgctgaagggcgtctcatccatgctactggttggtgggttcgacatcaaggcggagctaaagaaactggaagaagagggtgcaaacatactggtcggcaccccggggaagctgttcgacgtaatggagcgcttagacactctgaactacaagaatcttgagattttgatcctggatgaagctgataggctgttggatttaggattccagaagcagattacgtcgattatttcgaagttgccaaagctgaggagaacagggcttttttcggcaactcagacggaggctgttaaggagctggcgaaagcagggttgaggaatcctgtgagggttgaagttaagacagaggtgaagcccacaggtaaagatggtgctcaacaagagcttggtccatccaaaacaccgttgggtcttcgattggagtatatgatatgtgaagcatcaaataagtcatcgcaacttgttgatttccttgtgcagaacaatggaaagaaaataatggtgtacttcgcaacatgtgcttgtgtagattactgggctattgttctcccgctgttggactcacttaaaggttctccaataattccttatcatgggaagatgaagcagggccctcgtgagaaagctttggcatcattttcagctctctcaagtggtattctagtttgcactgatgttgcagcaaggggtcttgacataccacatgttgatctgattgtgcagtatgatccacctcaagatcccaatgtgttcatacatagagctggccgtactgcacgttatgatcaagaaggagatgctattgtattcctcttaccgaaggaagatacttatgttgagttcttgaagaggagaggtgtacccctcactgaaagggagtgttccacaaatgctgtagatattgtaccacagatcagaagtgctgcattggaagaccgaaatgtcatggagaaagggcttacagcttttgtttcgtttgttcgggcatacaaggagcaccactgttcttacattttcagttggaaagaccttgaaattggaaggttgggtatggagtacggcttactccaaattccatctatgccagaagttaagcaccattctctttcattggaagggtttactcctgttaaagatgtcgatgttacaaaaatcaagtacaaggataaagctcgagaaaaacaacggcagaagacattgaaaaggaaagcagaagaactagctctaaggccagagatagagaagaggaggaaagccccggagaagcctgaaaagccaaagcggaagaagacaggtaaacagcgtcaagcagtccaaaccaaggaggacatggatgagctcgcgaatgagtaccggctcctgaagaagctgaagcggggggtgatcgacgaggacgagtacgagaagctcaccggattcggggaatctgacgatgacgattcctcggatggcggcgattctgacctggacgagagaaaggagaggggcaacaaggtgctcaagaaaatcaagcagaaagggaaggcaaaagggtctaggagatttgaagggaggagcaaacagaagactaggagaagatgaaaagtatatcttgttcttagcaattttgcttttttttttctttaaccagtgtaggttgcaagttttgccctggctattgtatgttcgattttgtgatttgtgacaaggacggtgaatgagcatgagcatcattcatagaagatagtgccatctct

SEQ ID NO: 18346 - DNA, 1441 bp, Oryza sativa
  ref <308>: DATABASE ACCESSION NUMBER: AK068748
  ref <309>: DATABASE ENTRY DATE: 2001-12-06
gttactaattctataattgaaaaggaagcaggatggcattaattaattgtgccaaatgtctatatattagcagccagaatagttatgccatatgattggcacagaaaagaatatacctagtgttcgccggtgagtgtacaactacaagatctgcgtttttttctagctagctctagctagcagatgaagtatctggtgttcagcgctgctccaagcaaattaggcaaaaaccatggcatccaaacagatggtacatatgaatcgaggccaaggggaaacaagctatgctcgaaactccattcttcagaacgctgaacagaacaggatgaggccgctgatagaagacgccatcgccgacctcgtatgcagcagaagcatggtgatcgccgacctgggctgctcatccggcccgaacgcgctcgcgctcgcgtcgatcgccgtcgacgccttccgccgccggtgcctcgcgctccggcggccaccgccaccggcggagctctgcgtactcctcaacgatctccccgacaacgacttcgccacggtggtgaagagcctcgtggagttcaggcgaaacaacggcgacgagcctgtcctcctgaccggcgtcgtgcctggctccttctacgggaggctcttcgccgctgaatccctgcatctcgtctgctcgtccaacagcctccactggctctccgaggctcctgaagatctgaagatgaacggaattccggcatacgacgttgacgcgaacgtgaggagagagcgacgagccgtggtcgttggggcttatgcacggcagttcaggaaggatttcatggcgtttctgaagatgagggctgtagaactggtcccaggaggccgaatggtactctcacttgcaggcaggcgatctgttgatctcgcctccgaactcacgcacgcatgggaatccacagccatgaccctaagtgacatggtcactatgggtgtgattgacaaagaaaagtttgaaacattctacatgccgatttacggaccttccgatgaagagatcagacagatcatccaagaagaagggtccttcttgatacgggagatgcaggtacctgaactcacgagtggtgcgtacagcgcgctgatcacctcggcaagggtagcaagtatgctgagagccgcattcgagcccataattgttcagcattttggaccgaccggatgcgatggaaaagaagggatcatggatgagttcgtgaggacggcggagcgtcggtggagcttggagggcagcttgcaagacgagcttgcacaaaaccctcgaggcgttctgcttgtgtccctcgagaagaagccgtcatgaccatccggtagattataattataattatgtaactgctaccttctgtcgacagtaaatccattcttaaatctggtagattttataccactatattggccgattttagtt

SEQ ID NO: 18347 - DNA, 1520 bp, Oryza sativa
  ref <308>: DATABASE ACCESSION NUMBER: AK068749
  ref <309>: DATABASE ENTRY DATE: 2001-12-06
gggttacaaccgccgccgcagcctttttcccaatcggcgctagttttcgatccgccgccgtcggccggagcgaagccaagcccgcgcgaccaggtggctgctgctgtgtaacgacgctagctagcttagctgcggtacgtttacacataggtccgtccgtgtgcggctgccaccatggaaggaaacggctgcggcggaagcggggcgacaccacgtggtgtcgttgggatgcactgggctcccgtcgtcacctcgccgcctagcccgcagccgccgttcctcccgccggcgccatgcaggcccgacgtccagatgcaacagcaaggcgggctgacctgcctcaagctcgggaagcggccgtgcttctggggtggcgacggcgccggccaggtggcgcaggggagcggcggcggcggaggcggaggcggtggtggttccgcggatcaggggaagaggaaggagaaggcggcgacggcggtgccggtggtgccccgttgccaggtggaggggtgcgacattacgctccagggagtcaaggagtaccaccggcggcacaaggtgtgcgaggtgcacgccaaggccccgagggtcgtcgtgcacggcaccgagcagcgcttctgccagcaatgcagccggttccacgtgctcgcggagtttgacgacgccaagaagagctgccggcggcggctggccgggcacaacgagaggcggcggaggagcaacgccagcgaggccatggccaggggctctgcgcacccacacggtatgccggtgctgggacacggtttcccgccgtacggcctgccgacgtcgtcggctggtgctctctctcttctgtcatcggctagagccaccggcccatggctgatgccgacgcccgacatctccgcccgctcaagcgcggcgctcgacgagctcatcgccgagaaccgcgcggccctcctctcgtggcaattcttctccgaccgacagccgccaccagctggccgtccaacgggccgcagcccgggctccgaaacggccggtggctggcacgcgcacctgcaggcgcggccgccaccgcccggcgccggagggcagcacgagaatcagtcggggcacgtgacgctcgacctcatgcaggccaccaccgcggcaggaggcagcggcgcgccgttccggcccgtgccagcgaggccccccaaggagggcggcgacgccggctgcacctccgacgcgtggacgccgtcgcccatggagggcgcccgcgtggtctgagtgtccgacctgccagccgcgacgtcgccgcgcgtgcaccacggtccctagctcccgtgtcagctgggcgtgggaagcgatcgatcagtggtgggcgcgtgcgcacggctggagctctgtcccgacgccgcgcgcagccgtgcaatcaacttgagttcgttggacaatagtgtctcgtctcgtagcaatctatcccgatgtagcagtactggtgcagtggtggtggtggtgccactagctagcaatgttctattttttcgctc

SEQ ID NO: 18348 - DNA, 2513 bp, Oryza sativa
  ref <308>: DATABASE ACCESSION NUMBER: AK068750
  ref <309>: DATABASE ENTRY DATE: 2001-12-06
gacagttctactccacacctcctctctctctctctcgctcgctcgctctcctctcctccctcgcgcgcgcggccggcgagcggagcgggtcggcaggtgcgcggacggcgtcgtctcctcccccgactccgccgcagcctcccaccctccctgtgccgcctcctcgcgcgcgctgccgccgccggcgagcaggtttggagttggggggcgacgtggcaggcctgcttgctcctctaaccgaattgaaggaaatggcagggcaaagatctgattcgcagtcagatgaatcgttcgaatacatgttgcttgagagggaccctgatctttaccgtacagtcttctcgggcccgagccagataagtccgtggattgacccgagcgtgctgactttgcagcaccggatagggagaggtccatttggggatgtttggattgcaacccaccatcagaggacagaggatcatgatcggtaccatgaggtcgctgtgaagatgttgcatccaattagagaggaccaactgcaagccttctcagtgaggtttgacgagatctttagcaaatgccaaggtctaagcaatgtgtgcttcctacatggcatctcaacacagaatggaaggatttgtatagcaatgaagttttacgaaggatccattggagataagatggcccggcttaaaggtggaaggatccctttatcagatgttttaagatatggtgctgatttggcccgtggcattatagacctgcactcaagaggaatattgattctaaatcttaagccctgtaattttctccttgatgaacatgaccatgctgtgctgggtgattttggaattccgtccttgctgtttgggctctcactgcctaatccagatcttatccaacgacttggaactccaaattacatggccccagaacaatggcaaccaagcattagagggccaattagctatgagacagactcatggggttttgcctggagcatccttgagatgctgagtggcattcaaccatggcgtggcaaatcaccagatgaggtttatcagttggttgtcctgaagaaagaaaaaccaatttttccatacaatttgcctccagcaatagagaatgtcctttctggatgctttgaatatgactttagagaccgcccccagatgactgatattttagatgcatttgagagtgcaaaagatgtagattacgaaaatactgaccagggaaattctgaaaatctaaggatggtcagtccagccctgccaagccgcactaactggtcattcttcaaggacaagttgcaagtgggagacaaggttcgctcgagaaagcttaaaaacacttgtagtccaacaaccatggaagtccctgatggaaccatagttggaatggaggataatggagagcgtgatggctacattcttgtaaggatccatggtttacatgatcctttgaaggttcgctcttcaacagtggaaagggtaacctatggtttcgctgctggagactgggtacggcttagggaggatgagaagaagcgatctcaggttggaattcttcatagcattgaccgtagtggtactgtttatgtaggtctgattggagtggacaccctctggaagggtgaatactctgaccttcaaatggctgaagcctactgtgttgggcagtttgtgcggctgaaagccaatatttcaagcccacagtttgaatggcagcgaaagagaggtggaggactggctacaggccgtatttcgcagatactaccaaatggatgccttttcataaaatttcgaggcaaatttaaccttggtgaagtatgcagttgcttggcagatccctctgaggttgagttggtgagctttgacaagtgtgaggggatcgtgaagaagtacgagcacctcgaggatttccattgggcggtcaggccgctgttcattgctgtaggtttcttcaccgctctgaagctaggcatctttgttgggaagggcattgctcggccaagaagtcgaaaggttgccagcgtctctgatcagagtgatcatcagcaactacagcagcaagaagtgcaaaacaatgccaatgcagcatggctccctccaactgtggcaaacatgctgtttagagacggtcctacgctttctggataaaatgaaaatcaaaaccagtgcaagatggagagtttcagaactactggataatgcaacgcccaagcaaatcgtagttcatacttagacctgaaacttgtcttgccacaagacctgtaaatatttccaccttcactctactatcatctccatgttcacaaaaacatgttctgtgcttatgtctgtaaattgtaggcttgcagtccaaatcctgatactgtcttttgcttttgtcattacactgcaatctctcagtatccctggattttctgttcccgatccatcaatttgcagttgcatctgcaacgtgatgaacggcatgcgaatatggatgaaaattgccataaacgctggcaacacaatcaacatagg

SEQ ID NO: 18349 - DNA, 1188 bp, Oryza sativa
  ref <308>: DATABASE ACCESSION NUMBER: AK068751
  ref <309>: DATABASE ENTRY DATE: 2001-12-06
gctctctcactcctctgtggggctttggacggccggcggtggggacgaggtcgccggggcatggaggtccgacggccggccggcaatgaggcggcggcgacccagaagggaagggcggcggcggcgggagcacggaggagcaacaccagcgtcttgtgccgcgtccacaacggcgtgccagcgctggcggccggcaagcaacaccagcgtcttgtgccgcgtccaccgcggcagccgcgaccgcggcgtgccagcgccggcggccaacgaggtcgcgttggcggcgccggacattgctgctgctgcctcccggaactcgatcgagacacatcaagggatccaccagctgggatttatctacggccatcgcagccattaaatcgggaatcaaagcttgcaattttggcatccagcagaaacaggcaatatcataccacaaaccagcactatatgtctccggttcttcaagatttggaagagtcgaaagccagaaccttccgtgttctgttcgtcccctttgatccagctctgtttccggtttctcctccgggctctggtctcacgacaaaggcagcttgataaacaagaagatattttgggagcgtcttcttcttggaggagattggagtactgatcctaccaataaggttgatagcttcctagctgtgtgctctcataataccaatcaggcagacatgctccttcacctcatgcctgtgtgcgactgtgcgtacgacgacctatcttcactagtttatcctagaactcgtcgctgtgcggcgaaatcgcgcctaagaactcgatcttgctgcagggattgggtctttttttgtacgctttgtgtttttcttttctgtgaggaattaaggatatttttgtgcttggatcaacgaagtttccgagactgattatttggagcagcatcgaggcataatccacagtttgatccgtatccatggaaggcatatattatctaattaattattaggacgggagatatcggtttgtaggtccaataatttgaatacatgtatgacaaattgtcaaaaggcttcctttttgggatagttttgggactgaagttacttcatcaaagataactgtcttaggccggcctggttaagtgaatttttttatgtgtactggttcaacaaatcaaggaataatggggaatttctatagttgtcc

SEQ ID NO: 18350 - DNA, 2817 bp, Oryza sativa
  ref <308>: DATABASE ACCESSION NUMBER: AK099067
  ref <309>: DATABASE ENTRY DATE: 2002-08-28
tgggtctcctccatctccaatcccactcgcgcggccatggcgttggccatgacctccacctcgccgcagccaccgcctccctccccacgccggcggtggcggcggcggccgctcctgcgaccgggggtatccagtccgccctccaggtgcagacccagcccgagccccaaagccaaggccgccctcccgctcctctccgacgtggggcgcgatcccaccgccatcaagtactactcccgcgtcgcatccaacctcgtgggcgcggggcggctccgggagttcctcctcgccgccgagggcctccgcgcggcctccggggacgctggattcgaggggcgcatcagccggcgcctcctctcgcgcggcgtcgccgcggcgctccgcgaccaggggcttccccacgtgctcgagttcctccgcgacgccggccgcgtcgggatccgcgccgccgtgatgctcgacgctgacgcctacgacaccgtcgcggccgcctgccggctactgctggctgagcgcagcatgacggagttcgtcgaggccgtggaggcgctagctcagtgtggattctttgttcaaggcattgtggatccgatggatgtattgaaaatatttgtcaagaagcgtgacccaaatatggcaataaggtatgcacgtatatttcctcaatcccaacttttgctgtgcaatacaatggaagcttttgggaaaagaaaggagttaaagcatgctctaacagtctttggagcactcaaggatcagtttggaggtatcaatatgtttgcatgccgaagtatcatcgacatatgtggtcattgtggttcttctgtgcaggctcgaattatattcgaggggcttcttgctggtaagattactccaaatgtctatgtcttcaacagccttatgaatgtgaatgcccatagcttcagctacaacttttcagtctacaagcacatgcaaaatcttggcgtccctcctgatttgacatcatataacattcttctgaagacatgctgcaacgctaaggagtataagttggctcaagaaatttatgaggaaattaagaaaaaggaacagaacggtcttttaaagttagatgtttttacatacagtacaatgatgaaggtgtttgcagatgcaaaaatgtggaagctggcttccgacatcaaacaggatatgcaatcagctggtgttcgtcttaacctagtcacatggtcatcattaatcaacgcctatgcaaattctggtttagttgaccgtgccatagagatacttgaagaaatgacaagggatggttgtcaacctactgctccatgcttcaatattatccttactggttgtgttaagtcatgccagtatgatagagctttccgcttgttctatgactggaaagaatatggagtcaagatatctctatcccctgaacagaaaggatgttttggtgacaacttctcatactgtgaagaacatacaagtaacagcagtactctgttagtggttccatttagaccaacagttacaacatataatattctaatgaaggcctgtggcacaaatggagaacgcgcaaaatctgtaatgaatgaaatgaggcgaaatggcctttgccctgaccttattagctggtctattctgatggatatttatgggtcatctcaaaacagggatggagctattcaggcactcagaagaatgcaacgtgttggaatgaaacttaatgtcactgcatatactgttgctattaaggcatgcgttgaaaacaaagacttgaagttggcattgcacttgtttgaagaaatgaaagcacatcaactgaaacccaatttggtcacatacaagactcttttgacagcacgcaataaatatggatcattacaggaagtccagcaatgtttggcaatctatcaagaaatgagaaaggctgggtatcaagcaaatgactattacctcaagaatttgatagtggaatggtgtgaaggagttttgtctagcggtaatggaaatcgaaaatattaccaattggatcagaggaaagaatcattcaagctcgttcttgagaaagtgacaacattcttgcagaaagatgttgatcaaaaccaaactgtcgatgttcgtgggctttcaaaggttgaatctcgcgttgtagttctctcagttctccggaagatcaaagagaagtatctactaggacgagcagttcaggatgatgtagtaatcatcactggtcatgggaaggcatcaagcgccaaggccgagactagtgttgtcgaggtcgagcatgcaatagttgctgttctgacggatgagttgggtcttgaggttttaattggacctggaagtcgcccggcttcgtccaaacccacagttccagctcgttctaggagtcatttagatctagcttctaaacatttttccaggagaccgcaggggatgataaagatcccgatcaactctctgaatcattggttgaagaggaaagctgtgaggactgtgcagtgacagttcctcaaccttttgcagagtcatcctaagataaggtagtgtatacagatgtacaggttggctggtgctactcagtgacatcaacccaacacggtttcacaagaaggaatttgtggacggccatccagatacggtaaaacatcagaattaaagttattaggttattgctggaaacttgcaatccccgcaattccatggaaactgaaaaacatgctgaccgagtacagtgaaatactccactgtctgtggattttgagcaccattgcctaatatagatttgtaacaagtttgttcgctcaagatttgaaacctgattgc

SEQ ID NO: 18351 - DNA, 956 bp, Oryza sativa
  ref <308>: DATABASE ACCESSION NUMBER: AK068752
  ref <309>: DATABASE ENTRY DATE: 2001-12-06
gaggcttggcaactcggcggtgatggcggcggcggctcagccctgttgggttgagaagtaataccaatagttgcctgaatctattgtgagtgtgtgagtgtgagaagtgttcatccaattcgagctgttaacatgttgctgctgcatgatcagagagaagggtacagagagattgtataggaggaagaaggaaaggaaaaggcaaagcaacgttgaggaatttcatcgttttcgcaaattagggaatttgtcgcaaggtatctaatgacattgatcagcatgggatgggagtagcactcttgaactacgcattattattgcacactattgatatttagttttagactatgtttctgcttagcgtaagttttgcgtagaacttgtaaatgtcatttaaagttctggtccttattttcatgtggaatttgtggagctaggatgggttggattatgtggtttatatcgttattaagttatcttataactgcctgtcgtggatgctcgtatttttaggggagactctaccgaaatttctaataattttgggagttagtggtttttgagtgtattttggtgtggcactctaggtaggtggctacctggagtgttacaccgtcgtcctcgtcgccgctgtcgtctcgccaccgctgctcccgttgtcgtcgctgtcattgcactgccaccgctcccgtcatcgtcgccgcgcagccgctcgtggtcaccgtcatccttgtcgtcaccatcgttgcgccgccgctgctcccgtcgtcatcgccgtcgttgtgcagccgatcgtggttgccgtcgtcctcgtcgtcaccattgtttccatttatgatggataaaagatcaaaaaagaattgatggatgaaaattgtattacttagagatgtggttcaaaaactatttattggtttttacgaatatattataacaaacatttaaattgttgggag

SEQ ID NO: 18352 - DNA, 1292 bp, Oryza sativa
  ref <308>: DATABASE ACCESSION NUMBER: AK068753
  ref <309>: DATABASE ENTRY DATE: 2001-12-06
gactacccatcactcccccaagattccacggatattttctctccccctgctcccgtcgccatcgcaaaggagaaaaaaaaaaggtgagcaatcgcttctctgctcgctcggctcagatctgcgtgtgtacgctggtagatctgtggaaagaggttcaattttttgagcccagttcgcgatctgcggttccgcgagagtgaacggatcttccggatcgtggaaattcatcgtttgcttttcttttttttttttgtttcttctttggatgtgtctccgatctgaatccgcttgatctggacagaggaggaaggaaggaaggatgagcgccacggcggtgtcgtcgctgaacccggacgcgccgctcttcatcccggcggcgttccggcaggtggaggacttctcgccgcagtggtgggacctcgtcaagaccaccgcctggttccgcgaccactggttccacgagcaccagcagctcgacgagatggccgactccctcgccctccacgacgccgccgccgacgacgacgacctcgccggcctcctccccgacgacgccttcgacgacgacgacgacgacgacctcttcttcgaccagacccataacctcctcgtcgatcccccgcagccgcccgccgctctcaagactggtaccgactgactcactcgcttgctcgctttgttgatcatcaaaagatcgagtctaaaacgagaattgcagtgaaattcatcgccatgtctcccatgtgtgtgtgcagatgcggtgctcaaggcgctgagcctggtgtctcccaagggcggcgacgcgccgcgggggctccgggagaagccccggcactccgagaagcccaccaagtacgccggcagcccgaggagcggcggcgctccccgcgtcatccaccagcctcgctaggctgcgatggctaggatggcaaaaactaaaggatgtagcaaaagcattgcgtctttgcgccgcggtgttttgctttgcttccttcctcccggctgctgctgctggtgtggtctactcaaagtctgggtttgtccctagagtttatctaggaatttagttgtgtccttttgtatagtataaaccaaaatgaccctaaaaaaagtatgaacaaaatgcaacctttgttcagtgttgccttgtaagtttaatgttcatctagagttcgtctaggaaaattccaaaaagaagaagtggaagaagaatgtagtagtgtgcactcctgttaatgttctgatgatgtgcaatagcaagcagcctaatgttgaatattcagacttttccc

SEQ ID NO: 18353 - DNA, 2188 bp, Oryza sativa
  ref <308>: DATABASE ACCESSION NUMBER: AK068754
  ref <309>: DATABASE ENTRY DATE: 2001-12-06
gacactagcagcgaagcccaagcagccgacggaatcccgaatccccacccacccgcctcctcctcctctcgtccgcccctcctccgatggcggcgtgggctgacgccgcgctgctccgcgcctcctcctcccccgcctccgccaccgccgccgcgtcctcctcctcctcgtcctgctgcctcgccaggccgcgcgcatccctggagtccaggctacaccgccgcaaggtgcgttacgtgctccctcccctcctcgctccctgtcaatttgatgtgtcgctgccgctgcgcgcttctgttcctccgttgggattcgctcggcaactgtttgttgaatgccctgacgggggttctcgtgagtgtattggcaacctgggatcgtcagctgttctgttcatccatgtatgtatgatggggctccttaaaaattggagcgcctccttgctagtagtaagatttatttagctgagatttttggtggaaagtgttggatgtacgtcgggttgcaaaagaaagggggtctggagaataatttaggaatataatacttggttaaatcatttcaaatatggtatgcagtccgctttgctttgctatagtaaccgtaaccaatagctgtgttgcactgtgtgctctgtgctgctttactttgaaatacatcttctcctgctatagcaacattgataaggtgcttcctttagtatacgagatatggtatttaggctttttgataaggtgcttcatttagtatacgagatatggtatttaggctttttggatgccgggttttacttttcagttttcagcataaattgtacacgtttagttcttgtattttattcgagctacgctatagatttttgatattttgtgattcctgccattgcaaagccaactcctaagatgttctgtcagattatccatatttctcacttgttatgctcattcaattgccaagggagttggctgtccaatctcttggttgatttttttagacaacgtgaggcttgtattgtagttgacattggataatgatcatcacattaagcctttctggccattgggcttagcattagtctcctaatttaccagtgttacaactcaatgcttataccatgattcttaatggaatgataaacactgatatattgtatagcagtaatatactagtgtacacccctgcccaacctaagttatatcgggtcaactggatgatggtttgttgttctgcagagctttctttataccagtagccccaaatctggtttcctaattaatagttgtcgagcaaggagcttgaaggttaaagcaaaaatggattctggtgatggccttacaagacttgctccacttatgtttgaaactccaagcggtcaacttctggtccagatactccaatcacaccctcacctacttcctgcaacagttgaccagcaacttgaaaaccttcaatcagagaaagatgctcaagagaaagaagcctcgaaagttccccaggacctcctttacaagtaagtatccccagaattgtaggatgccatttccttcatgatcatttatgctattctattattcatcatgttttagtgttttacactcagatataaccccactacctggcatgtattgttagtcgcacaatatttaaaaacaagtccatatgttctactgccaaaggctgcaattcagtgcgtataaaaaaaagacgtggagaaaaatcttagtatgcatagcatagatgataaagaaatggtaaggacagaacattagatgttctagtggaggatgcatttaaagaactgactgaaaagctaagctgattgaattacaggagaatagcagaagtcaaagagaaggaaaggcagaacaccttggaagagatcatctactgttggattatttataagttcatggagaatgacatatcaatgacacctgcattagcaccattaggtggccctgtacgtgacatctcctcattgcctaaccaagaggataggttgcaaagcatacattccccggacgctcttgagatgatacaaaatcatctcaaccttataatgggtgaaaaggtagcagccccactagatacagttgttgaaatcagcaacttaaatctgggaaagctttatgcagcatccatcatgtatggctacttcctaaagagggtagatgagcgattccaactc

SEQ ID NO: 18354 - DNA, 1345 bp, Oryza sativa
  ref <308>: DATABASE ACCESSION NUMBER: AK068755
  ref <309>: DATABASE ENTRY DATE: 2001-12-06
ggctcgcagctcaagcacctctctcaagccgctttcctctacaggaccggttgcttggtcacataagcttttgggggaaacatgaggctgtcggtggccatcctctgcgccctcgtcgccgtgcaggcggcggcgctgctcctcgccggatcggcggccgcggccagcgagctcaaggtcgggtactaccacaagaagtgcaagggcgtcgagaacgtgatcaagtggcacgtcatcaaggctctcaagcagaaccgccgcaccggcgctgccctagtccgcctcctcttccacgactgcttcgtcaggggttgcgatgggtcagtcctgctggacaagtcgtacgagaacccacacccggagaaggaggcgccggtgaacatcgggctggcggcgttcgacctcctggaggagatcaaggcggccgtggagaagcggtgccccggcgtggtgtcctgctccgacatcctcatctacgcggcgcgcgacgccggcagcatcctcagcaacggccacgtccacttcgacgtccccgcgggccgcctcgacggcgtcgtctccagggccgacgaggcccaggcggagctcccggactccaccatgaccgtgcagcagctcaaggacaacttcgccgccaagggcttcgacaccgagcagctggtcatcctctccggcgcgcactccatcggccagggccactgctcctccttcaccggccgcctctccgagccgccgcagcagatcaccccggcgtaccgcgacctcctcaactacaagtgctcccaggccgccaacccggacgtcgtcaacaacgtccgcgacgaggacgcctccgtcgtcgccaggttcatgccgggcttcgtcagccgcgtccgcaagatcagcgacttcctcgacaacacctactaccacaacaacctcgccaagatcgtcaccttccactccgactggcagctgctcacggacgccacgtcgctctccaaggtccacgagtacgccgacaatgccaccctttgggactccgacttctccgactcgctgctcaagctcagccagctgcccatgccggaggggagcaagggggagatcaggaagaagtgcagcgccatcaaccacttgtactaaatgcattgcatgcatggacacaagacgaccacacagagacgatgatcaacgacgactatgcttgtagtagattgatttggctttcacacatccattcttttgatttccatttgttgtaatttgttctctgtaatttctcagccatgttaatctgttacataagttaatcatacaaatctggatataataaaaatataattaactgcgatgttaattaatc

SEQ ID NO: 18355 - DNA, 2937 bp, Oryza sativa
  ref <308>: DATABASE ACCESSION NUMBER: AK068756
  ref <309>: DATABASE ENTRY DATE: 2001-12-06
gttactctccctgtctcgcgactctcgctgtctcacactgtcgcacagctctgtgccgcctctacctccggtgaccgccaccgccgcaaccacgtgtccacgccgccacaccgccgcttgctagtcctagccgtcgcatcctcgcgcctcgccgcgtcccttgccggagaagcaagatggcacctgccggaggaaaacgccgcacccttctggatccatccgacggcaacaacagagacagaggaacattgagttcgccaccgttgtgtttgctaggtccaccaccaccaccaccaggtatagccgtataggcgtatagcttgaatgcttgagcatgatttttttacatgtatagatgaatgcctgagccttgatgttttttagcatgattttctgttgatgtgtgcaagcacgatttctgtagatgtacagcttaatccttgagcatgttttttttagatgtatagcttgagccttgtgttaatcgttaatcacttcctcatttttttaaaatctcaatctgctgcatctggaagtgccagtggaagtcatcatgtgggtgtgactgcatcatcatctacacctgaatcagcggtacctccaaccattgccacaggtacctcacaaacaattgagattgatgctgatgttaatagggttgatgacaatgatgagcgtcctgtgaaaaggaaaaaattgacatcagaagtctggcagtacttcaacaaggaaaaagtgagtatagatgagaatggtaagatctataaacaggagtgggcacattgcaaattcaagaattgcacttacaaaggtagatgtgagagtgccactggaacaagcggattttggagccatctgaaattacatcacagtgttgtcaaagggcagcaacaactcaaagctcagaaggaccaagagaagggcatcaacgttgttgaaccttacaagtatgatgaggaagctagcttgaggaagttatatgtggcaataatcatgcatgagtaccctttcaatatggttgggcatgaatattttcgtgatttcattacatcgttgcgccctaactttccattgaaatcccgtgtaacagttagaaaagaaatattgagcatctatatgcaggaaagggataagttgtatgaatatctcaaaactgtgaaatgccgcattagtgcgaccatggatatgtggacatccaatcaaaacaaaggatatatgtgcatcacactgcattgggttgatgatgattggtgtattcagaaaagaattgtcaccttttcccatgtggaaggacgtcatactggtgttagactatctgagggttttactacaagtatgctgagatggtttgttgagaagaaaatgttttctttgactttggacaatgcatctgcaaatgatgttgctgttaaggatataatttgttgctgttaaggatataatttctgaacttaagaagcacagtcccttagtatgtattggcctgttttttcattttagatgtgcctgccacatactgaatttggttgctaaagatggtttgcaagaaattgaatcaacaattgagaaaattaaatcctttgtcaatgctgtaaagggctctccgttgcagtgggaggagttaatgaagtgtgcttctgaaagtgggttggacacaaccaaaggactattaaatgatgtttctacaaggtggaactcaacctatctcatgttggcagatgctatctattatagggctgcttttgacaggcttacatcctatgatcggcgcaggtatgagaaaatgtgcccttcagctgcagagtgggagaaagcaatgaaaattcgcgcattcttgaaaagattctttgatcttactgagcttttctctggtactttatatcctacagcaaacttgttttacaaaggattctgtgacattaagattatacttactgattggagtaagggcaaggattctgatattactattagaaggatggcaactgctatgcttgctaagtttgacaaatattggaataagtctaacactgctcttgctgtggcaagctttcttgatcctagattcaagatgagaatagtacaattttgcatggagttcatacactaggatatgcatccaattaaggttactgaatttctcaatatcatccggaacatgtatgactgctatgcttctgctgcacctcctagaaatcataatgcatttgaacctattgatacaccagatgcaaatcaagatccaactgagtttgttagtgcacttgataagtatctatatcgtgctgaaacacataacacttcttcaaaagtaaatgatttggagaagtacctgtcagaagaaactttgaaggttactaaagcaaatgaaagtacatttgatattttagcttggtggaagaaccagaaagatacttatcatgttctctccttacttgctcgtgatgtgctggctatgcaagcctcaacagttgcttctgaatcggcctttagcgctggtggccgtgtcgttgatccatattgcagtcgtcttgattctgaaatggcacaagcattgatttgtactaaagattggatagctggagtaagaagagatcgtgttgccattcagtcaattgtggttgatcttgagcttgctgagcttatggcaaacaaattggttattgaggacgacgatgtagctatgtcaattgatgatgaaatgatgaatgatgtttgacaaggagctgatcagctgaagccatgccagcttgtgagcttggtgttcagtgttctcgaagacttcaaatctatatcctaaaaaaagtcggacaatattagttatgcagtaatcctatcatgtaagccacattgtatgctttagccacattgatgttgaagtatcattgaactttgtttatattgtttgtcgaccttattgtcaacttattaatcatc

SEQ ID NO: 18356 - DNA, 3653 bp, Oryza sativa
  ref <308>: DATABASE ACCESSION NUMBER: AK068757
  ref <309>: DATABASE ENTRY DATE: 2001-12-06
ggccattgccactgctccctacctactcctcctcttgctcctcctagcttagctctggacccgttttggatcgcactgactcgctgaccatcactgtgaaattgggagctgtgggcagaaagactaggccttgtattgttcagagaatcagagattgaagatggataggaggattggccttacctcaccgtcaccaaagtcgaccgagaagtccgggagagacttgagatccggaggtgacgccaatggcggcgcaaacactaacagtaactccattcccagaggtgataaggagaagggagtcaatgtgcaggtcattctcagatgcaggcccatgagtgatgaagagacaaagtcgaatactccggtagtgatctcgtgcaatgagcgccgccgtgaggtcgccgcgacacaaattattgccaataagcagattgatcggacctttgcatttgacaaggtgtttggtccagcatcgaagcagaaggatttgtttgagcaatctatctcaccaatagtaaatgaggtccttgagggctataattgcacaatttttgcttatgggcaaactggtactgggaaaacctacacaatggagggaggtggaactagaaagaccaagaatggtgaactcccaactgatgctggagttatcccaagggctgttaggcaaatctttgacattcttgaagcccagtgcgctgagtacagcatgaaagtcaccttccttgagctctacaacgaagaaatcactgatttgttggcccctgaagaaccaaagttccctattgttcctgaagacaagacaaagaagcctattgccctcatggaagatggcaaaggaggcgtttttgtgagagggcttgaagaagaagtcgtgtactccgctggtgaaatctacaaaattcttgacaagggttctgcaaagaggcgcactgcagagacactgctgaacaagcaaagtagtaggtcacactccattttctctatcacaattcacatcaaggaactgactcatgagggtgaggagatgatcaaaattgggaagcttaatctagtcgatctagctggttcagaaaatatctcacggtcaggtgctagagatggcagagcgagagaggctggggagatcaacaagagcttgctgacacttggtcgagtcatcaatgctcttgttgaacactctggacatgtcccatacagagatagcaaactgacaagattgctaagagactcattgggagggaaaacaaagacttgcattattgccacaatatcaccttcagtatattgtttggaagagacactgagcacactggactatgcacaccgtgctaaaaatatcaagaacaagcctgaggtgaaccaaaggatgatgaaatctgctgtgatcaaggacctgtactctgaaattgaccgtcttaagcaagaggtgtttgctgcaagagagaagaatggtatatacattccaagagaacgctacctccaagaggaagccgagaaaaaggccatgacagagaaaattgagcgtctgggagctgatttagaggctagggataagcaattggttgaactaaaagagctttatgatgctgaacaacttttgagtgcagagttgagtgaaaaactcgggaagacgcagaaagatctggaggacaccaagaatgttctgcatgatttagaagaaaaatacaatgaagcagagtcaaccattaaggaaaaggaatatgtcatctttaatttattaaagtcagaaaaatcactggtagactgtgcatataacctccgtgcggaattggaaaatgcagcagcagatgtttcagggctattttccaaaatagagcgtaaagacaagatagaagatgggaacaggtcactcgtgcagagatttagatctcaactgaccaatcagctggataccttgcataaaactgtgtccacctcagtcatgcagcaggagaatcacctcaaagaaatggaagatgatatgcaatcctttgtatcttcaaaagatgaggctgctcaagggctaagggagagcatacaaaagttgaaacttctccatggttcaggcattacagctttggatagtttagcaggtgaaattgacatgaactctcagtcaacatttgagagattgaactcgcaagtgcaatcacacacgtcatctcttgagcaatgttttggaggaattgcttcagaagcagacaatttgttaaatgagcttcagtgtagcctttctaaacaagaagagaggttaacccaatttgcaaagaagcagcgggagggacacttacgagctgtggaagcatcacggtccatctcaaagatcactgctggtttcttcagctcacttgatgttcatgcatctaagctcacgagtattttggaagaaacgcaaagtgtgcaagatcaacaacttcttgaccttgagaagaaatttgaggagtgtgcagctaatgaagaaaaacaacttctagagaaggtggcagagatgcttgcaagttcccatgcaaggaagaagaagctggtccaaacagcagtaggtaaccttcgagagagcgctgtaaaccgcacaagtcacctacagaatgaaatttcaactgcccaggacttcacttcgtccgtgcgggaaaagtggggcttttacatggaagaaactgagaagaattacattgaagataccactgcagtggacagtggaaggtcgtgcttggcagaagtgcttgtggaatgtaaggcaaagacaaccatgggtgcacaacagtggaagaacgccgaggactctcttttcagccttggcaaaggaaatgtggaatcggcagattcaatagtcaggactggaaccgaggctaaccaatcgctgcgttccaaattgtcgtctgcggtatcaactacccttgaagaaatagatatagcaaacaaggcccttctttcttccatcgacagttcactaaaacttgaccatgatgcgtgcgcaaacattggctccataatcaaaccatgccatgaggaaataagcgagttgaagggaggacattaccacagggttgttgagattactgaaaatgctgggaaatgcctagaggaagaatatctggtggatgaaccatcatgttcgactccgagaaggcggcaaatcgacctgccaagcatggaatccattgagcagttgcgaaccccggattacgatgagcttctcaaatcattccgagagtcgagggcgagtttgaagcaggcaaatggagacatgaagcatttcttagaggtgcaagaagctacaccaccatcaatcacagacccgagagctcctcttatagcaagaaattagatttatagagtgaatgtacaaaaggaacaaattgtttagctttgatttttggggtattgatttactgttgatagtgccattcgatttattgctgctgttggttgggatgggaggtctgaagctgatctgtttgtagagatcagtagaaaggcatgtgtatttactactgcataattgaggataatgttagctctagtgtaatatatatccacacaggtaacaatgacaagtgctagtacagatttgactcagataatcttccatgctttgctgcaaatttgaacaattattagaagcaaaaggaaaggaattgagtacaatc

SEQ ID NO: 18357 - DNA, 889 bp, Oryza sativa
  ref <308>: DATABASE ACCESSION NUMBER: AK068758
  ref <309>: DATABASE ENTRY DATE: 2001-12-06
gtgtgaaaagggggaaagtgggaactgaccacgacgaagaggagggaggcgagcacgatggtgcggtagcggccgagccaggcgtcggcgacgcaggcgaccagcagcggcagcatcgtcgcgacgccgctccacaggttgatcgccgccgccgcccccgccgtcgactcccccagcggtcccgtcaggtagctgatcaggttcgccgacacgccgtgttcagaaagctatgtatagaagattctacgagcggtatacttctccttttcacatggagtaggagtgtactgcgttcaagctcaaaatccatggcgacgaacagaacaatgtctgtgagatctagggccacagtgatgcggtgaatcgccgtggccacagacgatccagggcgcgtggcggcggcgcggcggcgcgcgcgggcatgccgcgagtgcgtggtcggcgcgtgccctgcatgccagaattggaaggtggcgtcgtccgcgcacggggctcgctgccacctcggacacctcctacctctctcacgcaacaccacaaaaacaccacgcttgctctgccactaggcaatgcggccgctacagcaatttgcagcatctctctcccatcgtactactacctgcctagaggtaaaataacgagcaacagtttgtttgtttatttctgtatgcttgcaagctgcaattgttttttggcacccagttgcgtggtttgttgagcagatcagggttgtatgtattttgtttttgtgtcgctgtgcccagctgttgcttttggttctttggttgaccgtgatggacatggggtaattaaggtctttttcagtttgttgctaaaattaactatgtaaatttttaatattgtagaacaaaataaaccagattttacc

SEQ ID NO: 18358 - DNA, 2062 bp, Oryza sativa
  ref <308>: DATABASE ACCESSION NUMBER: AK068759
  ref <309>: DATABASE ENTRY DATE: 2001-12-06
gggagtctcctcccccccccccccccccctgtgactctgaagctgcctctcatctcctctccaatctccatccacatcgcatccatcataaatcccccacacccttctccccaaccaagcacctaccaccattcccaatccccctcttccaatcgccatatgcaagagccccaaatccgctattgcatttgtttcatttcatcggctgccgctcctgagaaacagcaatctggataggataggtggtcgcctgtatttagatccggacttttgctagtggggggagagaggatttaggtgaacgagcatcttgattttgaccaatctttgcctgtctcactgattgaccctcctcctgtgtgcttggttctttaaatcccgcgtggtgggtgtggggaagaggagaggagggaggcaaaggcacgagcaagaacagctgcttccgtcttcttgctcgctggtattcaaaaggaactatcaaggtgttgagtggagatattgggggcaaagtttggattttggaggttattgtttgctttccattggctaaaaatgttgaggcagagctctagtaggaatcacaggtccaaaggtctgaagctgaagaaggctcttcagataaccctcttggttctggtttctgtttggttgatataccaagtcaagcattcatacgagaagaaggcatatcatgaaaatgagcccaatgacctgcataaagatgatgatcaaaaccagggtgagatcagattaggcaggaaggacctgcctactaagctggaggctgactcatcaacgctggatgaacggattgaggatgaagagaatgaagagatggagcaagaaatgaagcacgatgagaatgatgaagaccccattgatgaacctgacctggacaaagatgatgatcttcctgagcctggcgagcactctgctgataaggatgaaagatctgaggatgtgggtgtgtttgaggatgaagagcggaaggagcggtctcaggaggatcaagagaagacctttcatggggataatgtatcaagtgctgtcagtcatgaccctccgtcagcagagcaagatgagctgcttcgtcatgcccaagacaaaatattatatgtggatgatgcttcgacagcagtgcctcatgacaaccaggaagctgaacgcagggaggaggaagctcgcaaagctagggagatgactttcagaggcgatgatgtgtcaagttccgtagatcatgatgcccaagtgacaaaacctctcccagaggagcaattgaagagcatggatagcatatttgaaggcaccacaaatttatcaaacggaataacatttcgaggcccaggagtgaatgaatcaactgctgctagggagcttggggctattccagctgatgcatcttcccatccaaacactagcactgtttcagaaagcaatactgatacagctccggtaaatttggatggcaaccatactggatcagatcaagctaattcgacctctttgaaaggtcaacaagagcagcaagcaaattcaacggatgtgttgaacaaccagataaaactcttcattgacctcacatcagctgctgagttgaattatcgaccaaatgggaccctggcttcggcttcaactgatgctgaaaatgccacttctgtagatagaggccatgatggtaataccggaaccaataaggctgaggaaggagatacaggcaaagacttagatttatcgacaaaaatcatgaacaaggccattagtgaagatgaagttgttcttgaatgataaggagatctctcaggttagcttctggtgtaacctgtaagtctgtaggaccttaagagaaggagaagaaactagtcttctctttctcagtagacttggagatgcaatacaagtaaactatctctattgcccccccccccccttttgtataaatttgatagagatatgctatgtattgcctagcacatcatgctctgggttgagtgatgcgcaaaagggcttgttatggaagtaatatatagccattcagcagctctgaagctttgctgctgcaatg

SEQ ID NO: 18359 - DNA, 1948 bp, Oryza sativa
  ref <308>: DATABASE ACCESSION NUMBER: AK068760
  ref <309>: DATABASE ENTRY DATE: 2001-12-06
gatatggcctcctccgccgccgccgccttctaccgcgacagggaggacgcggcgccgccgtcgtccggccccgggggaggcggcgccatggcggcgtacgacccgagctacgtgccggactcggtgaagacgttcgtgtcgcacctctaccgccacatccgcgaccgcaacgtgtacgagacgcaccagatgtacgagggcgggttcacccgcctctccgaccgccacttccgcgacacgccgtggccgccggcggaggccgtggcggcgcactgcgacggcgaccacgtcttcctcctcctctaccgggagctctggttccgccacgcccacgcccgcgtccagggcctcaccccggcgcagcgcgccgagtcgtgggacaactactgctccctcttcagcgtcgtcctccagggcgtcgtcaacatgcagctccccaaccagtggctctgggacatggtcgacgagttcgtctaccagttccagagcttctgccagtaccgcgccaagctcaagaacaagacccacgaggagatcgccctcctcaagcagtacgaccaggcatggagtgtttatggggttcttaattacttgaaagcactggtggagaagtcaatgattggagagatcctggagagggagaaggtagggcttgaacagttcacggcaactgatgggtatgactatgagggcgggagcaatgtgttgaagatgctggggtactacagcatgattgggctgctcagggtgcattgccttcttggggattaccatactgggctcaagtgcttggctccaatagatataagccagcagggtgtctacaccactgtgattggaagccacatttccactatttatcactatgggtttgccagcctcatgatgcgcaggtatattgatggtatacgtgaattcaacaaaattctgttgtatatcctgaagtgtaagcaataccaccagaattccccccagtatgaccagctacttaagaagaatgagcagatgtatgcactattggcgatctgcctctcattgtgtccacaggacaagctcatagatgaaaacgttggcactcagctgaaggaaaagtatggggacaaaatgacaaagatgcataggtatgatgatgaggcatatgctatttatgatgaactcttttcctatgcctgccccaagttcattactgcgtcgcctccagttctacgagagccatacacaaactacaaccaggatgcttatcgtcttcagttgaaactatttctttatgaagtgaaacaacaacagttgctctctggtattcgaagctatctcaagttgtattcaacgataacaattggtaaacttgccaaatacatggatgtggatgaggttacactaaggacaattcttatgacatacaagcacaaaatgcattcaatcgacagtgacggaaaggtcatatccagtgcagactttgacttctatattgatgaggacattattcatgttgttgaatccaagttaaccaagaaccatggtgattactttttgagacagattttgaagtttgaggagatgattacgcagctggataaagtacaatttgactgaacctgctatcatcagggctgaagctctcctttgagttacagtgggacgcgctgttggtgatggatagtaatgataaatttttgtgccatccttttttgatacattgttgacatgagttaaatcctcgctaaaaagtactctaggtgctaactatcgcatccacttgtcatggcatgttctggtttgaagaatgccaactttaaattgttcttgtcttatcgtcaaccgtgccattacctaccgtaacgttgcaaagttgtagctgtattcctatgtttcggacttgcagagtgcggaatgtcgttgcttcctatctgcctgagccttatgaactgaaattccctattcgaattcg

SEQ ID NO: 18360 - DNA, 1707 bp, Oryza sativa
  ref <308>: DATABASE ACCESSION NUMBER: AK068761
  ref <309>: DATABASE ENTRY DATE: 2001-12-06
gaaacgaacgcaaagcccccaaaaaaaagagtaaagcgaagggcaccttggggctcgcgtctgccggcgcgcatggctcccgcatccacctcgccgccggcgaaggcccaagtgacgacggcgccggcgaagtctcccctcgtcggcggacttgcggatctggacgcggccgtgtccctccgcctccacgccctgttcctcccggttccccgcctcctcctcaaggccctcgaggtcgccggcgacggccgaatctggctccccgtgcccatatccctcctcctgatctccaccaccacctcttccaaggtatcccctctcctcgtcggcctcgtcgccggcctcgtgctcgacatcctcttcgtcggcgccgccaagctcatcgtccgccgccctcgcccggcctacaacgccgcggacatgtacgtggccgtcgccgccgaccactggtccttccccagcggccactcctcccgcgccttcctcgtcgccgccttcctcgcggccggcggcttcccccgcgaggcgctcttcctctgggccgcctccacgtcggcgtccagggtgcttcttggccggcactacgtcctcgacgtcgtcgccggggcttgcctcggggtgttcgaggcctggctcagctctttgttgttgagggcgatgtgtgctcgcatcagcttccttgtgtgctagctattgttctctcacgattggttgcagcatttctgtcccgatttgcaaattttgtgagcaattcaagtttagcgaatacattttgtacttaattcttgatgaattgagcattatgcgaagcagcaaaggagtgatcaccccaattgcttctctaagattagttaattggtagaatggttgctatatatatactccattggtagagtaaattactgctctttcatttctgattgttgcagattagagtgatactctaacattgttaatctgagtatctggttgacttcatatataaaatgtgttcttgacggattgttcattgtctatgttgctatgcatgtgaacagcatagcattgctagatattccatggcagattgatctaccatttataaactcagcagagggaagtgttaacagctgcaagaattttatgttagtaacatggatcattcatcatcgatctcagtgttgtcatggatagtagacattatggtctatgggcctgaaactgagagatcatacagaaagcaatcaataatcaatactaccaggacatagactgtattactgacaacaatactggatgagaaaacaaaggagccagtggccccattgctggatgaaatttggaatacttggctgcacgacctgggagaatgcaagatgcgagtgtgcctgctgtccctgttcatatcctggtgttgctggaccgtgacacatcgatgacaaaagtgggagatggaatagcaaaagctgaaaagaaggttgtttcttgcgtggaagctttggatctgaacagtgacctatcgttgcttagctccaaataaatatcctgaatgcttatctggttatctggcagctcatagcctcataagcgctagtagagtaaaaggcttctgttttctgtctgaaatggcggttctcttgccctttgaatttcaacatagaagtttgttttgtggatttaaactagagacaaatactaacctttcaatgtagcagtgattttagcatt

SEQ ID NO: 18361 - DNA, 1234 bp, Oryza sativa
  ref <308>: DATABASE ACCESSION NUMBER: AK068762
  ref <309>: DATABASE ENTRY DATE: 2001-12-06
gcttcttgcatggtccccctcttcgtccccctctcctccgccccagcttacaactcccatatccccttaaaaccacaccaactcgtagccaatttcttcagcgcggagacgcaagatatagcagcagctagcaagaattgccccgagttgggtggttaattcttggttttggttcacgtagaagcagatagcttggttggttggttagacggccatggcgaagccgcaggacatgcgcagcgtcgactcgttctcgcagctgccgttcatccggccggcgccgccgccgcagcagcaggcgcgggacacaatccggctgttcggctgcgaattctccaacgacctgcagctgcggcccacggaggccggtgcaggctcccccgacgcggccaacggcagcacggtcacgtcagagggcagcaacggcggcgacggcggcaccaagaacggcggcgccgcgacggcggcggcggagcgcaagttcgagtgccactactgctgccgcaacttcccgacgtcgcaggcgctgggcggccaccagaacgcgcacaagagggagcggcagcacgccaagcgagctcacctccaggcctccctcgccatgcaccgctacatgccggggcacatgtacggcctcttcaactaccaccaccacatcggcggccgcttcgaccaccacccgccgccgccgccgccgccgccaccgccggcgcactacccgatgtggacgagcgccgccccgggcgccttcgccgggccaggttccatggcgcagcccatcaacggtagccccgtgcaggccgggctgtggagcgtgccgccgccgacggagaatttcggcagcacggccggcaggcagggcgctgacaagctggctactacggtggcgggcacgccggcggcgggggaggtggcatgcaaggacgagatggtgccgatgagcttgctgtcctcgtcgccttcgttgtcgtcgtgctcgtcgacgtcgccggagatgctaggtaggtgtgaattggggcagaaggagggtgtcagcttggacctccatttgtaatccatgtctaattaggttttcttcttgtggattagcagtcgcaagaaagggtatgttaattctcatagcttaaataatctactctttttgccttgtccggatccaagtttagctagctacctagcttgtgttgccactttatttttaccaggcaaagaaaaagaaaatccttcgaattgc

SEQ ID NO: 18362 - DNA, 1240 bp, Oryza sativa
  ref <308>: DATABASE ACCESSION NUMBER: AK068763
  ref <309>: DATABASE ENTRY DATE: 2001-12-06
tggatattttacgaggttcaagtggagtggtgtggtggaggtggagctggtggcaagtctgtgtcaaccatggcatcgccctccggcgccggcaagccaccggccgtcctcctcctccggccggtggaccagcccttcgccgtcgcgctgcgcgagcgctaccgcgtgctcgacctcctctcctccggccagcctctcccggccttcctcgccgccgccgccgccgcgcctgacccgccgcgcgccgccgtcgtcatggggggcggctcaatccgcgccgacgcggcgctcttcgacgccgtgccttccctgcgctgcgtcgtcagcacggcggccggcgtcgaccacatcgacctcgccgagtgcgcgcgccgcggcgtcgtcgtggccaactccgggacggtgtactccggcgacgtggccgaccacgccgtgggcatggtgatcgacgtgatgaggcgcgtgtcggcggcggagaggtacgtccggcgagggctctggccggtgcagggggactatcctctcggctccaaggtaagcggcaagcgtgtgggcatcatcgggcttggcaacatcggttcactgatcgccaagaggctggaagcattcggctgcgtcatctcctacaactcaagaaaccccaaacgctcgctcccctacacctactacgccgacgtccgcgccctcgccgccgactccgacgtgctcgtcgtgtcgtgcgcgctcaacagcgagacgcgccacatcgtcggcggcgaggtgctggacgcgctcggcgagggcggcgtggtggtgaacgtggggcgcggcgcgaacgtggacgaggcggcgctggtgagggcgctgcgggaggggaggatcgccggcgccgggctggacgtgttcgagggcgagcccaaggtgtcgccggagctgagggagatggagaacgtggtgctgacgccccacgtggcggtgtggacggcggagtcgaggtccgacctacgtgaccacacggtggccaaccttgacgccttcttctccggcgacccgctgctcacgccggtcatgcttccctaacccaccacctacatactccacgtacaggtaatttctattgttgctattcgtctggtttcattccattttttgagtaaatttcatgtacttatcaatagcgtggttccgtgaaactttaataccaaatatataaatatgtagtcaagtgtcaaaatatatatagttttctacagcttggatt

SEQ ID NO: 18363 - DNA, 727 bp, Oryza sativa
  ref <308>: DATABASE ACCESSION NUMBER: AK068764
  ref <309>: DATABASE ENTRY DATE: 2001-12-06
tcacccaactctcacctactctgcttctgctgccctcctgcatcgactcactcctccactcccgtgtcgtcgtcgtcgtcgtcgtctgcttcgtcggccgccgcgcgccgcccgcgatggcgtcgtcgggggacagcagcggcaagcagcggagcgacgaggagtggcgcgccgtcctctccccggagcagttccgcatcctccgcctcaagggcaccgagttacctggaacaggtgagtacaacaagttctatggtgatggggtctacaactgtgctggctgtggaacacccctgtacaaatccacaaccaagtttgattctggttgtggctggccagcattttttgagggacttcctggagccataaaccgaacaccggatcctgatggaaggagggtagaaatcacgtgtgcagcttgcggtgggcatttgggtcacgtgttcaaaggagaaggcttcaagacgcctactgatgagcgtcactgtgtgaacagtgtttcgatcaagttcaccccggcctcctaaatcctttcccaggtcattattattggaggtgaattccccagggctaaagctgtggaaagcactacaaaataatgaataaaatcacagagacatatcctgtttgtccatatatgaattcatctcctgttaatttagctgtaaacttgtaacttaacattgctgggaatggtaaatgaatgaataaatgaatctggttcatt

SEQ ID NO: 18364 - DNA, 3307 bp, Oryza sativa
  ref <308>: DATABASE ACCESSION NUMBER: AK068765
  ref <309>: DATABASE ENTRY DATE: 2001-12-06
gtttccatttcttgccgttttcttccacattcttctctgctgctggtgtctcttgtgggccgcgtggaaagccactctctcctcctctttgacctcgctatctatccatctactgcagtttgctcactggaaatgtttttcgcgtataaatagctgggaggagaggcaaggggaccggaaagagtgcgagaaagaaagaaaggcgagttctttttggcaagggagggagggggggcactcgttgagggtgggtttcagaggtgtgggaggtcgcctccatggcggaggacaagggaggcctcgatgccgtcctcaaggagtcggtcgacttggagaacatcccgatcgaagaagtattccagaatttgaaatgctgccgacaggggctcacttccgaagaggcgcagctgcgcctgcaactttttggtccgaacaagctcgaggagaaggaggagagcaaattcctcaagttcttggggttcatgtggaatccgctgtcatgggtcatggaggctgcagctatcatggccattgcattagccaatggtggggggaagccaccagattggcaggactttgttggtatcatcacactgctacttatcaactcaactatcagtttcattgaggaaaacaatgctggcaatgctgctgctgcgctcatggcgcgtcttgcgccaaaagccaaggtgctccgaaatggtagttggactgaggaagaggcagccatccttgtgcctggggacatcatcagtattaagctgggagatatcattcccgcagatgctcgcctcctggaaggagatcctttgaagattgatcagtctgcgctgactggagagtcattgccagccaccaaaggtcctggtgacggtgtttactctggttcaacggttaagcagggtgagattgaggctgttgtgattgcaactggtgtgcacactttctttggaaaggctgcacatcttgttgattccaccaatcaagttggccatttccaaaaggttttaacagctatcgggaatttttgcatttgctcaattgctgtggggatgtttgttgagatcattgtcatgtaccctatccagcacaggccataccgccctgggattgacaacctattggtgcttctcattggaggcattcctatagcaatgcccacagtcttatctgtaaccatggcaatagggtctcatcgcttgtctcagcagggaactataacaaagagaatgactgcaattgaagagatggctggcatggatgttctttgcagtgataaaacaggaactctgactttaaataagctcacagtggacaagaatctcattgagatttttgaaagaggagtcactcaggaccaagtaattctgatggctgctagagcatcccgaacagaaaatcaagatgctattgatactgcaatagtcgggatgctcgctgatccaaaagaggcacgtgctggtattcaagaggttcacttcctgccattcaatccgactgacaagagaactgcattgacatacattgatagtgatggaaagatgtaccgtgttagtaaaggcgcgccagagcagattctcaacctggcacacaacaagacacagatagaacgacgagtccatgctgtaattgataagttttgcagaacgtggacttcggtcacttgctgtagcatatcaggaagttccagatggaaggaaagagagtcctggtgggccatggcgctttgttgctctccttccactctttgatcctccaaggcatgatagtgcagaaacaattcgaagggcacttaaccttggtgtaaatgttaagatgatcacaggtgaccaactagcgattgggaaagaaacagggcgtcgtctaggaatgggtactaacatgtacccttcatctgctttgttgggacagaacaaggatgagtctgttgctgctttaccagttgacgatctaatcgagaaagctgatggttttgctggtgtattcccagagcacaagtatgagattgtaaaacgtctgcaagcacggaagcacatctgtggaatgactggtgatggtgtaaacgatgctccagccctaaagaaagctgatattggtatagcagttgctgatgcgactgatgcagcaaggagtgcatctgatattgtactcacagaacctggcttgagtgtgatcattagtgctgttcttaccagtcgggcgattttccagcgaatgaagaactacactatatatgctgtctcgattacaatacgtattgtgtttgggtttatgctgcttgcccttatatgggagtttgatttcccgccatttatggttctgatcattgcaattctgaatgatggtaccataatgactatatctaaggatctagtaaagccttctccactacctgacagctggaagttggctgaaattttcacaactggagttgtgctgggtggatacttggcaatgatgactgttatattcttctgggctgcatacaagaccaactttttccctaggatctttcacgtcgaaaaccttgagaagacagctcaagatgactaccaaaagcttgcatctgctgtatatcttcaagttagcaccatcagccaagctcttatctttgtcacaaggtctcgcagctggtcatttatcgaacgccctggctttctacttgtctttgctttcttcgttgcacagctgatagctacattgatagctgtttatgctaactgggcattcacttcaatcaaaggcattggatggggctgggccggtatcgtgtggctctacaatctcgttttctacttcccgctcgatatcatcaagttcctcatccgatatgctctgagtgggaaagcatgggatcttgtcattgagcagagaattgcgtttacaaggaagaaggattttggcaaggaagagagggaactcaagtgggcacatgcacataggacactccatggcctgcagccaccggatgcgaagcccttcccagagaagaccggctacagtgagctgaatcagatggcggaagaggcgaaacggagggccgagattgcaaggctcagggagcttcatacgctgaaggggcatgtggagtcagttgtgaagctgaagggcctggacattgataccattcaccagtcctacacagtgtgatagactcttatctaacaagagtaatatggttgctgcagaggaactgtttcgtttcatctaattagtagtttttatctcctctcagctaacataaatgtaatcaaccaacagttcatacaatctataaatcaaatcatcaaaggggattgttgagatt

SEQ ID NO: 18365 - DNA, 2222 bp, Oryza sativa
  ref <308>: DATABASE ACCESSION NUMBER: AK099068
  ref <309>: DATABASE ENTRY DATE: 2002-08-28
gacaaaaccccactctccttgctccgcccccgccgcgtcgccgtcgctattgcgccgccgccgccgccgccgccgacgccgtgcgtcgcgaagtgctaccaggaatgctgggatgaattcatattgtgataagaaagaggttactgtagcttttagcaaaactaaaaggcaagaggaggatgaagtgatttggagaatggtagaacaaggcgctacagatgatgaagagtgtggtggtaccaactgttcggctggcgaaaatagggatcctggttggcctggaacgagtgtcttcaggatgctgattcctgcaactaaagttggcgcagtaattggtcacagtggagaaaggcttagaagactgtgtgaggaaacaaaagcctgcgtccgagtaataggtggccactttgctgctgcagagcgagctgtaatcatttttgcaaaggaacaacctgatgagccaaaacctccagctattgatgcactactaagagtatatgagtgtataatcaatgatgatggtttagatgtgagatataacaatatagttgtggcacggattcttacaccaagtgaacaggcagcaagccttattggcgatcagggttcagtgattaattatatcaagaaagcttctaaaaccaacatccatgttattgacggtgacttgccacctgttgcacttgaagatgatatgattattgaaatttggggactgcctgcaagagtgcatcaagcattggaacttgttgcttgtcatttgagaaagtacctggttcatcgaagtgtcatcccactgtttgacccccatgtgtctattccaatctcacctgtggatatgcccccattccactacagtgaccatcatgagggccttctgcacgaagctagtccaggctattactccctatatgctgaagcttttcaacttgaacacccatggactgatactagttattcaaggtatccaatggaaaactttacacatgctgacatatttgaatacagacaagaagcaccagtattttttgggagatatcggtcagtcacacctccacattatgggcatgaagcagaagcatatttatcatctccaatggaattatgtttgcataacaacctgaatacatatggatggcaagcaactccaccaattggtcgatcagatactgttgaaagaatacgctcccttatatctgtgtatggaaaacaggcacatccacatcggctgaggcagacatatcaatcaactaaaatggaaaaacatccacactcggggatatctttgtacagaagggatgatcatccaacaagggtatctccatcacctgctactgaactacccccatctcctgctgtttctgcatataaatggcaagtatctccatccttaaagatgtatccttcaactaatgtcgaaaaccttcaacactgccgtgtttctgcatgcgctccagaagaactgccaaatgtggttgtgccttcgttaactagtcaatctcctgcagtcacttctcaggttataatgaagatgcaagttccaattttctatgctgaagcggtaattggcccaactggtgcacgaattgattacattcgccaagccagcggatcaagcgtcgtgataaaggatcttgatgacagtgcaatgtctattgagatcactggaagtgctgcaacagatgttcaaattgcagagcagttgataaagaacttcatggctgaagctgctgccgcttcccctgatcacagttatgacttcattccatcacatttgccagcaccgagatctccagagccagatattccaactacttcactcactcgcagagcaagctgttttacagaacctcgcctgcaagcgacctactgagttcccaagagttctctttctgcacatagtccctacaccggcaatacaggaaatccgcgagagtacattcccagaaagttttgatatccatcctcagatgattaatatgcgccccctttttgaacccccaagacttgtatctaatattttctttttctttggcttttagccatagactttgatccatgagttagaaattgactctgatccatgagttagaaatagaccttgatccatgggttagaagtctgagattatggtataggacaacaattttttggtggattcagggtaagtgatgtacaagatatgtgccctcagatgtttgagagacagtttgtattacatg

SEQ ID NO: 18366 - DNA, 2183 bp, Oryza sativa
  ref <308>: DATABASE ACCESSION NUMBER: AK068766
  ref <309>: DATABASE ENTRY DATE: 2001-12-06
gcttaatgctactttatgcgtgtgtggataatggagtaatcactgctctgtgtatctgagctcacaccatgggtagcagtggcgcagacgcaccgactaagacaagcaaggcatctgcacctcaggagcaacagccacctgctagttcaagcactgcaacaccggctgtttacccagattgggccaactttcagggatatcctccaattccaccacatggcttctttccatcacctgtggcgacaagccaacagggtcatccttacatgtggggagctcagcctatgataccaccatatggaaccccaccaccaccatatgtcatgtatcctccaggagtatatgctcacccatctatgcctccgggcgcacacccatttactccatatgccatggcctctccaaatggcaatgctgatcctactggaactacaactactgctgctgctgctgctgctggtgaaacggatggcaaatcctctgaaggaaaagaaaaaagtcccattaaaagatctaaaggaagtttaggtagcttgaatatgattacagggaagaactctactgaacatggtaaaacctctggggcatcagctaatggagccatttctcaaagtggggaaagtggaagtgaaagttctagtgaaggaagtgaagcaaattctcagaatgattcacatcacaaggaaagtggacaagagcaagatggagaggttcgaagttcccagaatggtgtatcacgttcaccatcccaggcaaagttgaatcaaactatggcaatcatgccaatgacatcaagtggtccagtacctgctccaactacaaacttgaacataggaatggactactgggccaacacagctagctccactccagcaatacatggtaaagcaaccccaactgcagctccagggtctatggttccaggagagcagtgggtgcaggtttgttctattagcccttcccttcaagaaccgtgcacttgtaatattttcttcccgttgtagtattcgctgctgtgcttcataaatgcttttctccacttagggttccgttagcaaccctccattaagtactataggatgaacagtgcatttatcggtgtgggatggacggaaccctaatggcgatggcatttatgggacaaaatcgcttgtacgatgacattttatggaacttgcactcattgatagcatttcttggatttgggtgtttgtcaatggcatttcttcttaggtacagacattcatcagaaaaatcgtggtgttagtatggagtatgaatttcataggcgcatttcaagttaaattgatatattacaactttttattcttatttgggtgctcttcacctctaaaattatgtattttctatctcaatcctttcattttggcatgccatcattcaaaataagatgttgagtccttatatgaaatacaaaaaccatagaaatggcacttaatcatcaacaatcctatggatacaaacatgaagttttcagtttttctggcaaatggagaaattagtcgtgttgactctcccatgattcaggatgaacgggaactcaaaaggcagagaagaaaacaatccaacagggagtctgctcgcagatctaggttgcgtaagcaggctgaatgtgaggagttggctcaacgtgctgaagttttaaagcaagaaaatacttcacttagagatgaagtgaaccggatcagaaaggagtatgatgagcttctatcaaagaatagctcattaaaggaaaaacttgaggacaaacaacacaaaactgatgaggcaggagttgacaataagctgcaacattctggtgatgacagccagaaaaaaggaaactaattgagctatcgtgcaatgctcctgagcataaccctaactagattattggcaggcgcaactgtagtatgtgtattaacttcatacttattgcagttaattgttaccaggttgtgataatgttaatgccaactttgtgtggctggttcctgtttcagatctgtcttggcttatcttttagaagtcaagatatgactggcaatgtaggttgtgacccagttcactgtatctgttagaaatagtttataaactcatgtttacaaatctgtattgttgactactattgttatgtacacctgaagatgaaccagtattttatataagatgcagtcaggttg

SEQ ID NO: 18367 - DNA, 3529 bp, Oryza sativa
  ref <308>: DATABASE ACCESSION NUMBER: AK068767
  ref <309>: DATABASE ENTRY DATE: 2001-12-06
gtgcacttaatgcaaccttagtgcaaaaaccgaaattttccactctctaggtggttgtagtgataaaattgctttgataatctaaacacactgagttgcttatggttgttgggaggtgcctagtgggccagatgaaagagacatcagccatcgtggatgagttcccatattcctctgtcggtggtaggaagagaaaacaaaacattagctgtttacacctgttgtaccagcgcctcaaccaattggaaccttctagggtttttctcatggcgagagaaagtcctccatgtggagttgtaggctcctgctgcgccttttagttcctgaagagcttgcaatttgtaagactctagtgtaaaccgttcatgcaagcactcacatactggttgcagttgaggtctaacaacatgcagatgcagtagtgcttgaactttaaatatcatatacttactattctaaaattagatcagcaaaagtgcatgtcatgttaagtttagtgccatgcggacattctatgcatgcatgattcatatagtattgtaatgcatgtagggtgcagattattatatgagaatattcgctggtggatctagttatctaagtttctttatcttccaatgccaccattttcttattttactgttcagctcttataaaatgttttttctgttggctttcgttgctgtctcatttatggatatctttacttttggattgtgccttttagtgcgcctatagtcattgtgtgagatgttcggtggccattattttttgcttgttaagtgctctgaagcatatccggcagagggttgtctcgctaaaagattgtctaatttatagtatgccaccaaataattccaagataaacagtatatagccacaaattcatgtcatgtctatcgcccattagtctgaatttgcaccatgtccacataactagaaagaacagtacaataataatattgtgtccttgccttttgcacatcctttgaggtcattgtgttttaacggagagtctttggtgtgcctgcccagcgaaaaatttgatcagtcctacatctcagcttccaatgtgtagctacagaccaagcggttaggtttctgtggggaatcaacagaatgttaaaattgtcctgtcttacctcaccatcattgttctgagacaggggaacatgcctcactactaaccctccatgatggagggggtagaggagggttgatgtgagaagaacaggcgatatcggcaatttcatcacttggtaggcttctttatgttaattctgtataaactgatttttatcatttggaggtataaaaccccctttcacaatgaagcaaaccgttagccttaaggtgcaaaacctttagattcatgagacacaagcatccatccaactacatcaaacatgtgaaactctcaggttgcttcctgtgttgacagtcatataaagaacatatgatggtacatgtgccagccagtatttgcactttagatttaagctgaatgagctcctttttcaatgcaatattttggcaagataataaccaaaaattgacacatcattattattttataatgttttaactttttattactacactttgtcactctcattgaggtcccttttttttttcctttttttttttgtaaaatccaggttcatatggtgaaaatgttaggagaaagtcccacacaccttctgctattgttatcggcagtgggtttgcaggcattgctgcagccaacgctctcaggaatgcatcatttgaggttgttcttctagaatctcgtgacaggataggtggtagaattcacactgattactcttttggctttcctgttgatctgggagcatcctggcttcatggtgtttgtgaggaaaatcccctggcaccaattattggaaggcttggacttccactgtatcgcacaagtggagatgactctgtgctgtttgatcatgaccttgagaggttactagagctagtttattttgtatgtaacttgagagatgatggaccataataatcaaccatttaacatgttttttccctcagttatgctctctatgacactaagggccatcaagttccccaagagctggtagaaaagatagggaaggtttttgagactatattggaagagactggcaaactgagggaagaaactaaggaagacatttctattgcgaaggccattgcaattgttatggagagaaatccacacttgaggcaagaagggattgctcatgatgttcttcagtggtatttgtgccgcatggaaggttggtttgctactgatgcggacgcaatctctcttcagggttgggaccaggaggtactgcttcctggtggccatggtctcatggttcgtggatatcgtccagtaataaatactctggcaaaaggcctagatatacgccttggccacagggttgttgagattgttcgccacaggaatagggtggaggttactgtaagcagtggtaaaacatttgttgcggatgctgcagtcattgctgtccccttaggtgttcttaaagcaaacaccattaaatttgaacctaggctgccagagtggaaggaggaagcaataagagaactctcagttggagtcgagaacaaaataattctccacttcagcgaggttttctggcctaatgtggagttccttggagtagtttcatccaccacatatggctgcagctatttcctcaacctccacaaggctactggccatcctgttctagtttacatgcctgcgggtcggcttgcatgtgacattgaaaagctgtcagatgaggctgctgcccaatttgccttctctcagctgaagaagatcctgcccaacgctgccgagccgatacattacctagtgtcacattggggctcagacgagaatacacttggatcctacaccttcgatggggtgggcaaacctcgtgacctgtatgagaagctgcggatcccagtcgataacctattctttgctggagaagccaccagtgtccagtacactggcacggtgcatggcgccttctccactggtctgatggcagctgaggagtgccgaatgagggttcttgagcggttcagggagctggacatgctggagatgtgccaccctgcaatgggggagcagaccgccactgtctcagtcccactgctcatctcccggctgtgaacagaccaggagctgcacaaaaattatagtcttctaaggccatttggcacttggcacccggcgagcgcactaagccattcccctgattgctcgaggaaggcagcattggagcaattatcttatttgcttctccttggcatgaggagtgtgctggtgcagcttgcggtgcgctaaataaagtcactgtgaaaatggagtgtgggagtctggtgtgtattgttgagtataaaatgagggagtcaatatgtagttaagcagggattacggacaatgtgagccatcattactgaacaagatggtgtatgtgtgacgaacaattaatttaaacgatcgatattgaaaatg

SEQ ID NO: 18368 - DNA, 2823 bp, Oryza sativa
  ref <308>: DATABASE ACCESSION NUMBER: AK068768
  ref <309>: DATABASE ENTRY DATE: 2001-12-06
gggtcggtcggactcgcctcgcctctccccgaatcccgccgccgccgccgccgccgccgacgagactcgacgcctcctctcctccctccccgctcctcttcgggcccggagctcggcgggggtggagcggagacacacacacgacccggcgggccggttctttcccccccttatccggtgaggaagccctagcttttgcttgggtgggcgggtggggtggggtgggtttggttacttggttctaaagtttgacctaatctgagttgcttctctcgctgttgctgcgagcaattgaacccgattccgaatctttcccggggcgctgccacgtccaatcggtgtaattccagttgagggtttgatgggggagctgtggaactagggttttcgagttgaatatactatgctctgctgggttcattgcacacttgcagtagcagaggagtgcgttttttttgttatgtgccgaactctagcgcagttcgcatgatcatcaatttagtgacgatagaaacatgccgccatatgctgtgcattttcccccacaacaagaatggcgtgctagaaaaatgttttgtgtgacttttaactccaaaagggaaaggaggagtaaaaactgttgctctttttttgtagggagaagataaatttgttcctctggtctggcgagcattaatctttcagtttctagtagtgggctcttggagatttgagctgatttcaaacaatgtaggtaaaggttgtagggttcatacggtttatggcttggtccgttagaaatagagcataccaagccaccaacgctctacccgctaacccagagttgtgttgggcacattaatcttctagactttggggtcaatgtcaaagtttgtgagtagaactttagattatttacaaaatgttgcttggatctgctagaaagtagatcacacaaaggttctgtctgctaaccaagagatgtttttggatgcatgctccacgtccttatgtctctccagttttactgtatcaatcttgggctatgttactgcttcattcatgttcaacaaagaaatagagagttagagatccatctcccaactttgttactactctgttattactttgatactatgtggaacaagagaattatgttgtcagtatagaaatgtacacaatcttcagttttccagtatcgtaaaaattgtgaaagaaaaccagttttaaaactcatagagccacttaagtttcctcgttgtgatactttgacagttcgacagtaagtactaagaagttcaagaaaactaagatatatgttccataatatgagaatatttattgtaagtgtcttccaggattggtggagtttagcttatcaatctgtttattaatatttacgcagtattgcagtcatggcattatgtggttgaatatatagatggataatagatgatctaatttgaaatgtgataaattgttttcaataaatgggtctgcttttgggaaatgaaaatcaattttgttttggtagatattctgtttccgggaacagggatcgattaagccacagtgtaagttcatactgtgacctattgactttgcttttgtacgctagttgtaaaattttgttcaattgaatttcaggtgaatatgcactgtgcttaggctaagattcaacctgatggattctgatgacaagaagtttggaaaaggccctagggagctcactggtgctgttgatttaataagccactataaattgcttgcccaccatgatttcttttgcaagaagcctttgccattggcaatatcagatacacattatcttgacaatgttgttggggacactgaaattcgtaaaggagaaggaatggagctagatcagctggttcagaacgcatacttgagggacaagcctgcttatatccagccgtttgacatggaaacactggggcaagcatttcagcttcgagaaacggctccagtagatttgccctctgctgaaaagggtataccgactatatctggtaaactgaaaagtgagtccaaagacaaagagaagaagcataaaaagcacaaagacaaagacagggacaaagacaaggagcataagaagcacaaacatcggcataaagataggagtaaagacaaagacaaagacaaggataaggacaagaaaaaggataaaagtgggcatcatgattctggtggcgatcattcaaagaaacatcatgagaagaaaaggaagcatgagggaatggaggattcagccgatgtgcataagcacaagaaaagtaagcacaagagttccagaacagatgacacagggaatggacttagttagctacactttccttagttcgattgtcaatccatgtcatatgtccttaaaaaggaggctcagaaggtttctgtcatcaaaacccaccgcagtagtgataccatgaatatatatttagttgaagctgtttcagaagaacacgtcttgcctgctatttatgttggttttgcagcgtcgatcctggggaacatgtaactcgtaaaatagggactaacccactttattgtgcaattcttttgtttcctggccaaatggttgtaggaacacttgtcgatgactcccaacttgaaatttctggagattaggcgtagactatttcagatcaggtttctggttagcattaacagtgttggatagatctagaaatgcgtttgtcggaggggaatgagaaattaacttgtattcagaaaaaaaaaactaattcttctatatacttctatctgttatcaaggaagattgttaattttgcagccattgagaaatgcaatgatttattttgt

SEQ ID NO: 18369 - DNA, 1031 bp, Oryza sativa
  ref <308>: DATABASE ACCESSION NUMBER: AK068769
  ref <309>: DATABASE ENTRY DATE: 2001-12-06
gtcaaccaccaaagccgaggaggagatcacgagacgagagagaggcagagcaatcgaagccccacgccatggtcaagatcaagatgcccgccctgttccgccgccggagcggctccaagtcgccgccgctgccgcaggccgaccccgcgtccggcggcgggtccccggcgccgacgccggaagaggagatggagcgggtgttccgcaagttcgacgccaacgggacggccggatctcgcggtccgagctcggagcgctgttcgagagcctcgggcacgcggccaccgacgacgagctcgcccgcatgatggccgaggcggacgccgacggagacggcttcatcagcctcgacgagttcgccgccctcaacgccaccgccagcggcgacgcggccgccgtcgaggaggacctccgccacgccttccgcgtcttcgacgccgacggcaacggcaccatctccgccgccgagctcgcccgcgtcctccacggcctcggcgagaaggccaccgtccagcagtgccgccgcatgatcgagggcgtcgaccagaacggcgacggcctcatctccttcgaggaattcaaggtcatgatggccggaggcggctccttcgccaagatcgcctaggatcaatcaaccacccaatttcttcccttctcctcatcctcctcattgaccaactcctatccatccatccatccgagcgtgccgtgtgcggtggaaattttaagtgtatatacaaccgattaaaagaccactagccctagattctttctactaataattgcgattctcaactactactagtttctttcttggtagattggaaattggaggctaaaaagcagcaattctatcccctgcttttggttctaagacacgccaatgctttctctcttttttttccccacaagatgtaagcgtttgcgtggagtaagagtcttggatcttggatcttgcattcttgtttcgattgttcaccatctggaattctggatgtcagttaatctgatcttaatataatccccttctg

SEQ ID NO: 18370 - DNA, 3468 bp, Oryza sativa
  ref <308>: DATABASE ACCESSION NUMBER: AK068770
  ref <309>: DATABASE ENTRY DATE: 2001-12-06
gattcccatctctccactctccctcctatcatatgctcctcccttctccactcttcttctcaaatcctctctcttcctcttcgtcctcctcctcttgcaaccaaaaaacaccataaaatagtaatcccaatccacaagctcacctctctcttgcacacacacacacctgacacaacacttacacatcataccagaagaaaaaccaattcgattttgccaaattacctagctatagcatataggtaggtagctaggtagcttggttttccctaatagctctagcttgatctctttctagctctaccgccgccgccgccgccgcccgccgcgctaccacctgttgctcgtacgatcggattcaaattgtcgcttctttcttcttccacagcacaggacggggtgtagaagaagaagaagaagagcatcaagaggatgggttcactgcggcgggttgtgcacctggtgaccgcattgaacggcagcgccaacctccgccacatcgacacgtcgcgtttcttctcccgccggccgccgccgccgttcagcccgtcgtccatggcggtggtgacggaggaatcctccttgccggagccctccatgtcgttctacccagctccggccccgccggagagcaacggcgacatcggggtgatgctcttcggccgcgcccgcgacaggctgctggtgacggaccagtccgacagcgccgccatctacgacgccggcacgcacgccctgctcgcggagaccaccccgctgaaacccaagtactggccagtctccgtccctgtaggcgacgacatctacctcttcgacctgtaccccagggtgccctgcggcggccgccattgcttcgaggctgtcacggcggtggattcctcttcttcttcttactgctcccgtgcgctcccgccgccgccattcctgtttgccccgggctacagccccaagcctatcgagtcctacacggtggtcggcggatcggaggtgtggatctccacggcgcgcgcgggcacctacgccttcgacacggttagctgcagctggagcaagcaggccgactggccgatgccgttcgccggcctagcggagtacgtccccgagcacaagctctggttcgggctctcctcctccaggagggacaagcacccgctctgcgccgtggacctcgccgccgccgcctcgccggagacggggccggagctgaccaacgtgtggatggagctgtcagtgccgagggaatggatcccggtcgaggccttccttgtgcaccttggctctagcaggttcttcgtggccagattcttccaagagctagtcgaggtgcgctgcgacttctcgcagcggttcgacaggttcgctgtcttcaccggcgttgagctggagcgcacctcccgtggtgagctccggatgatcaagcacaagtcggagcgttacagcatcgctcacaaagtcctctgccatagtgttctttgatttcacaacgtcctcatcgtacctatttcctccgtttcatattgtaagactttttagcattaccgacattaatatatatattaatgaatctagacatatatacatgtttagattcattaacatctatataaatgtgggaaatactagaaagtcttgtaatatgaaacggagggagtatatatatgtctagattcattagcatacgtatgaatgtcggcaatgctaaaaagtcttataatataaaacggagggagtatctatgataaggcatgtaaacaatcaattatttggttggtgaagatgagttagctggagtattttgaaattatgcaatttcttgtaatactctgtattttcaaacaggaaattggaaaatagatgctccctctttagttcattggcaaaaaagaagtgaatattgttttgttcatttggcctgtctctagactataatgaatactcaggagtatcattcattgcattgccatcgattgaattttcattacattgccaacattcgaatcacacaacttttaaagtttgcatgcagatgttttagcatggcattgtttcccgtctgttactattaatcttgggattgagttgagtctctgaatgtggcaattagtctagagttggtttttttaggttcctcaaaattgtgtatgtaatgggggtgttactttgctggtgatgaatacaatgacatattcacatccatataggcatcaggggcatttctttgctgagatatattaacatattcacatccatatatgttgggaataaatggcacccatgccaactgaaaacaccactttttaggttagatttgtcgcagtgcatcacgtttcgtcgtttctgtttgtcttgccattcaaagcatgcacctcaagttgtttcctagctgagtctatagaaggagctaggcagctagcctataaaagtgattagatttactttgattctttgaagaagacaatctcaatccattttattctcaagccgttgatcaactataattgttttttacatatagattgttctggttctcaaactatcctgaaaactttatgcatttttttctaatcttaattaaatcggtagcactcctgtctcccattgttccttttctttttttaatgtcactacctaactgaagcttaggagcaatagaacagaactttgaacttaggagcagtagaacagaaggcgctggatggatagaactgaacagtgagcttaggagcaatagatcagaatgtgctgtatggttgggcctcctattattgagattgtccggtgttccatgtgcgtgtgcactgggagtggctttgtcagaattcttgttcgacttgatctttggcttaagtgaatctaatgtcaagcaatttatgtgccaccctttctctaacatagtggtatactccaatctcaactagcaaagactgacctggctactgtgtgctggtttcttgagctccatgagaccaagtttttgccaggaaaagctgcaaatcgtccagtagaacatgtgtcattgaggcatctggatcaagctgcatcaaccaatgtatatgaactgcaacaattggcaacaacgaccctccagtacagtaacttgttcaggtgatggaagggaagcttcttagcccagttgggcaatttttctgaagttaacataggttggttattgaacaacattcgtcatcctaacatggttcagcagcaactccacaccagacaagactccagttcttccatccgtgactcttcaagagacccaagcttcaaactgccatgtgaatcgatcggtctgtcaacaagcggaggcgtccatcaaccgtaggatatgattgttggctgcagccaaaaattacaaaaaaaaattgatatgtttgcactgaactggagattaagcagttaatctgttcttcagattacttcaagccggtgaagcaaagaggcaattatgaataccatcacatttcc

SEQ ID NO: 18371 - DNA, 1032 bp, Oryza sativa
  ref <308>: DATABASE ACCESSION NUMBER: AK068771
  ref <309>: DATABASE ENTRY DATE: 2001-12-06
gaggtcgtctcctctctcgtgtctcccccctggctcccttggctttggctccgctccaggctccagccgagtacccgcctcctcctcctcgctcgccgcggaatcttctggaagcttctagatccggccgctacgatcggcgaagaagggatggggcaggccttccgcaagctcttcgacgccttcttcggcaacaaggagatgcgggtggtgatgcttgggctagatgccgcggggaagaccaccatactctataagctgcacatcggcgaagttctctccaccgtccccactataggcttcaacgtggagaaagttcaatacaagaatgtggtgttcactgtgtgggatgttggtggccaggaaaaattgaggcccttatggaggcactacttcaacaacaccgatgctctgatctacgtagttgattccctggatagagagaggattgggagagccagagctgaatttcaggccattattaatgacccttttatgcttaatagtgttctattggtgtttgctaacaagcaagacatgaggggcgcaatgactccgatggaagtatgcgagggccttggtctatatgacctgaacaaccgtatatggcatatccaaggaacctgtgctctcaaaggcgatggcctctatgaaggattggactggttagcaacaactctggatgagatgcgagcttcagggcggataacttcaacatcatcgtcatgaagaataacaagggatagttgatccttgcgctatgtggattgacttgatgcctgcatcttgctttcttttccatttgatttcctcctctcctgttgtagctattggtcgtgaactgggcgaggctttttagtaaagctttgattcaggcaaaactgtagtgttacgaaagacaggtgacagtgatgcacttgcacttgggaggagtggttggtttacttactgaaagttcatcttttcgtggaagcgggagtggttgtaaatatatgaagctgctactgtactgatataattgtggttgctctt

SEQ ID NO: 18372 - DNA, 2640 bp, Oryza sativa
  ref <308>: DATABASE ACCESSION NUMBER: AK099069
  ref <309>: DATABASE ENTRY DATE: 2002-08-28
gatccgtcctcctcctcctcctctcttccatcgccgctgctcgcttcctccccctctcccacgaaagatggcgtctcacattgttgggtacccccgcatgggccccaagagggagctcaagtttgccctggagtctttctgggatgggaagagcagcgctgaggatttggagaaggttgcgaccgacctcagggccagcatctggaagcaaatggctgacgctgggatcaagtacatccccagcaacaccttctcgtactatgatcaggttcttgacacggctgccatgcttggtgctgtcccagagcgctactcatggactggtggagagattgggttcagcacctacttctcgatggctaggggcaatgccactgtccctgccatggagatgaccaagtggtttgacaccaactaccactttatcgtccctgaacttggtcccaacaccaagttctcctactcttcccacaaggctgtgaatgaatacaaggaggctaaggcgctcggcgttgacaccgtgccagtacttgttggaccagtttcatacttgttgctctccaaacctgccaagggtgtagagaagtcgttcgctcttctttcccttctgagcagcatccttcctgtctacaaggaggttattgctgagttgaaggcagctggtgctacttggattcagtttgatgaacccacacttgttcttgaccttgactctcaccaattggctgcattctctgctgcatacacagaacttgagtcggcactttctggattgaatgtgcttattgagacatacttcgctgacattcctgctgaatcatacaagaccctcacatccctgaacagcgtgactgcttatggttttgaccttatccgtggagccaagactcttgaccttatcaagagtgctggtttcccctctggaaagtacctctttgccggtgttgtggatggacgcaacatctgggctgatgatctcgctgcatctctcactacccttgagtctcttgaggctattgttggaaaggacaagcttgtggtctcgacttcctgctcactcatgcacaccgctgtggatcttgtaaatgagaccaagctcgatagcgagattaagtcatggctcgcttttgctgcccaaaaggtggttgaggtgaatgcccttgctaaggcattggctggacagaaggatgaggcttactttgcagcaaacgctgctgctcaggcctccaggaggtcatcacctcgtgtgacaaacgaggaagtccaaaaggctgctgctgctctgaaggggtctgaccaccgccgtgctaccaatgttagcgctagactggacgcacagcagaagaagctcaaccttccagtccttcctacaaccacaattggttcattcccacagactgtggagctcaggagagtccgccgtgagtacaaggcaaaaaagatctctgaggaggagtacatcagtgccatcaaggaggaaatcagcaaggttgttaagatccaggaagagcttgacatcgatgtccttgttcacggcgagcctgagagaaacgatatggttgagtacttcggtgagcagctttctggttttgcattcactgccaacggatgggtgcaatcttatggatcacggtgtgtcaagccaccaattatctatggtgatgtgagccgccccaaccccatgactgtgttctggtccaagttggcgcagagcatgacctctcgccccatgaagggaatgttgactggtcccgtcacaatccttaactggtcttttgtcaggaatgaccagccgaggtttgagacatgctaccagattgctcttgccatcaagaaggaggtcgaggaccttgaggctggtggtattcaggtcatccaaatcgatgaggctgctttgagagaaggtctgccactccgcaaggcggagcatgctttctacttggactgggctgttcactccttcagaatcaccaactgcggtgttcaggacaccacccagatccacacccacatgtgctactctaacttcaacgacatcatccactccatcatcaacatggacgctgatgtgatcaccatcgagaactcccggtccgacgagaagctgctctccgtcttccgcgagggtgtgaagtatggtgctggcattggccctggtgtctatgacatccactccccaaggatcccgtccacagaggagattgcggaccgcgtcaacaagatgctcgcggtgctcgacactaacattctctgggtgaaccctgactgcggtctcaagacccgcaagtacaacgaggtcaagcccgcccttaccaacatggtttcggccgccaagctcatccgcacccagctcgccagcgcgaagtgaggatatccatagctgcaagttcccttcggttgcgaggacgatgccgtcatagccatctgtttttgaataatctgggtccagtggatccaattgtctgtggttaggtttagtcagtctcggtgggaagatccctcatacccgttttacttttgaatcaatttggtggtttttgaggcagtttgtcggtgtatttgtattgtgtgtaatctgagtgggaatcagcagtgtttcatctgcatctgaatcgttgcggatcaaattacaaaattttc

SEQ ID NO: 18373 - DNA, 1827 bp, Oryza sativa
  ref <308>: DATABASE ACCESSION NUMBER: AK068772
  ref <309>: DATABASE ENTRY DATE: 2001-12-06
gagtgctcgagctaaacgagtgagagaacgagtagtacgtgctgtagtgggtggatcggtcgagatggccgtggcggcggcgacgcgcattgcggtggtggtggtggtcttggcgctggcggttctcgcgccggccgcgcgcgggctccgccgagacgacttcccgccggggttcctcttcggcgccgcgacgtccgcttaccagattgagggcgcatacttggacgacaacaaggggctcaacaattgggatgtcttcacccacacgcaggctggacgaatctcagatggacgcaatggggacgtagcggacgaccactaccatcggtacacggaagatgtggatatcctgcataacttgggtgtcaattcctacagattctcgatttcgtgggcgagaattctaccaagaggccggcttggaggagttaattcagcaggaattgccttctacaaccgtctgatcaacgcactccttcagaaaggcatacaaccattcgtgactctgaatcatttcgacattccgcacgaactggagacccggtacggcggctggttaggcgctgcaatccgggaggagtttgagtactactcggacgtctgcttcaatgcgttcggcgatcgggtcaggttctggacgacgttcaacgagccgaacctgtccaccaggcaccagtacattctgggagagttccctccgaaccactgctccccgccgttcggcaactgcagcagtggcgactcgcgccgggagccgtacgccgcggcgcacaacatcctgctctcccacgccgccgccgtccacaactggccttcgaggtggattggtttttggatccaatattctttggtgattaccctagagaaatgagagagatcttatcatcaaatttgccaaagtttaccccagaagagaaaaaactactgcagaataacaaggttgatttcattgggataaatcattacacagcaatttacgcaaaggattgcatctattctccgtgcacgcttgacacttacgaggggaatgctctcgtatacgccattggtagaagaaacggcaaaataattggcaaacccactgcacttcatgggtactttgtcgtcccagaagccatggaaaaggttgtcatgtacgtcaatgatagatatagaaacacaactatctacattactgagaacggctactcacaacacagcgataccagcatggaagacttgatcaacgacgtcgaaagagtcaactacatgcatgattacctcaagtatctctcttcagcaatcaggaagggagcaaacgtagggggctacttcgcgtggtcaatcgtggacaattttgagtgggtttatggttacaccgtcaagtttgggttgtaccaagtggatttcgacacgcaggaaaggattccaaggatgtctgccaagtggtatagagatttcctcacgagctccagtcttacagacggtctccaagtgcggtcacgtagagcagattcgtgaataattccgatgctagaatacgtctagcactggatagttattttgtacttggagttgtatatatactcagatgtattgttgtgtacatgactacatactttatagttacttcagttatggacttgtgatcctatcaaaatgctctcaagctcaattcgtggacacacaagggggtgctagtacagcttagcataagtgtacttatttaccaatagagagcaccggagcaagctgtgtacgttatgtataggacgatgtgtttatgaagccatgtgtaaaatgttatcatgttttgtgaaagtgcatccgaagtttatttgtgtgatc

SEQ ID NO: 18374 - DNA, 2415 bp, Oryza sativa
  ref <308>: DATABASE ACCESSION NUMBER: AK068773
  ref <309>: DATABASE ENTRY DATE: 2001-12-06
gatccacggcaacgaaaccgagcccaacccactttgccccgcctccaccctacggcgccggcggccatgcagcgccgccgccaccccctcctcctcctcccccgccgccgcccgccgtccagaaccctactctcccgcctgctctcctcctcgccgcccgccagcggcggcggcggcggcgggggaggaggaggggtggcggtgaagcaggtgacgcgggggaacctggcggaggcgctggaggagctccgcgcgcgggtgcggggcgcggcgttcgtggggatcgacctggagatgagcggcgtgacgagcgcgccgtggagggacaccctcgagctcgaccgcgccgacgtccgctacctcaagctccgcgactccgcggagcggttcgcggccctgcagctcggcgtctgccccttccgctgggaccccgccaagtccgccttcgtcgcccacccgcataacttctttatcttttctcggaatgagcccctgaatgattgttcaacacatgaatttctgtgtcagaccacatcgattgacttccttgcaaagtaccagtttgatttcaacacatgcttccgtgaagaacacaagaagaagaggcacttcagaaattatatacattgcataataatgaaacatctgcatatccaaacacttccgaggaggaagaagatgcgccattaaagagtgctgcggatgttcttttcacagaaagaatgaagatcaaattcaatgagtggcgcaattcaatagtcagcaatcaaagagtcgatgaccataggtcagaaaacttcaaattcgcagaccagttccagactgttttcttcaaaatgcgtcctgctatcatgcttaatggattcacgtcacatcagttaaagttaatccgacagattttaagaacacattttagggaccttgtgtatgtgtgtacatttttggaggatggcgtatcagagaagagagtagtttatacagacaccaatgaagacaagatatccttgatgaaaaatgttcgggaagatctactaaaaagcagggaagcaaaagtcaaatcagcagtagggatccgtcatgtcattgatcttcttgcctcagaaaggaaattgattgttggtcatagttgtttcctagatattgcacaaatctacagcaaatttgttggtcctcttccttcatccatggaggaatttgccttgagtatcaacagaatgttcccacatatggcagataccaggcatcttatgtctgttaatgacgcggttcagtatcgtatgaggcacaaaagcaaatcactttcgtcagccttttcattgttgtgccctgcacttcatgcacctgatgagaagtcatccacccttccttctgtgagaattgaagtcgaggcagatgaaacagtgttatcttgcttcacttcaggtgctaagcatgaagcaggttatgatgcattcatgactggatgtgtttttgttcagctctgtgcttatcatggcattaaatttgagcaactctctcccctggaggacctagcaacaaacattaatctgaagaaacacatcaatctgctgcccccatgctggaacagtggaacagtgcttgatttgagtactggcacggagagaccagatgcaggttataagcgtagatatcctgctgccgtgtatgacaacgtcattcttatctggggattccagtctaaggtgagaccaaaggatataaaggactgcatctgcaaagtgtttggtcgagcttctgttacatcagtcttcccgattgattccactgcggttcttgttcaattcagcaaacaagagtctgtaaacgatttcttggatctgaaggctaccttagagagtgcagatagtgctatttcagtcttgcaccctttgtcaactatactggaaggaggcaaaacacgagcggcaaaatatgatacctacagagatatttgccgctcctctgtatcaaagttctccttcgcggatcaagctgaagcggtttgttcaacttcaaacagcgagtccaagttcaaggagtgcaatgctgctgatggatccggagcatacgggagtgctcttgatggaactgtgcctgcctcggtgcagcagtcaggaggagcgaagtctggctccaagaataaaggcgacgatgatttttcataccaggatatcttagatgcgctacaggatggcaaaacatcagttggcaaacgaatgagtaacgcatgacttacatttttgccttctccttgggcctgtctgctctgaataacaattgttttgatgggtatcttatttcattaatctacttggcaggatgccaagattgctgtttattgtgtgcacatggtgcactgtaggctacagaaccttttactgatgaaagggaaaaaaaaactttctgatctcattt

SEQ ID NO: 18375 - DNA, 3198 bp, Oryza sativa
  ref <308>: DATABASE ACCESSION NUMBER: AK068774
  ref <309>: DATABASE ENTRY DATE: 2001-12-06
gcactaatctagcctgttgcagttcaatcagagcttctgaccttgcaaaaggatgagctgctaaaagcatttcagtggcagctcaagagagagaagagagagaaatagaaactgcccaaacatgggggtttctccatggattatcatcttcttgttgattgttcttgtgcaagcttttgtcgcttcggccgatacgaacgcacaggacacttctggacttaacgggcttgcaggtagctggggcagcgcaccatcgaattgggctggcaacgatccatgtggagacaaatggattgggataatttgcaccgggaaccgggtcacatccataagactgtcaagtttcggactgtccgggacgctttccggggacattcagtccttatcagaattgcagtacctggacttatcctacaacaagaacttgaatggcccccttccttcaaccattggaaccttgagcaagctccaaaacttaattcttgtcggctgcggctttacaggtgaaataccaaaggagataggccagctctcaaacctgatatttctatcattgaactccaacaagttcactggtagcataccgccatcgcttggcggcctctcaaagctatattggtttgatctggctgacaatcagctcactggaggacttccaatatccaatgcgacaagtcctggtctggacaatctcacaagtactaagcacttccattttgggataaaccagctctctggcagcatacctagccagattttcaactcaaatatgaagctgatacatctgcttcttgacaacaacaaattctccggtagcatcccttctaccttaggccttcttaatacactggaagttctgcgtttcgataacaatgcgcagttgaccggaccggttcctaccaacctcaagaacctaaccaagcttgcagaattccatctagcaaacagcaatcttactggtccattgccagacctaactggaatgagctcactcagctttgtggacatgagcaacaacagcttcagtgcatctgatgcgccctcctggataaccactttgccatcgtcattgacttcactgtacctagaaaatctgcgcatcagtggggaggtaccgcaaagtctctttagtctcccttcaattcaaacactgaggcttcggggcaaccgtctgaatggcaccctaaatatagcagacttcagcagtcagctccaactagtcgatttgcgggacaactttatcacagcactaactgtaggaacacaatacaagaagactctcatgctctcaggaaatccatattgcaaccaagtgaacgacgacgtgcactgcaaagccaccggacaatcgaacccggcattgccaccatacaagactacctccaactgccctgccctgcctcccacatgcctctcaacccagcagctgagcccaacctgcatttgctctgtgccatacagaggcacactcttcttcagatcaccaggtttttcagacctgggcaacagctcatacttcattcagctggaggggacaatgaaagccaagttcttgaacctcagtctcccggtcgattcaattgcgatccacgacccgtttgtcgacaccaacaacaacttggagatgagcttggaggtgtaccccagtggcaaggatcagtttagtgagcaagacatttctggcattggtttcatcctgagtaaccagacatataagcctccttctaactttggcccatactatttccttggacagacctactcctttgctaatggggcgttgcaaacttcaaaatcgaacacaaaccacatcccgcttatcgtcggtgcttcggttggaggtgcagctgtaattgcagcattgcttgcactcacaatctgcattgctagaaggaagagaagtccaaagcagactgaagataggagccagtcttatgtttcctgggacatcaagagcaccagcactagcactgccccgcaggtgcgaggtgcgaggatgttctccttcgacgagctgaagaaggtcaccaacaacttctcggaggccaatgacatcggcaccggaggctacgggaaggtttacaggggaacacttcctactggtcagctggttgccgtgaagagatcccagcaaggctccctgcagggcaacctcgagttcaggactgagatcgagctcctgtccagggttcatcacaagaatgtcgtcagcctagtcggattctgcttcgaccagggcgagcagatgcttgtctacgagtatgtccccaatggcaccctcaaggagagcctcacagggaaatctggtgtgaggctggactggaagcggcggctccgggttgtcctcggtgcggcgaagggtatcgcctacctgcatgagctcgctgaccctccgatcatccaccgtgacatcaagtcgagcaatgttctcctcgatgagcggctcaacgccaaggtctccgacttcggcctgtccaagcttctcggcgaagacggtcgtggccagatcaccacccaagtcaagggcacaatggggtacctggacccggagtactacatgacgcagcagctgacggagccggagcgacgtgtacagcttcggcgtgctgctgctggaggtgatcacggcgaggaagccgctggagcgcggccgctacgtggtccgggaggtcaaggaggcggtggaccgccgcaaggacatgtacggcctccacgagctcctcgaccccgcgctgggggcctcctcggcgctcgccggcctcgagccgtacgtcgacctggccctccgctgcgtcgaggagtccggcgccgaccgcccctccatgggcgaggccgtcgccgagatcgagcggatcgccaaggtggccggcgctgggggtgcggccgccgccgagtcggcggcgtcggactccatgagctacgccgctagccggacgccgcgccacccctatggcggcggcggcggcgacagcgcgtcggagtatagcggcggcgggctgccgtcgatgagggtggagcccaagtgaagatggtggatttgtttccaacgttttgtgtacagcttgatgatttagagtatgtacgatttcatttgtgtaaattttggtcgtctatgcatgctaagtttggatttttgaatttgaatgtttgatgatggctaattgagaatttggggtcgttgtcaatcgaactataccc

SEQ ID NO: 18376 - DNA, 956 bp, Oryza sativa
  ref <308>: DATABASE ACCESSION NUMBER: AK068775
  ref <309>: DATABASE ENTRY DATE: 2001-12-06
gactcttgcagaattcttcctctccgcttctctgctcatctgctggtggtggctgcagattgcgctccgatggcgcaagcggtgcggccgtgcaatgccacccttctcgcgcggctccgtgacggcgaggcgaggttcgagctcctcgaggactccgcggccgcggccgcggcctcgcccgcccctgctccagtttggcccggcctcagctgcttttctagggttgctacctccctgaggggcgggtggtcgggggcgctgaacaaggtggagcactacggggtccagagggtcacgggtgatggccggtgcatgtttcgggcgttggtgaaaggaatggcaaagaacaaggggattccattgacctcaagggaggaggtacaagatgcagatgatttacggatggcagtaaaagaagttatctgcgatgatgagactgaacgacaaaaatatgaagaggcagttatagcaattactgtggatgaatcattgaggcgctactgccatagaataaggcgatctgatttctggggtggagagtcagaactcttggttttgtctaaattgtgtcggcagccaatcattatttatattccagagcgtgagtaccatgggcgtggaaatggttttattcctatagcagagtatggactggaattctccaaggactcaaaacagtggaagaaaaaggtgccagtaagactgttatacagtgggaggaatcattatgatttgctagtataacatggttgcaccgaacgttatcagtaccctgaaggtctgaactatttatgacaactgattttgattccatcattccattgttattctttgatcccacgtagttttttgcttgcgtctctgcagacagcttcgatgctactccatccattccaaattgatctaatatagttttttttgaagttattcttaaatgatctacatatttgtgttcc

SEQ ID NO: 18377 - DNA, 1524 bp, Oryza sativa
  ref <308>: DATABASE ACCESSION NUMBER: AK068776
  ref <309>: DATABASE ENTRY DATE: 2001-12-06
gaacacccaaccccctctctctctctatctctctcctctctctctctctagctctagctctagctcgtcgccgccatgaacgttccaagcaaatgcatggctcctgcaaagtaaaaaaagaagaagaagcagcagctgcagcttctcttcagtatcgatctttaactgtatcgagctagcttagcttagcttagctctctgccattaacttgtgcttcactgagcttgagctagctagcttcttggctgtgtgactgagtagctctagctcctcgtcgtcgtcgtcgtcgtcgtcgtcgtcggcgtcggtggtggtgtgaattgatagaattgatacgatggagagggcggctgcggcggcgccggtggtggtgaggcatggaggagtggtgttgccgccggggttcaggttccacccgacggacgaggagctcgtggtgcagtacctccgccgcaaggcgttcggcctgccgctccccgccgccgtcatccccgacctccacaacctcttcaagctcgatccctgggacattcctggtgcgagcagcgacggggacaagtacttcttcgccgtgcggccacctgcggcgagggggaggaggcagcatgtgacggcgagcggtgggtgctggaagccggcgggcgggcgggacaagccggtggtggtggcccggtgcggcgggagccacctcgtcggcgtcaagaagggcatggtgttcgtcccacggcaagggaggaaggcaccggcggcggcggcggcggccgccggcggtggctgctgggtcatgcacgagtacagcctcgccctgccgatgcacaagaagggttgcttggctgaggctgaagaatgggtagtgtgccggatatttcagaggagcagcagcggcagccggtcgccgaggaggcctgacaacgacgtgaggcgaacgatgccggccgtcgccgagctcggccggtcgccgtcgccatcgtcgtcgtcgtcgcaatccagctgcgtcacaagcagctccgaccaggaagaggtcagcagcggctagctagctgaagaagaatgcaggcagcagcagcaagcagctaagctgcctctcaaagagaggcttgagtgttagcctagctaagcatatatatttatagccggccaaaccctctgaaagtgatctgcatcaatgcatgcccccctttaatttcttcttcctccttaattattttttcccaaccatgtaatgtaatgtaatttaatgtaatgcagtgtaatgtaacgggaaggaagcactgaattaatcaaattaaattaacaaatgaagagtgctcaaaagtccaaggaagcttctaaggttcaggagccagatattatctacttaattaattaattatgggcacatatctgtagttgctagctagctgcatatgcatctcgtcgttgtcgatccatttgtaacttgcaagttgtgttggtgtaatattgtaatatttttctccgatggttgagaaattaatctgaaatccattatagcaattaattgc

SEQ ID NO: 18378 - DNA, 2135 bp, Oryza sativa
  ref <308>: DATABASE ACCESSION NUMBER: AK068777
  ref <309>: DATABASE ENTRY DATE: 2001-12-06
attgttgcttccgctatttgtcaagagataactctgatttgcatccaagtttaaaggagcttgcattccaaaggctaatatttatgactatgcttgcgtgggaagatccatatggtgaagatgatgacacagagtcttcactagataactattctatactgacttgttggagaagatgcctttgtccgaattgcccctgctgtggcaggtgtagctgatgtttcaacggctcattatctcttcagggcccttgtcggttctgaaaaggggctttctttagatatatggacaacataccttggtgaacttctgaaagttcatcatgggaggcaaacacataaaagtggagatcattttttgtccgatgagcaagtcctatgcataggctctagtagaaaaagacctgttctgaaatgggaagaaaacactgcgtggcctggacacttaaccttgaccaacaaggcactctattttgagatgtgatgactttgggcccaactcctccacctttacattgatattggcaggccattggactgacaagtaccaataaaccattgaagcttgaccttacagatcgtaattcaagggttgagaaagcaaaggttggaccatttggatccagattgttcgactctgccgtatctgtttcatctggttcagtgtcaaatgagtggacattggagtttgttgattttggtggagagatgagacgagatgtatggctcgcattcattagtgaaatcatttctgtgtataggttcattaatgaatatggaccaagggatgatgatccagcaattcatcatgtatatggtgcccacagaggcaagaaaagagctgtaagtagtgcagcaaatagtattgcaaggcttcagtctctgcaatttatacgtagactttatgaagatccagccaagttagtacagttctcatacctgtcaaatgcaccttttggtgatgttgtgcttcagactttagcggttaagttctggggcgggccacttgttacgaactccaaagcagcaagtcaaagagcatctcagtggcatagaccttcagaagactcatctagcgcccatgctcatatttttgacatagatggtagtgtatacttgcgcaagtggatgacatctcccagttggacatccagccactcggccaacttttggagaaactcctcagttaagcatggtgtaatattgagcaaatctttagttgtagctgataaaaatcttgtagaaaaggctatggttgcctgtaaagagaagagcaaaatagttgaaaggacacaggccacaattgttgccgctactattgaaggtattccaagcaacattgacctcttcaaggagcttatacttccttttgcaatagtgagtgaaaaattctacaagctcaaacgctgggaaaattctcgtacaaccgcttgttttctacttgtggtttatactattatcttcaggaacatgctttcttatgttcttccattttccttgatgatgttggctctttccatgcttgccctgaaagggctgaaagaacaaggtcggttgggtagatcttttggcaaagtgacaataaaagatcaaccaccttcaaacacaatccaaaagattatagctcttaaagaggcaatggcttcagtggagaattatcttcagaacctgaatctctctcttcttaaaatacgcacaatctttttagcaggccaacctgaggtaacgactcaggttgctcttgttcttctagcatcatctgctgttcttcttgtggttcctttcaaatatgttcttgcattttttatgtttgatcaattcacgagggaactagaattccggagggagatggtcaaggcgttcatgagcttcatgaaggaacggtgggaatctatacatgctgctcctgtggtcgtgttaccatatgaggacggtggcgaacaacataacaagacactcccaccaaaatctacgcagcaaacacaatctggtagtgtacaatctactgatacgtatatgaatttaagcaatggaacttacactcttgatatttgaagttgtgagcgctttgctggtatgtacagttttgtacagtttcaatattgcacaaaaaaaaaagatatagttcgaattagg

SEQ ID NO: 18379 - DNA, 1194 bp, Oryza sativa
  ref <308>: DATABASE ACCESSION NUMBER: AK068778
  ref <309>: DATABASE ENTRY DATE: 2001-12-06
gatctctctcccgagaaatccccaatctgagaaatccctaactccgccgccagcgcgcgactccgcggcatcgccatcctgcgcgcgaggctgccgccgccgccactccaccgccgccggccaactcctccacgcaactcccccacgccagaccccaacgccgaccaactcctccacccacctccctgcctaatcctcctcttcccccaccgtctccgtcgtccatcgccgcctccaccgtccatcgccgcctccgccgtcgcccctttggacctcctcttcccccactcagctcatccccacctcagccatcatccaccaggccgaggcatactccatctccaggccttcctctaccctcctcggcttcattggttgttcccacccagccatatccgttcactgatttttttttttttttgttcagagagtgatttggtcatccagatcataagcaagactccggaagaatggaagttgtgtgcggaactgcgttggtgtaatgaagagtggataaaaaagtcatgcgaaggtagggtatacagggaaatgatggatgggccagcacaccgtcaaggcagcgcttcacttgaccgattccaaaagaacatggagaagaaggagaagaggccaatgggtatatttgaggcttatgcagaagcaaggaagagtggaaaagatggagaggactattgtactgaccgtgtcaaggataagcttgaagcttattttggagttgttaaggaaaagcatggtgcaagtcctgatttgatgaaataacccattgatggcgcttcaatctgcaatgaaacttaatgttttgcctccacgaccagcggccccaacatgccccactgtctatttagccatcatctaagatcaagtgcgtccaattgccagccatgattcattgctacagaaatccatccaaacatcaagatctggaacaatgatttttggatgtagttcatgttattttggtcctacctatccaatggactcccagatattattcaagaactggtacttatgatgttagaaaaaaatctacctatatgaaggagcaaacattactttcgtgtgtattccatagattggttgtggctgtttgaatatgtatgtgtgcaactaaaacaaatatctggtatcaacatttgtacagatcagtttatgctttgtacttgcactgattgt

SEQ ID NO: 18380 - DNA, 1281 bp, Oryza sativa
  ref <308>: DATABASE ACCESSION NUMBER: AK068779
  ref <309>: DATABASE ENTRY DATE: 2001-12-06
gttcctctcctctcttctcctctcccgccgccgccgccgccgcacccgccgatctccatcctgcgagcagcggcggcgctccacctttccctccccaaatttcaaaactcgattcgaaatctgccacgctttattcccgccatctcattctcacctacccaattgtctcctcctcctcaaatttaggttgaaaaagatattcccggcgcctccccacaatcagctagctctacaaatacctcccgcatgagctccatttgcgccatgagatccctcctcgccgcctccaccttcctccgctccggcgcttcccctctgctgcggcccctttcccgtcctctcccttcccgcctgaatctttcccgattcggtccggtgaggccggtctctgcggcggcggcggcggcggacaagtctcgaggcggaggcggctccgcgatggaggcccagccgtcgtatcccggtgagattcacgtcatcgtgggccccatgttcgccgggaagaccactgcccttctccgacgcgtgcaggtcgaggccggcactggcaggaacgtggcactcatcaagtctgacaaggacaataggtatggattggattctgtcgtaactcatgatggcacaaagatgccatgctgggctctacctgagctttcaagtttccaagataaattaggaacagaggcttacgataaggttgatgtcataggtattgatgaagcacagttttttgacgatcttcatgatttctgctgcaaagctgctgaccgtgatggaaaaattgttgtagtcgcagggctagatggtgactacaaaaggaacaaatttgggtcagttctggacattatacccttggctgactcggtcaccaagctcaccgcacgctgtgagttgtgcggtcgccgtgcattcttcacgctgaggaagacacgggaaactaagaccgagctcattggaggagctgatgtgtacatgcctgtatgtaggcaacactacctggatggtcaaattgtcattgaggccacaaggattgtgctggatcttgaaaaatccaaggttatccatgctttcaagtgagtgaatagctcattgtatcctttttacttgcaaggcttaccatgtgtaacactatcatcatcaaccatgcaatccatctagttatcgtagaagatgatggaaagaccacaatattcagagactctccattaaacgattgtaaatatgtatcagtccagattctgttgggaatgaattttatcttggtttgtggatggaggaatt

SEQ ID NO: 18381 - DNA, 1946 bp, Oryza sativa
  ref <308>: DATABASE ACCESSION NUMBER: AK068780
  ref <309>: DATABASE ENTRY DATE: 2001-12-06
ggtattagagctattgattgattgattgctgatcgcttccagttccagcaatccgtcggaatatctccccccgatctcctcttcttcttatccacgcgcggcacgacacgagcagctttttgcctgcggccgctgctgcttctgtgtgagattgttcgctggggatggacggcggtggccagggcgtcgcgcggcggcacggcgcggtggcggaggaggatcccgaccgccgccgcggcgaccgctcggggaaagaaggtgacgacgacggcgtcgacgtcgacgagaaggcgcctccgcctcgccggaccagcaggcgggtcgcgtcgctcgacgtcttccgtggcctcaccgtcgctctgatgatactggtggacggcgccggcggcgagtggccggtgataggccacgcgccgtggaacggatgcaacctcgccgacttcgtcatgcccttcttcctcttcatcgttggcatggctattcccctctccctcaagaggattccagaccgcggtcgagctgtgaggagagtagtgctcaggacactgaagctgcttttttggggaattctgttgcaaggcggttactcccatgcccctgatgatttgtcttatggagttgacatgaagcacgtgagatggtgtggtattctccaaaggattgctcttgcatacttggtggttgcagttctagagatcgtaacgaagaatgcaaaggttcaggaccagtcaagttcgggcttctcgattttcaggatgtacttctcccagtggattgttgcatgttgcatccttgtgatctacctgtcccttgtatatgggatttatgttcctgactgggatttcagagtgtcagatgttaaaaatccaaacttcggcaaaatcttgacggtgacatgtggtacacggggaaaattaagtcctccttgcaatgctgtaggttatattgaccgtaaagttcttggtatcaatcatatgtaccacaggccagcatggaggaggcacaaggactgtactgatgattccccacatgagggaccttttaaaactgattccccggcgtggtgttatgcaccatttgaacctgaagggttactaagctcactgtccgcggtgttgagtacgatcatcggggtgcattatgggcatgtgcttgttcatatgaagagccacacggacagactaaagcagtggtctatcatgggcataactctcctcattcttgggcttactctgcacttttcacatgcaattcctttgaacaagcaactgtacaccttcagttatatctgtgttactgccggtgcggctggaatcgtgttctgcatgttctacttcctggttgacatcctgaatctgcactacccattcgcacccctgaaatggaccggcatgaacgcgatgctggtgtacgtgatggcggcggcaggcatcttcgaagggttcttgaacgggtggtactacgagggcaccaacaacacactggtttactgggtgaggaagcatgtgttcgtgaaggtgtggcattccacccgtgtgggcatcctcctctacgtcctcttcgcgcagatcttgttctgggcccttgtcgccggcctcctccaccgtgctcgcctctactggaagctctagcactgcactggtacactacactacactacagcgtttacacaggggctgttcggattgatgtcattttcaaccgaactattttttttaaaattaccaaaaagaagtgttgcatttagtttgttgccaaactttgataaatacataagaaatcctaccaaaattttgataacattgttaacttgtcaaaatttggtaaggtttattttcgctacaatctgaatagcctagtcttcagatttctcgttgatggaattgtgcatttagccgtgattaaaatttgaaaccacaagtgcaattgggatcttgtgcagtctc

SEQ ID NO: 18382 - DNA, 1778 bp, Oryza sativa
  ref <308>: DATABASE ACCESSION NUMBER: AK068781
  ref <309>: DATABASE ENTRY DATE: 2001-12-06
ggttttaagagtttgagggtcgagatacccggttttgtggtctagggtcacggattaagggtcacaaagtgaacttattcctcgtctcgaacactgggaggaaacccggcccacaaacctaatgatgccaatttgtaggcccgtcccggcccggcccacttgcagtctgacacctacttgcctttgccttaatcctcctctctctctctctctctgtagttttcccctttggttttgctctgccgtacgcctctccaactcgaatcatcccatctgtcggtgatttccgtccaatctttgatcggattccgggggccctcatcatcgtcgagctcttcggtcgttcgatcgggcgcgcgaaattcttccggcgctgattttgacggctccggccgccggcggcggttggttggttggttcttggcccggattttcggggagatttgagggggcaggtttctcctcgccccgcggtggctgtgtgggttcttggattcgttgtttggtgactgtttaagcggggatggagcggcggagatggctgcaggccgcggttctgtgttgcctgctggtgctttgctccgggagagaacttaagactaaacacaccccaatatacaactcgaccttagccaggacgcttgcggaatatacatcagcagtttatacagctgacttgacacaactcttttcgtggacctgtgaaaggtgttgtgacttaacagaggggtttgaggtaatagaactgatcgtcgatgtgaaaaattgcttgcaggcatatgttggttatgctagtgatatgaatgctgtcgtagttgtgttcagaggcactcaagagaccagcattcagaattggatagaggacttgttttggaaacaacttgatctggactacccaggcatgcctcaagcaaaggtccacagtgggttttattctgcataccataacacgacattgcgcgatggtgttgtcaatggcattaagaaaactagggaagcatatggtaatattcccatcatggtaactgggcattcgatgggaggagctatggcttcgttttgtgcgcttgaccttgtggtcaactacaggttaaaggatgtgacactgataacatttggacaacctcggattggaaatgctgtgtttgcttcacattttaagtgtcatttgccaaatgcgattcgagtgactaatgcgcacgatattgttcctcatttacccccatactaccactacttcccacagaaaacctatcatcatttcccacgagaggtatgggttcataatgttggacttggaagcctagtctattcaatagagcaaatttgtgatgactctggagaagacccaacttgcagcaggtctgtgagtggaaacagtgtgcaagaccatataaactaccttggcatcagcatgcatgccgaggcatcgggatcttgcagaattgtcacaggtgacaataaactgcagtataagatggacagcgatggcaacattgttttctcgaagcaacctggtttatcagttgatcagttgcatagttcacagtgagcaaactcatgatgacaggaatcttccatgccctctatgtaactgtatgatcacaccacaggaggatattggaagaacaaatttgtgtatagttctttgtacagcatgtaaagcattatagatactgtacgaacgtgctcttggctggactaatttatcatgagaatgtcatgcaaaagcttttccaagcagaaccatgccaattatcatgttcttatttctgtgt

SEQ ID NO: 18383 - DNA, 2792 bp, Oryza sativa
  ref <308>: DATABASE ACCESSION NUMBER: AK068782
  ref <309>: DATABASE ENTRY DATE: 2001-12-06
gacccgctgcctctgcctccgcctccttccttccttcctgcaaaaccgcgagcgccccgcggctctctgctcccccactcctcccgcggagcccctcgccccgccggatcccacgcacgcacgacgcggctcgacgcgacgggttccaccgtgcggccgatacgccgccagagccccgggttctacccggaaaggcataaccctgacattctcttgagaaaaggaagaagcaaccaaaaatggcctcgagggcgatcattaggagaaggaagtatgctctggagcatactaatatccctgttttattacgacattcatctatttctacttttgggcaagaaaagtttggatgtgaaattgagcaaagcactgcatctcaaaactcaagagaatcaaaccatgagaaggcacaatacatcttaaggaaacaaggacttttgggccttagtatcctgtgtcacccaactcgtggtgcttcacttgcttcttatgaatctaaaccacagacttttggtttccccttgggagccaggtatttcctacagtcagtacgcccaacatcaagcactgctgggcagcctaaagttggtattctggacgagcggagcgagaaccagaaccagaatcaggggaaaaaggaggcatccccagaagagtgtgatcaggcggtggaaggcttaagcactgcaaaagctaaagctaaagctaagctggtgcaggaagtacaaaagtctgaccagtcaatcatacataaattttgggcaatacttctaggtattggacctgctctgcgtgctgttgcttcaatgagcagggctgactgggctgcaaaattgaagcattggaaggatgagtttgtttctacactgcagcattattggttgggaactaagctgctgtgggcagatgttaggatttcatctagattgttagtgaaacttgctggtggaaagagcctaacaagaagagagaggcaacagcttacacgcacaacagctgatttgtttaggcttgtaccttttgctgtgttcatcattgttcccttcatggaatttttactaccagtcttcctcaagatgttccctaacatgttgccatcgactttccaggacaagatgaaggaagaggaggcattgaaaaggaaattgaaagcaaggatggaatatgcaagatttttacaagatactgcaaaagaaatggcaaaggaagtgcagacgtcacgtagtggagaaatgaaacagacagctgaagatctggatgaatttttgaacaaggttaggaaaggtggacatgtctcaaatgaagaaattttgagctttgcaaagctgtttaatgatgaactgactttggataacatgaacagagcacggttggtaaatatgtgtaaatatatggggatccaaccttttggtacagaccactacctgacattcatgcttcggaagaaattgcaagaaattaagaatgatgataagatgatccaggctgagggcgtggagtctctttctgaggaggagcttcgacaagcatgtcgagaacgtggccatcttggtttgttgtcaacagaggagatgcaaaatcagctcagagactggttggatttgtcacttaatcattctgtgccatcatctcttctaatactatcaagagcttttaccatgtctgggaaaatgaagcccgaggaggctgttgtagcaacattatcttctcttccagatgaagttgtagatactgttgggacagttcttccttcagaagattctgtgtccgacaggaagcggaaattggaattcctggaaatgcaggaagaacttatcaaggaagaggagaaaaggcaagagaaagaagacaaggcaaaacttgaggtaccaaaggcaactgaagaagatgtggctttgaaagaaatgactgagcctactgctagggaagaaaaggaactaaagaaagcaaaagttgagcatgacaggaaggagcagctttgtgatatcagccaagcattggccgtgcttgcatctgcttcttctgttgccaaggaacgtcaagagtttctgaatcttgtcaataaagagatagaactatataacaccatgctggaaaaggagggtacaaaaggtgaagaagaagctaggagagcatacaaggctgcaagagaggaatcagaccatgctgcagagatagctgcaggagaaaaggtctcttcagcattaatagagagggttgatgcaatgcttcagaaattagagaaagagatagatgatgttgatgcacgaataggcaaccgctggcagctgcttgatagtgaccgtgatggcaaagttacccctgacgaggtagcagctgcagcaaattatctcaaagacactatagggaaggaaggcgtccaagagcttattagcaatctttctaaagacaaagatggaaagatcctcgttgaagacattgtgaagctggcatcacaaacgggagaaagcaacgaacaagaagaaaccccacggcaataggtagataaacagtcgcttccgtggctgttgaagttaccagcccactcttttccgccggtaagcgcatggcagtgccatgtgtaacaaaaatggcaggacggtcattttttttattccgactgactgccgtggagagagttagcgtatagttaggcatcaggtttctataggtgaatggcaactgaaattccaacctgttgtgggttgccattgaaatggacatgctgaacggccagatgggacaataattcatgcccaatccaaataatctgaataaatatatagatattg

SEQ ID NO: 18384 - DNA, 1933 bp, Oryza sativa
  ref <308>: DATABASE ACCESSION NUMBER: AK068783
  ref <309>: DATABASE ENTRY DATE: 2001-12-06
gacccaggccacaccgccgcctccacccacgctgcacgccgccgttgactccgcccaccggcgtcctgcgcccctgcgcccggccgattcctcctcctccttctgtccgtccgccgccgtccgtccgtcgcctgctgacgcctcccctcctcggccatcgactccgcccgccggcttccgctgtgggctcctcccgttgctgggctggaggatcgggatggtagcggcggcggcgacggcgctcaacgccctcgtggcgctcggatccgcctcggggacggcgtccaagtcgtccttcgtgaaatccatcgtcaaagcccacgatgtcgtcatcttctccaagtcatactgcccccccccccccccaactcctctcatctatcctctgtgcattccactgtactgcttgcgcttagcttgctgggaatttcgatttgggatgtagtcgccaatatcatctactatgcatttagctgatctagttgggaatttcgattttggatctagtcgctgtgaagttgagtggacctaatcgtgaatttgtagaaaatcttggagaattcttactgattttgttctatatccatcgaagaactatcttttcgttgcgaattttaggagagatacatggcctactggtcctggcttgtaacgctgtacatgtgagtttgggcactaatcctcttttgctcgatgagtttttttgtttgatttttaacccaaaaatttggaccatatgaaactgtcagagtagataatggttgcctggttggtattggattaaaatggggaatggcaaggaattgaggtcatatgaccttgtgtggtgatccaagttttttctcccctgcattctgtgtgtgctgtacacacctatctaattatttgatcaattacagatttactcctttttatgtaggctagttgattgaattgatgtgcaaagtattgattagcagtaagtttcagagctttcaggattttgttttgtataagagagttgtgggggtgattcttgctctatcctatgagaacttactggatcagaattttggagtttcaggttaagttgctattaatgcttgtgaagagtagatagctatatggaatgtcagatgatgagtaatgaatgtacaaaaacaatacctttgtaaaaaaccttgcctataacatgaactacatttctgacgctgtttatgtcaaattaaccacatggactagtttagttacctagaacattttatccaacatgaaaccttttgggaggttatgttgtcatgtgctacagtgacaagggcatatggaactagaaccattagtgatctgatgatttcccatctcacactatccttgtgatattatgttgtctgctggattcactgttaacttggagtattccctattggtgttgcatgacgaagtgccctcaataatatacattgattgcatatgtagctattttgtttatttgaacctagccagtttgcatggtctcgtcagtttgtgatcaagaatgtatttatattatgatagatagttctttatattctacatgcaagattgctcacagattccaaaccattatttttaggtcaaaatcggaagggctgctgaaattgttctgctaaagatgtcacttgtcccagaaattgtccattgaagagttttttgctgatgctcttgtagacttgtccattaaagatgtcacttgtcctagaaattgtccaatgaagaaattgtccattgtccattgaagacttgtctgtactcttgtgtgcatatgctctatgcagatgcatatatatattgctatcctaggtgcaacagaactgttttttttttacctgagatgcaacagatgttgaatgcatattgatagtctatggagtcttgaattgctgaatgtgtgttaaatgtctatggaatttgtacc

SEQ ID NO: 18385 - DNA, 2307 bp, Oryza sativa
  ref <308>: DATABASE ACCESSION NUMBER: AK068784
  ref <309>: DATABASE ENTRY DATE: 2001-12-06
gattctccatccgaaccgcgccaccacccgccgccctcatggccacggccgccgccgccgccgccgccgccttctccccgctccgccgccgcctcccgcttcaccaccgcggccgccgccttctcgccgtcgcggccgccctctccccggaaccccccgcgcctacccccaccacctcgccgcctcccccgccccgcaagggctacttcccgaagcgcaacgaggtgctcgagctgacatgcgaggggctcgcgttcaaggggaagggcgtctgcagggtggacggctccaccttcgtcctgctctgcgacggcgcgctccccggggagcgcctcctcgcccgcgtccgccgcatccgccggggcgccttcgccgaggccgccaagctccggacgctcgagccccaccgcgacgccgtcgacgcgccatgcccgctcgccgccgactgcggcggctgcaaggcccagtccctcgcgtacgccgcgcagatccgccacaagcacctccaggtccgcgagctgctcgtgaactttggcaagttcgatccccggaagatggagagctcggagcccgatgctatcttgaaacccatcgtgccgtgcgacgagatatttcggtacaggaacaagatggagttctcttttggaacaaagagatggatgcaaagagagtggaaggaggagaaggatgatgaggtggtgaaggaggaaaaagttgaaggtgatggctattcgcttggattgcacgcgccagggttcttcgacaaggtgctgcatgtcgagaaatgcttgctgcagagcgagccggcagataaggttcttgccattgttcaagaaacatggttggatccagctcttggtctcacaccttatgatgtgcacaagcatgttggatttctcaaacatcttatgataagaactggaagaaatatcaccactggagctccagaagtcatggttaattttgtcacatcatgttataagccagagctattggagcctcttgttaacaatatcacaaaaataccagaagtggtcagtatcatgaataatgtgaatacgtctgttggcaatacatctgtgggggaagaagaatataccttgtatgggaaaccaaccattacagagatgttgagaggacttacattccagatatctgccaactcctttttccagactaatacaaaacaggctgatgttctgtacaagcttattggggaatctgctgggcttaagggagatggctctgagattatccttgacttgttctgtggaaccggaaccattggtcttacccttgctagaagggcaaagcatgtctatggatatgaagtagttcctgaagccattgcagatgctaaaaagaacgctaagctgaatggtatcagcaatgctacatttgttcagggagaccttaataaaatcaatgaaacatttgggaaggaatttccgaaacctgacataatcatatcagatcctaatcggccagggatgcatatgaagctaatcaagtggctactagaagttaaagcccctcgaatagtgtacgtttcatgtaatccagctacctgtgcacgggatttggattacttatgtcatggtgtggaggaaaaagatttgaaaggatgctacgagctgaagactgtaatacctgtagatatgttcccccacactcctcatatcgaatgtatctgcgtgctggagctgtgttgattgtcagttctgttcatccaaaagaaaccacaaggatttcaaatgcttcatcttgccctcatttcctgacaactagacttgcaggtcggaaattggatcgcagtctgcaaagccatgttgttggtgtttttacaagatatagagtattcatttactgaaactcccacattgggttttatagttgtggaggacgcagcttagctgaatgagttcttcaattgacatatctcatgcggaagagaagagaggttctcttaaagaacaagcagatgggaagaggcaaccaaactaccaaagttgatgtagttcctcatcctcaattgtgattggagctacccatgcgtcaatgaaatgttgtcagatcttttcttgtgtgaaaatttgtagctaatgctaaattctcaaactatcactgatggctataccgaagagtttttgaaacttttgtagggagcaaaattagaagcaaaatgcaggatagtttgagaaagtatgcattttttttttgtcgaatcccctaaatttccagattgataaattagtgaagctttaaggtacaaactcattatacagaagatacacgaatcactgtgtc

SEQ ID NO: 18386 - DNA, 3076 bp, Oryza sativa
  ref <308>: DATABASE ACCESSION NUMBER: AK068785
  ref <309>: DATABASE ENTRY DATE: 2001-12-06
gatcgtcctcctttccgtagctggcaacatctccgcctctcctctcgcttcccgcatcttcccacacacacacacacaaaaaaaaaaacctcacgcgcgattccaatcctccctgaatccaccgcgcctttgcctaagggtttcgattcgttcgcgtgcggctgctctccccccgatcgatcggcttctcgcctcgctctcgacgaatcgaggtcgctagctcggttcggttgtgcgttgcgttgcgttggcgtggcggcgggcggttgaccggttcgctagggttggagctccgggagggggaggaatgatggcgagccacggcgccggggtggtggctgctggatccgatgccgctcctgccgaggtcagcattgtggggcagacaaatccatctacttatccacctttagctttagggcatcattcatggtcctcttcaactggggcagctacagtcccgtggagctatccagtgaacaatcaaagccaagatacagtttactatgatccacaaagggatgtttcggtttcgggagacaatcagagtgtggcaagcagtgcacctcataatgctcagccaactatgggcacagaaaatgcgactcattctcacatgccttactcaagttcacttcaacatgggtacactgctgcagaatatgcaaactattattatagttacccacaaactacaaatggttcttctgtccagcaaggaggaacaaatcaacattcagactgctccaggatatggaactagcaatagctattatcagaacagcacctggaatggtggaagctttgaaaataattatgctcagtcatatcagaactacccgtcatccaataccaacacagtacagcattccatttcagtgcctaccaattctttctcataccaacagcagtacaaccaatggccatactattacaatcacaccgtgccaaatcctgctggtgatccagtcgggaacagtaactcaattgttaacactacttctagctactcctatcccagtatccagccacctcctccaggaactacatcatggaaaagtaattcaagttcgtctattgcgcctcctattcaggcttcaggtggtccagggcctcaagatcaatatatcaaccaggcgcacgctccggtgttggaaaaccagtatgctggccaggtagcaggtaacccaaggtctcaaaaccattatgccagccagacaccagcctgcccacagagcactgtgaatttgaaccccgttcagcaaagcaatcatggcgatcaacaaaatactgttcctcgaattgctccaggtttttctatggtaataccaaagagcgagaagaaaattttaggtgctgatttgtcaaagaagcctgcttatgttagtgtttccatggtgaagaatgatgctagatcactccctttttcattacataattatgctacgaggaatctcaactgttgcaaggatgaggcccagaaggctgcttgccagagtatgatagaagagataaaaaacagcgccattgctgatggaacccttcttactaagaattgggacactgagccactgcttcctttggtacaaaatgttgcaaccattccagaaacaagtgcaaacaattcaagtccctccttgtcgacatctaccaataggagacgccaaaaaagtaggtgggagcctgttgtggaggaaaaggttacagataaggtggaaccggtaaaagggttggtgaatggtaccacccacaataatttggaagccaaaaacagaatgagtaataactgggattccagaaaatttttccagtctcatcatgcgactgcaaacaaagtcagtcagcggcctgccaagaagcaaaagatcagcagttactcagatcaaatgcaaaatggaaatgcttcaagtgatagtgataaggagcaggatctaaccaaatattatgccagtgcaaccgcactagcaaattcacctgaggagaagaagcgcagggagcataggtcaaagcgttttgagaagaaccagaattcatcatctaaatcgaggaattctgcagcaagtaaagatgtaatggctaatatacatgcacgaagagctgtttcagctcttcttgccagaagctgtgaagatggcactaccttggctgtggaggatatggattgggatgcattgacagtaaaggggacatgccaagaaattgagaaacgatatctccggcttacatcagcacctgatcctgccacagtaagaccggagcatgtcttggagaaggccctttccatggttgaaacatctcaaaagaattatctttataaatgtgatcaactgaagtctattcgccaagatctcacagttcagagaatccagaatgaacttactgtcaaggtttatgaaactcatgcacgtttagcaatgcaggcaggtgacctacctgaatataaccagtgccagtcacaactgaagaggctatatgcagagggaatcaagggctgctactttgaattctctgcgtacaatttactctgtgtcatgttgcactctaataataaacgagacttgctgtcatcattggcaaggttatcgaaacaagccaaacaagatgaagctgtcaagcatgcccttgcagttcattctgctgtttcatctggaaactatgtcctatttttcaaactatacaagcaggcaccgaacttgaattcttgcctcatggatctatatgtggagcgaatgcgttttgaggctgtaaaatgcatgtctaaatcatatcgcccgactataccagtgggatatgttgcacaaattttgggattctcaagaattgatagtgaagcatcagaagagtgtgaaatgtggttaaaagctcatggtgctattctttcaatagacaacagcagagacttgcaattagacacgaaggcttctactactacactttacatgccagagccagagaatgccgtcgcacatggtgatgcctcactttcagttaatgactttttggcgcggacatagcgacaaaaattgtaaccatgatagataagtccagtatgtttgtgccgatctgtgagcctgtg

SEQ ID NO: 18387 - DNA, 1216 bp, Oryza sativa
  ref <308>: DATABASE ACCESSION NUMBER: AK068786
  ref <309>: DATABASE ENTRY DATE: 2001-12-06
gtttctctacgatcgccgccccccaagccaaatccacgcatcgacgcggcaggagcgggcggctgctgcgagatcggcggcgccgcagatctcgcgcccaccagcggagatgaagatcacggcgctcctcgtgctgaagccgtcgtcctccggcgggggagcatcctcgtccggcggcggcggcgggtcgggcggccccgaggcggtggtgctggcgaacgcgacggacgtgagccacttcgggttcttccagcggggcgccgcgcgggagttcatcgtcttcgtcgcgcgcaccgtcgcccagcgcacccagccaggccagcgccagtccgtccagcacgaagaatacaaggtccactcacacaacaggaatggtctttgcgcagttgcatttatggatgatcactatcctgtacgaagtgcattttctcttctgaataaggtacttgacgaataccagaaggctttcggggactcttggaaagctgctacaaaagatgcaacagatgctgcccaacagtggcctttcttgacagatgctttgacaaagttttaggaccctgcagaggctgacaagttaatgaaaatccagagggacttggatgaaacaaaaattatcctacataaaactattgagagtgtgctccaaagaggggaaagattggatagcttggttgagaagagttcagacctgagtgctgcttcacagatgttctacaagcaggcaaagaaaacaaaccaatgctgtactatactctgaagtttggactttcctgtccttaagatgaagactccagaagccgaccgatactgtttagttctacagtaagatcaattgccgtgaatcgtgccaaagtaaaactgtcaaaactattattctttggtgatgaaggaaccttccagggtttatgttccagagcaactaacacattcattgaactgcatgtcccgccagcaatcgccaacatcttgtttccactggatagattgttgaattctcaaagcatgttggagtacacgctctgtttgctactcgtaatttatgttattgatatgattggtatttgatgtctctactatgactacagtattttaaaggtacactcgattacattgccggtaataggcatatagtagttgcgtaccatgtcgagttgatcatgagttcatgaccagccccgtgtgaaatcctcggttcaagttctttctgagttgc

SEQ ID NO: 18388 - DNA, 2207 bp, Oryza sativa
  misc_feature (202)..(202): "n"=any one base of a, t, c, or g
  misc_feature (223)..(223): "n"=any one base of a, t, c, or g
  ref <308>: DATABASE ACCESSION NUMBER: AK068787
  ref <309>: DATABASE ENTRY DATE: 2001-12-06
gggtgcccggaatccatccatcgcgagagcagagggagggggatcgcggcggcggcggcagctgcggcgaagggggaagcgccggaacgggagccgtggagcgatccgtcgggcatcggcgcccgatgtgggcgtggggcctcgtcgagcgcgccgccgcgggcctcctcggccccctcggcggagcccatggcggcgcgcncggcgaggccccccgccccgnccgggcgccggcccgcggcggcctgctgctcggcgcgagcgctgtctcctcccgcagaggtgggctcaaatcgccgtggtggcggcggcggaggaaggccgcgcttaagccccatgaatgggtcagcttgttcacgccggaggggaagcttaaggacggcggagtgaagcttctgaagaaagttcgaagcggagggattgagccaagtatcagagcacaggtctggccattccttctgggagtttacagtcttggtagttcagaatctgaaagagacgcggttaaggcacagaacaggaaaggttatctgttattgaggaaccattgcctgcgaaaatctgtctacatcaatgaagagaacaaacaatcaaatgaagccgctggagccaaacatgtggagtgtgttagttctgaaaaaggcgaagacactgtcaatccagctggatctgaagaagtacctgataaatctagtgtagaagagcatcttgttggcgatgacactgttggtcccgttgtatctgaagaagtggctgaaaaatcttttgtcgaagatcatcttgttagtgaggaggaaaatccatctgccaatccaggagaagaagtgcaggatgacacatctaaaacaagccctgagaagctgacagatggaaatcattcttcatctagttcatctagtgaggaagaaagtgaatcaagtggcctgactcatgtagaaacatctcatatggttgtcgcctcagttcagcaatctttaactgaggatgaacaagaaagtatcccgagatattccaacacaggaggaaacatggaaaatgatagcgagttatctaaggctgctcgtcctgtgaaatctgtacgcacaattgaggattttgagacttggcaacgaattatccgcttggatgcagttcgtgctaatgatgaatgggtttcttactccccatctcaagctgtagtttccagggagaaggcaattgaatctgctaaagctgtttgtctgaaagattacgaacatttggaaccacataggatccgtcatgcagcacgccttgttccaattcttgaggcttatgccatctatgacccagaaattggatattgccagggcatgagcgaccttcttgcacctctacttgccgtactggaagatgacaatgaagccttctggtgctttgctggttttatgaggaaagcccgtcataatttcaggcttgatgaagtgggcattcgcaggcaactgaacatggtagccaggataatcaaatacaaggacttccatctttacagacatttggagatgctccaagctgaggactgcttctttgtttacagaatggtggtggtcatgttccgaagggagctgacctttgagcagaccctctgtctatgggaggttatgtgggccgatcaggcagcaaaccgtgctggaattgcaaaatcatcgttggggaaactgcggttaggagcccctccaactgatgacttgctactatatgcaattgcggccagcgtgctgcagaagaggaaactgataatagagagctatagcagcatggatgagatcataagggagtgtaacagcatggctgggcagctggacatttggaagctcctggacgatgcgcacgatctagtaacgacccttcacggtaggattgagtagtgatatactgatacactctactcattttgtacacggcttgttgtattactttacacattttcatccttacgtcatatttcatctctttttcactaacactccctccatggatatgtgttagtttgggactacagacctacagtaccacaggctcagttgcatggtgtcccagtctagctgcctctcaggattaggccattatcttttcttgatcatagtggtgtaactggaccatctatgcgtgtggatttctttcttgctgtggtcgctgtcagtatcctgcaaatccatgtgatagcatcataccaatgtgcaaggggc

SEQ ID NO: 18389 - DNA, 1602 bp, Oryza sativa
  ref <308>: DATABASE ACCESSION NUMBER: AK068788
  ref <309>: DATABASE ENTRY DATE: 2001-12-06
gatgatctctctccccttccccttctcacgttgagctcgagcggcgggcatggcgggcggcggtgtcgcgcgggggtgtgcagatgatcctgcgggcgccgctagaggcgggaccgccgccggcgttgggccgggcgcaacggcgggagagtcgacgccgcggtggattggatacggggacgacggcgcggcgcggcttcggctggaattcggcctcgatcctgggcgaggttacgcgtggtggattcggggactgttatcccgtgaaatcgtctagcgatgaaaggattccttcagaaattcctccaatccaaacgggaccagccatctccgattgatagggattatccacgatcgaatttgtctgctccgaaattccctgagaagtagtgcagaaatagcagatgaaagttgaaacagtggaggatgttacagggtgaagcaccgcaccaccaccaccgcaagcaatcggcatggacaaaatatatctacaccatgtacagcaaattacaatctcagcttggctcattgataggattcagagcaaagtggctcgatttctatgggcagacctctctggaactccacgtacgggtatgccatcggaatgtcatcgccatcgattctccatctgcacaggttttcaagaaacgaaagaaacgaagaacgatgatcagcctttctctggcatggatattcacatgagaagtctgtataccttcactagttccagatcttgagctgactgcccaaggaaatacacaaccatggagatcaagagtgaggtggtctcatatcctcccagtaaggaatccagcacaaagctcactttctcctcatcagagagctcattgcttgaaagcagcacatcaaggaaatcacccttgttgctggagccagcattcctcctctcctcaataatacccttcacagtgcttgatatcctcgctctggcctgtgaggattcgcggacaaaaggatgaagttattatgctttggcatagggcgtccctgggatgtagagagggaaagagatgagacccttcatgaaggcgaggaaatcttcaagtatcatggcagtgaccggctcctctggtgatagccccagcacctgcttcactattacactgaatgcaaactgtggttctcaaggaaagagagcacaccagagagagaaaaaaaaagaaaaggtaaaaaagaccatgtgaagtgaattggctgcatgcatatactgtgccagtagtagcttttatcaaggagggctatgagcctacagcctaggactaggaggatggtccaatgcagagtagctagcatctaggctgctgctgctgctcaaggtgcagtcaaacacgcaggtagagagagaaatgcattggggtagtacatgcacagccaggtgcagatcgatgcatgggacatcggtgataattaagctctctctgaatctgatgaagcttatgcgcgcgcgcgcacacaccttgcctttgcaatctgttcttggggatcccctgcttcgatgactcatatctgtgtcatttcctaaagcccttctttttcatgacaaaaattacagcaacaggggtcgatttggccttgttc

SEQ ID NO: 18390 - DNA, 2426 bp, Oryza sativa
  ref <308>: DATABASE ACCESSION NUMBER: AK068789
  ref <309>: DATABASE ENTRY DATE: 2001-12-06
gggtttctacagctccaccttcccttgtcttgcctccgccacgagagagagagagaggcgagatggcgctgcgagcccacccgctgctctcttcctcctccttgccgcctccgacccttccaatcctctgcctccgctgtcctggatcttccctctcctcaaaacgcttcctccgttcccactcccgctccgcaatccggccgtggcgaaacccctgcgccgcccgtcccggcggacctcgtttcttggggcaagatgacgccgactccgacgccgacgaggaggacgaggaggagtggagatgggcaccatctgccggcccctccggagctcacctcgtcggcgcggtggacgaagacgatagtgttggcgagggcgggggcggcgtcgggtggggcgcacccgatggcgacgctgccgggggatcggggattcgagaatccggtgtggacgacggcgggcaggtgggcgagtgggacctccctatgagctcctttcgggggcgggttcaggtacagcatcaccaagaagaggaggaggaggaggaggaggaggaggaagacgaagatggaggtggctgcgaatggtcggacccgggtttcttcttgcgaggccaagaggaggaggccagcagcagcgtgagcaccaccacggccatggaagagattctcaccttggcgaggagccccgcggtcgacgggcaggcgtttgccgagttcttggcggggtacggccgcggagcactcagtgtggaggaatgcgttgagctgatgaggaggatgggggaggaggggctggcattggggtgtctccaccttctccgatggatgcaggctccggaggaggagccattgttgttgcccccgcaggcatggctgctcgctgttgtggcgcttggacgggctcagatggccgatgaggtgctggagattgtggagagtttgcctcccgagaggagattcagtgaggctgtcctttacaatgctgcaatgtcaggcctagcctatcgcggaagatatgatgatacctggaaagtatttaagctcatggaaaagaaaaatatccagcctgaccacatgacatccttaatcatgttagatgtaatgaacaagagcaagacatctgccaaggatgcatgggaattcttccaacggatggaaagaaaaggtgtcaagtggagcttggacatttgtatttctcttatcaagatcttttgtgacaacggtctgaaaactgaagctcttatcatacagtcagcaatggagaagaaaggaattgcatcaaacacgagcatgtataacacattaataaatgcttactgcaaagccaatcaaattgaagaggcagagggagttttcgttgagatgaaagagaaaggcttgagtgcgacagcaatgacctataatatccttatgggtgcttactgtagaagattgcagccagaagttgttgagtctttactgctggagatgcaagatttaggactacgaccaaatgcgagatcatacaactttctcatacgtgtttatgggcaacagaagaaaatgagtgaaaaggctgaagatgctttcttaaggatgaagacagatggcattatgccaacgtcttctacatacacttcactgctttgtgcatatgcagttaatggattgcatgaaaaggcttatttgacttatgtggatatgaaaagagaaggacttaagccttccttagaaacatatacagcattgattgacatgtttaggagggctggtgacacggagaagctaatggagacatggagatcaatgatcaatgaaaaggttcctggaactagggtaatattccacatggtgcttgatggtctggcaaaacatgggctgtatgttcaggcaacggatgttatatatgagtttagaagggctggtttgcagcctaccgtaatgacatacaacattttgatgaatgcttttgcaaggggaggacaacattataaattaccccaactcttgaaagagatggctgctatggaattaaaaccagattctgtaacatactctacaatgatttatgcgtatgcccgtgttcgtgacttttcgagagcattctattaccacaagctgatggttcgaagtggacaattgcctgatgttagttcatataaaaagttattgaatacattggatgtgaaagctgcaagaaagaacataaaggataagaatgccatagtgggaatcttaaaaggaaagtccagcctaaaacataggaaggagaagaaggatgagttttggaagaacagaaaaaaacgttctatgatgaaccatgtctatgggtacccaaggaaaagatttttgtgatgcttttcttatgtgtacattagaccataccttgtattctggatgttcatcccttatccattacagcagcatataaaatgaactttcagg

SEQ ID NO: 18391 - DNA, 4027 bp, Oryza sativa
  ref <308>: DATABASE ACCESSION NUMBER: AK068790
  ref <309>: DATABASE ENTRY DATE: 2001-12-06
ggtctccccctccggctccgtccgaccaatccgccccgcataaacccccgcgactgccggcgccgcatcccctccgctccggccggcccgaccagagagcactgcccactggccactggagtggactcgcgggaacatctgggcgccgccactgatcgatctcctctccgtccgtcctctacctggggcagggcagctaggtgatcgatgccaaggaagaaggccagctcgccctcgccgacctccaccgccagggagactagaagctcctccgctcgtggtcatgcatcaccaaccccaaccccaaccctcaggaggtccacccgagaaaccacatccagattttcttcttcttcttcgtcttccgcaaacaagcacgaaggctcccccgccaagcaaagtgccaacaacaacaccgcaaaacggaagatgaataatgctgccgcagatacctccaccaggccaatcaagaagaacaaaaagctaaacgcaaagtcctatttagcactcttctccacaccccaacaaaccgccaaatcccctcctgcccctgcccctcctctcctagtccaagtggatgacgacaatgcttccacggtgcctatgcaagacagtggcactcttctggagcatgaagaagctgacacacaagagcaaggttaccagtctggcttgcacaaagttcctgaggtggtactggaggagactgatgtctccaagaacaaagctgatgaacatgcttccacttctgagccacttattcctgttgatctgtgttcaaacgataatgcttctgaaagcagccatgggatggaagtcaaagagcaaaccgtgggatgttcaaacccatgttttgtaacagatttgccaaataggccttgctccattgttcatcatgaagaggccaagaagacaattgaagcaggtgatcccagagagatcaaaggggcttctacttcaaatcaggctttagtaacccattctgatggaacagattacaacgagtacctgtgtgctgtttgcagaagtagggaaaccccaggaattctcaagtcttgtgatggaaaagattgcaaaaatcggtaccatgattcttgtctggatcctcccctgcaatatgtgtcgctaggtatctggttgtgcaccttatgtactaaaaagaggctccagtttggtttatttgcagtcagtgagggcattgaatctttgtgggatgttaaggaaggagtgcagaacaacaagcagtattttgtgaagtacaaaaatttagctcatgtacataatcaatggcttccagaaagcgatataattcgcaccccaggaggtcaagatctaatcaacaaattttgtaagaggattcaaaaagaaaagacaataaggtggaagcaggaatgggctgagccacaccggctattgaagaaaagacctcttatgtctgaaaaggaagctgaagaattttttaattcacttggtgataaatttgcttactgtaatgtcgaatggttagtgaaatggaaagatctgggctatgagtatgcaacatgggagcttgagacttcatcatttttatgtacccctgaggctaaggatctgaaaaggaactatgagagccgccatgaagatgcaagaagaggttttgatcctgcaaaaataaataagggtaagcaatgtctgtttcagaaacttcagaagctaccggatgggttcccccctggtttagacaaagatcatttgagttcacttaaccggctccgcgagttctggcacaattctgatggtgctatttgtctcgatgatcaggagagagtaatcaaaaccattcttttttctatgtccatattgcctgatgtctgccaaccacttctcattgtctctacttctgcttctctctcattgtgggaagctaagttcaatcgcttggcaccatcgatcaatgttgttgtgtataatggggagaaagacgtacgcaaacagattcaagatttggagttttatgagaacggtttggtgacgtttcaagttctcttgtcccatcctgatgccatcctagaggacattcagaccatggaatcaattgtttgggaggcagttatggttgacgattgtcaaagcttgagagtttcaaaatgccttgaacaacttaagcatctttctaccagttttaggatggttcttttgagtttcccactcaaggagagtattcctgagtacatcaacctgctgtctttcctcaaccctgaaggaagtgtcatttcgagtagttcaaatggtgattttactgatacaggtgatatcttagcaacgctgaaagaaaaatttgctcgtcatgttgcatttgagcggaaagcagattcttcaaaatttttggagtactgggttcctgctcgtctttcacgagtgcagctagaaatgtactgttataccttactttcaaactccccagcactccgatcacactcaagaactgatagtgttggtgctcttcgtgacattcttgtatccctccggaagtgctgtgaccacccttacctggttgatcaatcactgcaaagctcacttactaagggccattctctgactgatattctagatattggagtgtgtgcaagtggcaagctactgctgcttgataaaatgctccaagagatcagaaaccaaggccggagagttctcattgtttcccagtctggtggcggggctggcaaccctatgggtgacattttggatgattttgtccgtcagagatttggttttgagtcatatgagcgtgtagaacgcggattgctagtgccgaagaaacaaacagcactgaatatgttcaatgacaaaactaaggggcgttttattttcttgattgatagtcgtgcttgtgttccaagcattaaattatcatctgtcgatgccatcatcatatattgtagtgattggaatccaaccaatgacttgagagttctccagaggatcagtatagagtctcaatctgaatgtgtgcctatttttcgcttgtattcgtcttgtacggtggaggaaaagactcttatactagcgaagcatgatcatattcttgacagcaacgtccagaatgtaatgcctatcgtgagccattccctgcttagttggggtgcatcgtttctcttcaatagacttgaggagttccaaaagcatgactactccagtaaagattctgaggatgatggtctcttcatgaataatgtatttttggagtttgcagcgaaactatccaccaacgttgaagccagcactaaaatggaaaatgcagtcatatctcgagctcagcagagtggatcgttttattctagagatattgctgttataagcgagagggagggaatatctgcagttgatggtgatttgccaaagttctggaccttctggtcaaatttactaggtgggaggtctcctcattggcaatatatatctgagccagtgcaaaggaaccgtaggaagatacaaaatatggaagaccaaatgagaatacctgcagaagaaactgatgaagcaataatgaaacgtagaaaaatcggagaaatcatggattcatctccgaagatcctacctgtcaaagacaatgatgctgtgctgcctgaaaatagtacagcatccagttctcatgaaacatcagttgatgacacttggcaagagctaggggcagaaagccttcagggcacacagaaaggtcttcacacccaactcaagccagagctgtcaaagttgtatgaattgttggaattgccggagactgtcaaatgtttatgtgaggaattacttgattacattttgaagaatcatcaagtcagtcaggagccaaagggcatattgcatgcattcaacattgccctgtgttggcgtgctgcttctctcaaagcataagatcaatcgaagagagtcacttgccctttctgtgagaaacttgaactatgagtgcgatgaagtgctcgctgaatatgtttatgagaagctaaggatcctcaagaaaaagttttcgcgtagagcaagtgaaacaagc

SEQ ID NO: 18392 - DNA, 1391 bp, Oryza sativa
  ref <308>: DATABASE ACCESSION NUMBER: AK068791
  ref <309>: DATABASE ENTRY DATE: 2001-12-06
gtaagtttataattgctttgaacttagatgatgcttgtttttctttcttttggtttgtttacttttcataaatttggataaacaatctagtacttactgggaaatgatctacaaagcatattgttgctccccctgctaagcatcaacttaacataagctttcttctctgacaatattgttaaatgcctgaaattggatcactcagtaagtaggattctagaatcaaccattcattgctcttcactatccaatttatttttgtttcccaattcatttatgcattttggacttaaggttggttcctaccatgcatcttctttgtttgtggccacaagaccaccaacagctggggttgttagtaggggcattggtgttgaaggtgtctccacagtcttagctggcttgtggggtacaggagttggatctgcaacaataacagagaatgtacacacaattgcggttactaaaatgggcaatcgaagggcggttggatttggtgctattgtacttatactactctcttttgttggaaaagttggtgccttcattgcttctattcctgatgttctagttgctgctcttctttgtttcatgtgggccatgctatgtgcccttggcttatccaatcttcggtatagcgccaagggaagctccaggaacagtattgtagttgggctagctttgtttttgtccctgtcagttccatcgtactttcaacagtacagattacagcctaattcaaactcatcagttccaacctacttccagccatacattgttgcatctcatggacctatacacactggatctagtggggtaaactatattctcaacacgttactgtcactcaacatggtcattgcgtttttggttgccctcatacttgacaatactgtccctggtggtcgccaagagcggggtttgtatgtatggtcagaggcggaggcggcaaggagagaatcagctgtcatgaaagactatgaacttcctttcaagattggacacgcattcaggtgggtgaaatgcgttggcctatagcacagttttggtgtggtttgtagccttggccaactgcacaaaaaatattctgcagcttccaagaatgaaaaatggttactgtgcaaaatctcaggcgaaagaaatggttagtcacgaatcatgaccgactgtttcccaatgtttttcaaccaaggtatcgactatcgagtgtacatactgaattgctctctaggttagttgtcttgtcctgatgcagatgctagatgcatcaggggcttcccacatttttttggactaccttttgtcatcacttacagattttgctcttctcctggtactatttaattggtgttagggatatctatttgtacaggcggtaaatgatctgaacc

SEQ ID NO: 18393 - DNA, 2154 bp, Oryza sativa
  ref <308>: DATABASE ACCESSION NUMBER: AK068792
  ref <309>: DATABASE ENTRY DATE: 2001-12-06
ggccaccacgaactcaattccacgggacaaattgcagagaccacctcggatttctccaaattcatcgccaatgtcctcctacgtcaccaccccccaccaccaccaccaccatggctgctgctccggcagccgccgcctccaggcaccggcgcctcccgcccgcccccgcctcgtcgtcgccgccgccgcgagacacgtggccctccccccccgccgcgcggtggcctcgagggcgatgagcgccgaggcgcccctgggtgtcgcgccggcggcggcggaagaggagatggcggcggtggtggacgagatggcggaggaggccgccgtctggtgcgccgtgcacgggctcgtcgtcggcgaccgcgcggaaccgagatcaggaactattcctggtgttggtctggttcatgctccatttgcgttacttccaacacgttttccagcatctttttggaagcaagcacgtgaactggctcctattttcaatgatcttgtggatcgtgtgagcttggatggcgagtttttgcaagactccttatctagaacaagacaagttgatgatttcacttctaggctcttagacattcatgcgaagatgatggaagtaaataaggaggaggatatccgtttagggttgcatcgatctgattacatgctggattctggaaccaattcacttctccaaattgagctcaacactatttcatcatcatttcctggtcttagttcccttgtaagcgaacttcacaggaccctacttaatcgacatggcaaggttttaggccttgattccaaaaggattcctcagaactgggctgccacccaatttgctgaagcattgagcatggcttggactgagtttaataacaagagtgctgtaattatgatggttgttcaacctgaagaaagaaacatgtatgaccaatactggcttatcaatcatttgaaggaatcgcatggtgtgaagaccattaggaaaacattggcacaggtagaggctgaagggcaggttcttccagatggaacgcttgtggtagacggacagacagtttctgttgtgtatttcagagctggatattctccaaatgattatccttctgaagcggaatggagagccaggcttttgatggagcagtcatctgctataaagtgcccttcaatatcctaccatttagtgggaacgaaaaagatccagcaagaactagcaaaacctaatattcttgaaagattccttaacaacaaggaggacattgccaagctacggaaatgctttgcaggcttatggagtttagataatgaagaaatagtgaagactgcaatagaaaaacctgacttgtttgtcctgaaacctcagcgagaaggcggaggaaacaacatatatggttatgatctgcgagaaacgctggtcagactccagaaggagcagggagaggcacttgcagcctacatactgatgcaaaggatttttccaagagcttctcttactcatctggtccagggtggcgtttgctttgaggaccttacaatatctgagcttgggatatttggagcctatttgcggaacaaagataaggtagtcctgaataatcagtgtggttacttgatgcgcaccaaagtttcttcatcaaacgaaggtggagttgctgcaggatttgctgttctggatagtattctcctcacagatgagtggtaaagcagagggtcactcaccatgcaccatcacaccaaatatcaaatcaatcttgataagcatatgctccagtcaacttcaaccagtttctgaggcattcctgtcacaccgtagaatgaatagaccaaaaaaaatctgaaatattcttctctagtttcttcttctcttctgaaattttgaattgaatctgtcttttgtgatgtcattcttgcagtgaggaagcaaggtagcaagagttacaattgacagctagcagacactggaatgaacctggctgacagaaggttgcaatctcaggattcggttgagcaccagtttttctcagccacaggcatacatcaatgacagataaaataacctaaacaatttttgccacagaagagtaaattacactagcggtacttaaacttgtaacgaagtttcacttatgtccacgaacttgcaaaacgcgcatcgagatcctc

SEQ ID NO: 18394 - DNA, 3067 bp, Oryza sativa
  ref <308>: DATABASE ACCESSION NUMBER: AK068793
  ref <309>: DATABASE ENTRY DATE: 2001-12-06
gaatttcacttttcctaaatcctaatcccttcgcttgtcgccgatgagcgcggcgacggaggaggggcggccggacggcgaggaggattcgccgcgcgcggaggcgttcctggagatcctcggccgggtccagccgggggatgcggaagcggagctctcctcctgcggcatcggcccgacggcggaggtcgcggagcaggtgctcaggtcccgcgtctgctactcccgccccaaatccgccgtccgcttcttcgtctggtcgggccggtcggtgaagcacaccggctacgcctggaacctcctcgtcgacatcctcggcaaggccgacatggaggagcccatgtgggacgccgtccgcaccatgaacaaggagggcggcggcctcgtcaccgtcgccaccttcgcctccatcttctcctcctactgcgccagcggcaacctcaggaaggccgtcgaggccttcgacgtcatggggaagtacggcgtggagccggacgccgtcgccctcaactccctcctctccgccatgtgccgcggggagggccgcgcgcaggcggcgcaggacctgttcgagcgcaccaaggccaccgtcgcgcccgacgcggacaccttcgggattctcctcgaggcgtgggagaaagaggggaacgcccagcgcgccaagagcaccttcggcgagatgattgtccgcgtcggctgggacgccggcaacatgcccgcgtacgacgccttcctctccacgcttgtgcgcggggatcaattcggcgaggcgctcaagttccttcaggtgatgcggtccaagggctgcctcccggggctcaagttcttcgccagggcaatcgaccttgtcgtccgcaagcgcgactatgcgaactctttggccatttggcaaatgatgatctcggatgctggccttgtaccaaacctccccatgtacaatgccatgatcgacctctgttgcagtgttggtgataccgactacgccctccgcatgctcgacgaaatgcccttcaatggcgtctttgcagattttatcacgtacaatgccatacttgaagggctcatcaagcagcgcaaggctcgtgaggctgaggctttcctcgcagagatgagcaagaacgagcagctgccctccccaaccaattgtgctgctgctatcagcatgttctctaaggagtttaacccgtcagcagcaatcgatgtgtggcactgcattgtggagcaccagattactccggctgatgagtcagccagagaactaatagttgggttgcttgattttggcaggtttgctgaggtgaagaaatatactgatgaaatgcttgacatgggaattgagttacctcagtcaaccattgataatatgaagcgcacatttgataaggttggcaagcaccacacatatgaccatattgctagaaggccaaagcggtgttagctatacatcaccaatttaatcataataggtatgccttctttcatatgggtgtttttggctgtgtcagtgaatgccatgaattgcatgaattcatctatcatcttgaccttatgccattcactaataagtcctcatgacttgctagtaagctacttggagtgaatgtcatcagttgcgtgaattcaccaattatcttgaccttatgacattcactaattagtcctcatgacttgcaattaagctacttggaattggaggttttatcctggactactagtttggttccctatgttcttgcatgagccaattccttgttcctcttggctgtcttgctctccttgtcttgttaatattggagtaccttttcttggcacggtgcacaaggccactaaaaatgactattccactgactatttatgtgcgctacttttatgcattttgataactttccttgcccctttggaagacactggacatctatgattccatcttcctttacaataggattcatagtgatgttgtatggaaatgtagctgtttggtgctcttcaatggaggaagaactcctaactcatatcttgggtatctagcggacatgcacttctatcacaacaactcatatcttgggttatctagcggacatgcacttctcttacaacaactccttgtcgatgtctacactactcaccccactttaagatagatatcttgtggtggctgtcggggtttacagacttatgtgccctcgcactaaagttgatgcaacccataagtcctgattgcagatggacacattgcattgactatcgtctatcttccaggacctaactattacacattggctatatgtctaggctgtggtctcccctcatctaattattgagtgagtcccttgtcccaaattacaatggccttacagatgtgttttgtgcttaacctttttctctctgatcacttccatcattgtaggtgtcgtgggcttcttagtgtttaagccaagtaaaatgtgattcaatcttctttgctcaaatctttgattcctggtacaacatagtcgagataaaacataatgttgttcactttagcctgtttgggttttgcaaaactccatagatatgcagaagagaaatgctatcccactccatcatggcttgacacttcttagtctgaactctgtagaattttaaggattgccttctaattttggcatattatggactcgagttcaagatgtggtgtactgcgtgtcatcttttttcccttaccaagttacccctgctatatagcttctccaaatgcttttgatcactctttgagaaaggcatgttggaaaacagaaacatgtggtcagtactgatcacacattgcacaagatggtactgtttcttcttcgttgaacctagattatcttctttagtgtttctctggaacaacaaacctcttgaattgttaaagattcagtagcattgagtaaaactacaacaggttatgtctactgttaccactgtttgatgcacttccatcctatagaaatcaatagctaatgtttctattcatgacgtgtctaccagggaggatttacataattagagtcggggacttttttggggccttttgtgggttgactcc

SEQ ID NO: 18395 - DNA, 1225 bp, Oryza sativa
  ref <308>: DATABASE ACCESSION NUMBER: AK068794
  ref <309>: DATABASE ENTRY DATE: 2001-12-06
gactccttctagtacctccgagctaagccactccaccgccgattgatcgcgtcacggcggcgcagcccggccgccagcgtcgtccgtccgatcggcagatctgaggagggagaaaggtttgctgctgcttgtgctaggacgtcatgcagggaggcggcggcggggatagctccggcggcggcggcggcgaggcgccgcggccgagcaggtacgagtcgcagaagcggcgggactggcacacgttcgggcagtacctgcgcaaccaccggccgccgctggagctgtcgcggtgcagcggcgcgcacgtgctggagttcctccggtacctggaccagttcgggaagacgaaggtgcacgccgcggggtgccccttcttcggccacccctcgccgccggcgccgtgcccgtgcccgctccgccaggcgtggggcagcctcgacgcgctcgtcggccgcctccgcgccgccttcgaggagcacggcggccgccccgaggccaaccccttcggcgcccgcgccgtccgcctctacctccgcgaggtccgcgacagccaggccaaggcccgcggcatcgcctacgagaagaagcgccgcaagcgcccgcccacctcctcgtcttcgtctcaggccgccgccgccgccgccgccgccacctccccggcgagcccagccgctagcccgacgccgccaccgccaccgccgacggagagatcagccgacgtgcggccgatgccaccggagggccacttcttcatcccgcacccacacttcatgcacggacacttcctcgtaccgggcggcgacgccgaccaccaccaccaggtctccaacgccggcaatggcggcaacaccaacaccaacaccaacaccaacaccggcggcggcggcggcaacggcgacgagatggcggtggcgatggcggcggtggcggaggcgcacgcggcggggtgcatgctgccgctgtccgtgtttaactagcagtaatattcagagatcagcagcatatagcaaaaatcaaggtagggcttaatcaaatccgggggagggttttaattaatggattactccaaccttagttcgttaaaaccgatcgatcgatcgatggatcgatgcgtctcatcatgatggaatgatggattcgattggattcgattcgatcgagctatcaacgtagcgctactgtgtatgtactgtttgtgttcttatcaaactctactcttttggtt

SEQ ID NO: 18396 - DNA, 1356 bp, Oryza sativa
  ref <308>: DATABASE ACCESSION NUMBER: AK099070
  ref <309>: DATABASE ENTRY DATE: 2002-08-28
gaaaaggtgggcattagaatacacaccttgcagggacacatgcagagtcatcaggatgaaaagctagtccatggtgataagaaaagcagcttgcttgcaccagacctgatcaccccaaagcaagaacaagaagaacacctcctcaccaatcagtcagtactcagtacaagtgaagcaatctcagcaagaacagcatagttacatatatatatttagatagatagccatctcatttcatataataagcccaagtccagtgcagtgaacacaagaagctcttgttctgaagattcagaaagagcaagaacttgttgatttcaatcaagaaatcaaagatatgtatccttacagattcagcaacgtgatgatcggatacctgaacctggcgacgctgctggcgtcgatcccggtgatcggggcggggctgtggatggcgaaggggtcgacggcgacgtgctcgtcgatgctgcagacgccgctgctggtgatcggcttcgtcgtcctcctcgtctccctcgccggcttcgtgggcgcctgcttccacgtggcgtgggcgctgtggctctacctcctcgccatgatgctcctcatcgccttcctcctcggcctcaccgccttcggcttcgccgtcaccgccggcggcggcggcacccaggtccccggccgcccctaccgcgagtaccacacctccgactactcgtcctggctgcagaagcacatccaggacgccaaatactggcgccccgcgctcgcatgcgtcgttggatccaaggcttgccccaagatcgccaattggtcacccatggattacctccagcatgatctcaccccaatccagatgattaattgtattgtatccataatagtcggggtgctgcaagccgccgacggcgtgcgcgtacagcggcggggtggccgtcggagcgcaggacgaggactgcttccggtggaacaacgcggcggggatactgtgctacgggtgcgagtcgtgcagggccggggtgatggagaaggtgagggaggattggcacaagatctcggtgctcaacgtcatggtgctggtggtgctcatctgcatctgcgcctgcggctgctgcgccttcaggaacgcccgccgctccgtctccgagtacccttacggggtaaaccgcatgcacaagatccacccccgatgggactactactggtggcgatggtggcgtgataggagagaacagctctactaggctagctatttgtattctacccttgtatgatattttgatcttgcccaagaaaattaaaatagttgagagttgattcgttcctcaatattgtactctgaacatctgaaagtcttcaactctctgggttttc

SEQ ID NO: 18397 - DNA, 1504 bp, Oryza sativa
  ref <308>: DATABASE ACCESSION NUMBER: AK099071
  ref <309>: DATABASE ENTRY DATE: 2002-08-28
gtaccaaccaatcactcgctcgccgccggccatgtccgccgccgccgcctcctccgcggcgggggactccgccaagcagccgctcctccaccaccagcgcgggaaccctccccacgtcgcgtcggtctcctccccgtctctcccctcggctcccccgggggccctcgcgggcggccgccgcttccccggcggcctcgacgtccccaacctcaagaagcgcggcggcgggacgcggagctggatccgcgtcgaggccgccacggcgtccgtgcagacgctggaagtggacaaggccaccatgatgcggcggtgcgagctccccgcccgcgacctccgcctcctcgacccgctcttcgtctgcccctccaccatcctcgggagggagcgcgccatcgtcgtcaacctcgagcagatccgctgcgtcatcaccgccgacgaggtgctcctcctcaactccctcgacagctacgtcctccagtacgccgccgagctgcagcgccgcctcctccagcgcgccgagggcgacgagctccccttcgaattccgcgcgctcgagctcgccctcgaggccgcctgctccttcctcgacgcacaggcagctgaattggaaattgaagcatatcccttgttagatgagctgacatccaaaatcagtacactgaatttggaacgtgtacggcgattaaaaagtaggctagttgctctgacgagaagagtccagaaggtcagggatgaaatagagcagctaatggatgacgacggagatatggccgagatgtatctcagtgagaagaagttgagaacggaggcatccttctatggcgatcagtctatgttaggctacaattcagtaggtgatgggacatcgttttcagctcctgtatctcctgtctcgtcacccacagaatcacggaagttggagaaagctttcagcttgtgtaggagtaggcatgacagtgtgaagagctcagataacacagcaacagaacatattcaagagctggaaatgttactggaagcatatttcgttgtgattgacagcactctcaacaagctaacatcgctgaaggagtacattgatgacactgaagattttatcaacattcagttggacaatgttcggaaccaactgatccaattcgaacttttactcacaactgcaacatttgttgtcgccatttttggagtggttgctgggatatttgggatgaacttcgagacctcagttttcagcatacagaatgcattccagtgggtgctcatcatcactggggtgatcggcgctttcatcttctgcggattcctatggttcttcaagtacaaaaggctgatgcccctgtagatgatcatagcatccataggaccaatgaatcaaactcaattgtcgtctacgctgttgaggtacttgatcagaagcctgaatttctgcccgatgtaaattaccattcttttagaattctacagcatacctaccaaagaaattgaatgaaaaacaaaagttttc

SEQ ID NO: 18398 - DNA, 1202 bp, Oryza sativa
  ref <308>: DATABASE ACCESSION NUMBER: AK099072
  ref <309>: DATABASE ENTRY DATE: 2002-08-28
gtccgctggtccaggcagagagaccaatggcgtcttgctgggagcagctgcagggcctctgcgccgccggccacttgcgtcgccgctgccgcggtagaagcttggtcctgctgcagcagctgcagctgctgggggttttggtggtggtggtggccggggttgcaccaggcatcagtgaggcacaggtgaggagccggttcaaggcgatcttcatgttcggcgactcgatcgtggatccagggaacaacaacgggcaactaacggaggcgagagccgacttcccgccgtacgggcaggatttccccggcggggtcgccaccggcagattctccaacggcaaggtccccggtgacttgatagcttctaagttgggcattaaagagctattgccagcttacaaagatcaggaccttgaactaaatgacctacttactggtgtggcctttgcctcaggaggcagtggatatgatcccctcacttctatatcgactgccatatcgagttcaggacaactcaatttattcagtgactacaagcagaagcttacatctttgatcggagaggaggcaatgacacgtattctctcagaagcagttttctttactgtcatgggagcaaatgacttgctcaacaattattttacgcttcctgtgaggcggcatcaatatgacattcctggctacgtggactttgttgtctctaacgcagttaactttactctgacaatgaatgagatgggtgctaagatgattgggttcgttggtgttccaccacttggttgttgtccctcacagagaactggtccatcaagagaatgcgaaccattacgaaatcaagcatcagaattatttaatactagaatgaagcaggaaatcgatcgactaaatgtcgaacataatattgatggtttaagggttgtttattttgacatatactacaatttgctcgacctgatccacaatcctggttattatggtttcaaggatacatctgatggatgctgcggcaacacagtgctaaatgctgctatattcattaaatatcacagtgcatgtccaaatgtttatgattatattttctgggatagcttccatcctaccgaaaaggcatacgacatagtggttgataagcttatccaggaaaataagcagtatctgatgtaaatgaaatatattatcttatatattacatgtgcttaaacg

SEQ ID NO: 18399 - DNA, 2516 bp, Oryza sativa
  ref <308>: DATABASE ACCESSION NUMBER: AK068795
  ref <309>: DATABASE ENTRY DATE: 2001-12-06
accagccaaccgccgccgccgccgagcaccactcgtcgccggccatggagacctccgccgccgcgggtggcgcacacttgatctacgtatcctccgacgacgaggaggacgaaacacgcgtcctccttgccgaatcctacagcgccgaggagatccagatccagcaggccatcctcctctcgctcgacccctccagcgacgcggacgccgcccattcctccgcctcctcctcccgcccctccggcgccgcctccacctccgacgaaccctcctcccttcccgaccgcaagggcaagcgcaagctatcatcggaagaagatggccctatcgaatccacgaggaagaagcggcggaagcgcggccgattcaagtgcagcgtctgcatggagaagctacaggtctcggagcagttcaccgtgagcttctgtgcccacgcgttctgcaacagctgcattggccgctacgtcgccgccaagatctccgagaacgtagccgtgatcgggtgccctgaccccgggtgcgaggagggtttcgtcgagatggacacttgcagggatatcatcccgccggagttgtttgatcggtggagcgtctcgctgtgcgagttggcactgggtgagaagaagtactactgtccgttcaaggattgctcggcgttgctgatcaatgacaacgacggcgcggagaagaagatcagggagacggagtgcccccactgccaccggatgttttgtgcaaggtgtcgtgtgccttggcatgatgggatcaaatgtaaggagttcaggaagctaggcgatgatgagaagggggaggaggatctgatgttcaagaagctggctgggaagaagaaatggcagaggtgcccaaattgtaagatgtttgtctcgaggattgatggttgtttacagataaaatgcaggtaatctgtttatgtaactccatattttggtttgtgtccctcctaaaattaagagaatggatgacaccaggacaaaaaggctgaatagagttacaaattggtgtcctctgttcatgtacactgaagagatgaggcaatcttttcgctattatagtggttagaaaaagaataatggctcaagcataatgattgcagaatatattagaatctttgctatactttacacatgtcaaatcaaattttgtgaataacttccatttctccatctttagatagttttgttggtgacgttgatgttagctaattggcagtacatgtttaaagagttcacgtaagtcatagtgcaccatcattacatatttggaagagtacatagtacctttggagtgttataatggaaatagcaagtctgtagctttgcttaggtttagtagtgttttggtgaatgctatctactgggtcaggattttactggtatggttagtagcagttttggttactgaccttatgctcaagatttttcttaataattgctgttctcataggtcaatgccaggatatactcccagccattgtaggttttaaccatgcagacacttcaaaactgctgtcaattcaacagcaaaatagggaaatgattgagcgcatgtttggtttgttggctgaatcaaccttacaaattttgacaatgccaaattttggtgttaccaaaatttggtaaggttaaaatggtagaattgtttggtttgtgaccttatcaaattttggcttagttttctgaatggaagattccagaatcaccaaattttggtagagttaggcaatgtaaggttgtgatggtaagagtttgttaggttcgttaccctaccaaaatttgttaccttacctaaatttgataaagtttatttcagtaacaaactaacggccctaaatttcccccttgtatgggcatgaaactgttgactacagccagcagtttttgtttttgttgtgcataaattttgtttttttcatagttccaactagaagcttgtggttttggtttggttatcagtagatttctgctgcacagtttgctgcaccattcttttcactatgaatctggaaatttggtctacctgccatttctggtttcttagatatgtcacaaaacttaagggaaaaatattttaccttatttgtctcgtaaacactgaattctaaaggtgtactgtataatgttatttatgcattttcagtcttcgtcatttcactaacacgttttcatgtttgtcttgaaggtgtaaacagtatttctgttactactgtgctgccccaatgaagaaagatagtcactactgtatgagttgccatcgttagtgaagggtcttatctaaacactgtaagagttgccatcgttagtgaagggtcttatctaaacacagactttgtacataggtataggtaacatgtaataaatataagtatggtatcatctccttgaagtggaaatacattttgtacaatgttaatgatcttaatgacctgaagagcaggtcactgatccaagtctcagtgtcatctttttattaatcaattttgcgtgaactttggatgg

SEQ ID NO: 18400 - DNA, 2194 bp, Oryza sativa
  ref <308>: DATABASE ACCESSION NUMBER: AK068796
  ref <309>: DATABASE ENTRY DATE: 2001-12-06
cctgattcatcgttcatctccggctctggccctgcaaactaagctgccatggcgattcctggttcgttgttctatcgctcacccgcgcttcaggtcatttatgtcttgtgcgtgcttgcggttcttgtcccagatgcaggtgggcggcggcatcatcagattcagcttcagcctgagtgtcctacgttcacctgtggcgcccatctcaggaacgcgtcgtacccgttccgccggcgaggtgacccgccggagtgcggcgttgcgtcgtacgagctgacttgcaccgatgacaaggctattattcaggtcgacaacggaacgtaccttgtgaggggaatcaactacaccgatgctaccttcagtgtcgtggacgccaacatgttggattcaagtaacagttgccctcttcctcgctggaatcgcactccttaccgaaggtacggggttgtcgaagactcaagccgcaacatcgtccaagagctgatgccatcttattcgaccataaccgctgcttttgtgacttgttcgcgggaagtaacgaacaatgggatgtacagtcctgtcgcttgcctaagcaacagcagctcattcgtttacgtgctaactggctggttcgctaattatatcaagagtctcgagccttcttgtgggtacctggccatgactcctgtggcgagtgcctggctacatccgaatgcaagctatgcggatgtcgtcaaactaatgagaggtggattcgccattcagtttcctgacacaattaatctgtactccagtttcaaagagtgcatggcagagttacttcaagacatccgtgacggtgaccaacccaagtctagtgaacgcaaccagtataggattgagctagtttcgttaattgaatatggtatcttgcaatgtgcaactcaaggctctagaccaactagagctgtgatggctatccaattgttcattcgcagaacaccaattgccgtttggactttgaagtgtattgctgtatcctgcaggttcattttgccgcccttagtagtattgacctttctggtgcacaagtattggaagaggaggatgataatcgatgcagtcgagaagtttctccggatgcaactgatgattggtccgacgaggtatgcctacactgaacagggcatttcagggagaagatcggccaaggaggctatggctctgtatataaaggtgttctactcccaggtgatgtccatgtggctgtcaaggtgctgggaaactacaattgtaatggagaagagttcatcagtgaagtctccaccattggcaggattcaccatgtcaatgtggttcgtttagtagggttttgtgcagaggaagtgaggagggcactggtgtacgagcacatgcctaatggatccctcgacaagttcatcttttcacatgacatgagattctcctgggacaagctcaacgagattgcattgggcattgccagaggaataaactatttgcatcaggggtgtgagatgcagattctacattttgatatcaagccgcacaacatccttcttgacagcaatttcgtcccaaaagttgccgattttggcctcgtcaaactgtacccatgccacgggataatagttttgtgcctgttagcgctgcaaggggaacaataggttatattgctcctgagatgatatctcggagctttggtgccatatctagcaaatctgacatgtatagctttggaatgcttctgttggagatggttggagggcgaaggaactctaagcaggatatgtcgagctcaagccaagcgtattatccatcatgggtgtataattagctggttcaacaagagttgggtgaggtggtcactgcctttaatatgcatgagttggaaaagaagttgtgcattgttgggctacattgcattcagatgaagtctcatgatcggccaacaatgagtgaggtcattgagatgcttgaaggtggtgttgatagtctgcaattgccttctaggccattcttctgtgatgacgagcctgtgccacatgtggtgggttcttaccatttatcctcttggctaactgaaatctcggaggaggatgagtgataaagcttgtgtctgcttggaagcaaactcagctaactatttgcttgtaaaacgcagaagctagaaatgattgtaaacagtgaaatggttattgtacactatttatcc

SEQ ID NO: 18401 - DNA, 858 bp, Oryza sativa
  ref <308>: DATABASE ACCESSION NUMBER: AK068797
  ref <309>: DATABASE ENTRY DATE: 2001-12-06
tttgtaattgcattcagcagatgcaaaaactgataaagaagacaccaagattattagtaagttcactcgtacatttttcaaagttcttggttcttctcatttgtgtgatacttattacatttgatctctgtgatgttaaaactgcagtcaaggggaagaaacgcaaaagtcagcctggtgggactgaggagaaagaaagaaaatcatctgagagtctcttcatgtcacattatccttcaacgctaaaaaagcaacttgttgatgattgggagtttgtcacgcagctgggtaagcttgtgaagctacctcggtcccccacggtcgatgatattctaaagaagtacttggagcaccggacaaagaaggataacaagataaatgactcttacgctgagattttgaaaggattgcgatgctactttgataaagcattgcctgcaatgcttttgtataagaaagagcgacagcagtactctgaagaggttaaaggcgatgtttcgccctcaactatatatggagctgagcatctactgcgcctttttgtgaaattgccggagctacttgcgtctgtcaacatggaagaagatgcactcaacaaactacagcagaaattgctggacattctcaagtttctgcagaagaatcagagttcgttcttcctttctgcgtatgatggtggttctaaaggtactgatgggataaagaccaaatagaagcaaactgttgcatctgtatgttgactgtacttaactgtctcgctgagtaattttaattttcatgtgattgaacaatgtgtcgatgaacatcgtagcactgtttgctaatgctaatttcatgtagtgcagcagaaggtttcct

SEQ ID NO: 18402 - DNA, 1793 bp, Oryza sativa
  ref <308>: DATABASE ACCESSION NUMBER: AK068798
  ref <309>: DATABASE ENTRY DATE: 2001-12-06
ggggagctcgatctccgccgccaccgccaatccccgaaccctacctctccccccctccacccatggcgctctcccgccgcctcctcccgctcctcctccgccgcgggtccaccccctccctctcccccgcccgcgcgctctccacggccgccgtgacggccgatgctcccgccgcggcggcggcggcggcggaggaggaggcgatgaccatcaagggcgtgcgcatctcggggcggccgctgtacatggacatgcaggcgaccacccccgtcgacccgcgggtgctcgacgccatgctccccttctacctctcccgctacgggaacccccactcccgcacccacctctacggctgggagtccgacgccgccgtcgaggaggcccgcgcccgcgtcgcctccctcgtcggcgccgaccccagggagatcttcttcacctccggcgccaccgagtgcaacaacatcgccgtcaagggcgtcatgcgcttctaccgcgaccgccgccgccacgtcgtcaccacgcagaccgagcacaagtgcgtcctcgactcctgcaggtacctccagcaggaaggcttcgaggtcacctacctccccgtgcgccccgacggcctcgtcgacgtcgcgcagctcgccgacgccatccgccccgacaccggcctcgtctccgtcatggccgtcaacaacgagatcggcgtcgtgcagccactcgaggagattggtcgaatctgcaaggagaagggcgtgcccttccatactgatgctgcccaggcgctcgggaagatcccgattggtgtcaaccaaatggggattgggctcatgtctttgtctgcgcacaagatttatgggccaaagggcgtgggctctctctatctgcgtcgtcgaccccgcattcgtgtggagccgcagatgagtggcggtggccaggaacgcggaattcgcagtggaacagtgccaacgcctcttgttgttggatttggtgctgcctgcgaaattgcggctaaagagatggactatgatcacaggagagcctcggttctgcagcagcgccttcttgatggcatccgtggacaggttgatgatattgttatcaatggaagcatggagcatcggtaccctggtaacctgaatttgtcatttgcatatgttgagggggagagcttgctgatgggcctgaaggaggtggctgtgtcgagtggcagtgcctgcactagtgccagcttggagccctcttatgtgctgcgggcacttggtgtagaagaggacatggcgcacacctccattcgctttggcattggccgctttaccactgaggaagaggttgacagagcaattgagctcaccgtgcatcaggtgaagaagcttcgtgacatgagtccactgtatgagatggccaaggcaggcattgacctcaagagtatccagtgggcgcagcactgagacagctttcacttagagctaatccctggctgcttttgaagtgcacggaaggacacatagataggtacatggctctgctgctttgtgatatatcctgttttatttcataattatttcataagggagatgtggaattgctatggctgctattaagttgcttgagtaaccttgcacccatgaatcttcacattgtgaatttgataggttacctgtggcacgttttgagcatataacaatccacgcaatgttttcccagtgattagttctgagtgtacattcatttactttggagatcttctcactatgccaaaaggaaaggtaaaattcagaacaaagtaacaccactgtgcagag

SEQ ID NO: 18403 - DNA, 1657 bp, Oryza sativa
  ref <308>: DATABASE ACCESSION NUMBER: AK068799
  ref <309>: DATABASE ENTRY DATE: 2001-12-06
ggggagaggcgcaggcgagggcgcgcgttccccgcaatggcggccacctagtccctcaaggaatcctcgtaagtcgcatcttcctctctctctctctctctctctctctctctctctctctctctctctcgccgcggcgggcggcagcaatggcggattactcgctcggtcagttcttggctcaccaccgttggtgttcccctgtttcttggttcacgccaggcgcttcttcttcttcttctcggatgcgagagcttgctgtgattgctggctagctagcttgccggaatggagggcttctcgagggacttgctgtgcggcatcggcaagggaggagacgggccccgcggcgaggtgaggccgcgcgtggacatggaggctgaggaggtggagctcaacctcgggctgtcgctcggcggccggttcgggctggacaggagaggggagaagctcgccaggtcgtcgtcggtcgcggccatcttggcggcgccgacggagccgtcggcgccgccgtccgggctcttcaggacgagctcgctgccgaccgtggccgccgcggaggcggcgaaaaagcagggtgtggatgaattgaactgtcgccgcccgagcggcggcgcggaggcggagcccgcggcggcgaggctgccggcgagcgggagcccgtcatcgggctcgtcggacggcgaagggcgcaggcttgaagtgaatatgacagacactctcatgagaacaagttcactccctgccggcatcgaggatgaatggaggaagcgaaaggaggctcagagtctgaagcgactcgaagtgaagaggaagagaattgagaggaggaactctctcacttccaacatttccaaagaggctgttgggcagatattagaggagatgaatgcaggagctgagaaagtagaaagttgcgatgatgttgctacaggcaataagaagacgggaggaaatgtgaaccatagcagtgatagaaaccgctgcactggacttcctccagtccaccgtgccacgtatactcaacaacgtggcagtctgtccggaataccaacaaagcatattccagctatgaaaggatctgctgatgccgaagagcacaacgttccatcggccgctactgagcaccgaaatggagcagccatagcaacaccgccattttcggcactggcggtgagggcagtagctcttgcttccaggggagagcagctgcgtgctacaggaagagttgcggcaagagggttgaaggcttcctgtacaagtacaggaaaggcgaggaggtgaggattgtctgtgtttgccatggcagcttcctgacccctgctgagtttgtgaagcacgccggaggtggagatgtcgcgaacccgcttcggcatatcgtcgtcaaccctatcccgccatccttatactgaacctctctgtcagctcactgctgctcttgcaagtgctactatagcttcagtcagcccttcaccttagcttcagaattcagttcagagtagaatctgattgtgagacttgtcttaatgttacaagtgtttattatgctaaggagacagcgggagatttgctcctgctgacataaaaagtggttaacatggctccattgatcattgttaaatggttcctgcagctgcttttgttcatgcaggttgtg

SEQ ID NO: 18404 - DNA, 1463 bp, Oryza sativa
  ref <308>: DATABASE ACCESSION NUMBER: AK068800
  ref <309>: DATABASE ENTRY DATE: 2001-12-06
gctcgaggccagtagcgccttatctccctccctctctctctctctctctctctgtgtcatgtcgtcgtcgtcgtcggcagctcgcaccctcctctcgccggcggcgcctcctgtcccgcgccgcggcgtggtgcgtcccgcgaggtgctccgggggcggcggcgcggcggcggtggagacggccgcgtcgggggcgaaggtttgtacggtgagcaaccgcggggactccctggcgatatgccgggtgctcaacggcatgtggcagaccagcggcgggtggggccgcatcgaccgcgacgccgcggtggacgccatgctcgcctacgctgacgccggcctctccaccttcgacatggccgaccactatggaccagcagaggatttgtatggccttttcatcaatagagttcggcgtgagcggccacctgagttgcttgaagaaatcaaggggctaacaaagtgggtaccacctccggttaaaatgaccagaagttatgttgaggataatattaacagatctcgaaagagaatggatgtttctgccttggacatgctgcagttccattggtgggattatgcaaaccctggatatctggatgcactaaaacacatcacagacctaaaggaggaaggtaagataaagacagtagctctgacaaacttcgatacagacaggctgcagataattctagaaaatggtatcccaattgtcagcaaccaggttcaacattctattgttgacatgcgtccgcagcgaagaatggcagaactttgccagcttactggagtaaaacttataacgtatggcacagttatgggtggtctgctgtctgagaagtttcttgacaccaatgtatctataccttttgctggacctcctctgaataccccatctttgcagaagtataagcggatggtggatgcctggggtggctggagcctgttccaggctttgcttcagacgttgaagaaagtatcattgaagcatggtgtttctatatcaactgttgctgtgagatacatactgaaccagacatctgttgcgggttcaatggtgggtgtgagactgggactctctgaacacataaaagacaccaacgccatcttctcgcttgaattagatgaagaggacatgaacagcatcactgaagcatcgaataagggaagaaatcttatggatataataggcgattgtggagacgaatacagagcataattgtgcagagagataaagagagagagaggcagagggggtagaccaatgaggcgtgtgcctgccagttttctggagttctgaaatctgatctgttttgtcatgaacgtagtgtgcagcagctatctgatcttccagtatactactactccagatcagtgtgtaaaccaacctcccaaaagaaagtggcattttataagaactgtacatacacaagacagattataatttgatatgcccattaatacgg

SEQ ID NO: 18405 - DNA, 1944 bp, Oryza sativa
  ref <308>: DATABASE ACCESSION NUMBER: AK068801
  ref <309>: DATABASE ENTRY DATE: 2001-12-06
gtgtcggctctagaagcttctagaaggcgcagctgcagcgctggctaatggcgttcgcgacctccacgctcccattcgcgccatccaacccctcgccgtcctcccgctccgccgcagcggctttctctccccgcggcggggtccacttcgccgccgctaggagcggcctcccgctcgcgtgcgccgcgccgaggcaccgagggaggcctcctccgaggaggcgccgcggagggtgcctggtggtgtgggcgtccgccgactactacgccacgctcggcgtgccgcgctccgcgagcaacaaggacatcaaggccgcctaccggaagcttgcgcgccagtaccatcctgatgtcaataaggaacctggagcaaccgataagttcaaagagataagtgcagcatatgaggtgctatcagatgaaaagaagagggcgctgtatgatcaatatggtgaagctggggttaggagtgcggttggaggctcagctggagcttacacaagtaatccttttgatctatttgagacattctttggagcaagcatgggtggcttttctggtatggaccagggaacatttaggacacgcaggaggagcactgctgttcagggggaagacatcagatatgatgtgaatctggggttctcagaggcaatatttggaacagaaaaggatattatattatctcatttggagacatgcgatgcatgtgctggttctggatcaaagattgggtcgaaaatgagaatatgctccacatgtggtggtcgagggcaagtaatgagaactgagcagacaccatttggtctgttctcccaggtttcaatttgccccacctgtgcaggagagggtgaagtcatttcagagtattgcaagaaatgtgctggagaggggcgtgttcgtgttagaaaggagatcaaagtaaaaattcctccaggtgttagcaaaggtagtactcttcgtgtacgtggtgaaggtgatgcgggaccaaaaggaggacctcctggagatctttttgtttgccttgatatagaggagccagcagatattaaaagggatggtatcaacttgtattcaactgtttcagtaagctacattgaagctattctgggcactgttaaaaaggtcagaactgttgatggaaatagtgaacttagaatacctccaggtacccaacctggtgatgtagtggttctagcaaagcaaggtgttccatcattgaataaaccatctgctcgtggtgatcatctattcactattaaggtcactatacccaaacgtataagcggacgagaaaaggagctacttgaggaactggcttctttgagcaatggtggttttgctggtgcacctgtgaagccaaaatccatacgccaagagaatgaaactactgttgcccaagaaaattcggatcaacctgatgaaggggagggtgactggttgaagaaacttcaagattttgcaggatccattgctaatggtgctgccaagtggctaaaagacaacctttagcctgtaaatagttaccgcggaatgcatttatattaatcgctgttatggtgtagtccaatctgctattcttcaattcattggatcccacgagctgttgcatttgttttggagaggctcaaagttctcaggctgtgaagtggcaacggagaggctgaatctgttaattaattccatcggcaacgttcttattttggtatgcttgtaaagtggcatgattttttatgtagttgcagttatcattccctagagcatgtgatggttttacgtcacttgctgctgatactgaattcagtaaagataatgcactgtaaatatatatttcatgcagtagagcatcttgaaatctcaggtatgtactctgtgggtaagcaaccgtgaggtgtgtcgttctgaactagagatatttaaatccagaacaagagcacccatatcc

SEQ ID NO: 18406 - DNA, 2144 bp, Oryza sativa
  ref <308>: DATABASE ACCESSION NUMBER: AK068802
  ref <309>: DATABASE ENTRY DATE: 2001-12-06
gagctgctgctgttgctcctctcctctcctctcctctcctctgctctccgagtgaaacttgcttctagtaccagctgcgagcttgttatgttccgtttcttccagctttggtgctctctcaactctgaagaagaagaggttttctctgtctaggaaggagagattgtgcagcgaggtttctttctctcactaggaggtttgaggttgctgggagtggttacgaagctaattaggagctttgccgctttggttgagtttcttggtgagaggtgaggagagcgtgagcgagctcgctctcagtctcacgccttttgtgttgtgttgtggaggaggagaaaggaggcggttttttgttgtttctgtcagcgttttctcgtcagctgcagtttcttgtcagtttccatggatgagtagcatgaacaagacgcgagcagaaaatggcatcttcaaccagtggaggaactcgagctcacccatttggtcctgttccttgagcattctatctcccaaaggagcaatcgcttctcctctttccatggagatgatggcgagcaagaaccctaccaaaaccctcctcctcctgctcctcctcgtcttcttcctctcgctggcttgctcccagccgctccactcggagcccatgtccaccaccaccaccgccacccagcccgcgccaccgcctcccccgccgcaatccaagattccccacgcggaggccggcggcgccgcccgcctccgccgcatcgtgctcggcgtcctcttcggctccctcactggcttcctcctctccctcgccttcctctacgccatccgcgtcgccatcctccacgccaagtacgccccggcaatcgtcaggggccccgtctccttcaccccgcagatttcccccaagaacctccactccgcgctcccctccgcgcagccgctcgcccatggccccaacggcaagtattacaagctggttcttgacaacgatgtcaccgtcgccgtcaagcggctcgaggctagccgccctgaggcctcgccgtcgtcgatgcccaatgtttccaagtctgacatgaggagggtgcagaggcagctggagttgctagctcgggtgaggcaccagaatgtgatgggattgaaggcgtatgtccgggaagccgaccggctatcgctggcgtacgatttcgtgcccgggggcagccttgaggatgtgatgaagagggtgaggtctctgcaggtgaacctcaattgggatgcaaggaacaggattgcgattggagtggccaagggattgaggtacttgcattttgagtgcaccccccggatactgcattgcagcctcaagccgtcgaatgtgatgctagatgaagatttcgaaccgagattggcagattgcggcgtttcaaggctaattgcatcaggttcagctgatccagaactggccagcagcctttattctgccccagagtgctaccaaagcagcagatacacagataagagcgatgtctacagttttggcatgatccttggcgtgttgctaactgggagagacccaacagatcattttttctcgggagaaaccgggcgcggtggattagctagatggcttcggcacatgcaacaatctggtgacgcaaaagacgcactggatagtagtgtcttaggagaggaaggggaagaagatgagatggtgatggctgttagggttgctatcatctgtctctcagatttaccagccgatcggccatccagtgatgaactagtccccatgctcacccagctccacagcttatgatctccgtcgaacgcttcttcgtaaagtactaatctctggatgttcttcatccatggcacagtttctgaatcatgctggagggtcaaaactcaaaaccctggatgcacaaactagtgtagctttcagtgtattcccttggaagagcccatgctaaatggcccacatgggaggggagctaacagttttcagaggccaatgtaggaaggaaatctggtaggtcttactagttcagttgtcagttatgttgtgtgttgcagctacatgctggtggttgagtgagcctcattgtcatgtgatgcttctttgcccttacatgatttggaggaggtaggcaaggaagatgtgaatattgtggtgtctttgt

SEQ ID NO: 18407 - DNA, 2357 bp, Oryza sativa
  ref <308>: DATABASE ACCESSION NUMBER: AK068803
  ref <309>: DATABASE ENTRY DATE: 2001-12-06
gagctggaagaaaagccacgcgggtcgcggcaaccctagaccaccaagaaggccgaggcggaggcgagaggcggaacacgaggaggccaccagaaaattcctccctcccccaggagaggcgaggcgaagcggagctctcctcccaaattccccaaccctccaccgcctccaccgccaccgccatgcgcatccgccgctacgccgcgcgcctcctcgcctcctccaccgccaccgccccctcctccctcccgccgccccccgccgcctccgcggcctggtgccacgccgccgcggacgattgcgccatctgcgacctcacccgctccgcctccccgcaggtggtggcgccggacgcaatcaagcagaaggggcacattgccggccgggcgctggaacccgagctcaggagcgatccgcgcgtcggactagccgaacgaactcctgttccggaagatcaagggcgcgatatagatgacggtcctcccgcgaaaagatctctcacgtttactgatgctgcggcgaggctagaaggttcgggaaatgttggtgctggagttgctactgaaccagcagctagactaggagcccccgttgctaatggagctgttagtgggcaggaggatagagcagcaacttgtcttgcggatgaatctgctgcggagctgattgctaccggggtaacttctctcgttaccggagcaaccgctgaaccagaggttttaaaaggggcttcatttgctaatacaaatgttaccgagccaagagtttcggagagagttcctcttgtgcgtgaagctgcaactgagccagaagctgaagtctctatgcgagaagttacagaaggagctctccctgatggtgaaggtgctgcaaagttggaaattacaggggggctttctcgagaatctgctgacaaaatggaagttacaaagggaatttctcttgttactgaagcttctgctgattcagaacttgcacagagagttcctactgaaccaggagttgaactctctctgccggaagttacagagagagttcctgttgtgactgaagatttcactgagctaggagatacattcagtggcctacatattacagggttcgcttccctggataatgaaggttccgtggaacaagaagtcacaggaagtggttctcttgtaaatgaagctacagagatggaagttaaggaaggaacctgtatcttcaccagagttgccacagagctgggagatactggtagagtttctgcttgtagtggagatggtgacattgctttagatgagccacgacctcctgattgtgtttcggaggttgccaatgtgaatgttggaaatgcaggagaggctgttgcgagcaaagtgcagccttttagagacaatgcagaaagtgttggtggttctattaattcaacaggcaatggccatgttagctccaaaagtccaactgcagatgaagcagcaccacctggtggatgtactgatacacccagtgtttcatgtttatcagacattgtggctagaagcatcggtaagtcagggagaacagatatcatatgttatgttaggcgcaggggtaaaaggaagctggaaatggtggaggtaaaggaagaaaatgttgaaatggatgacagtgctatctgtgatcaatatgatgataaagtggcatcagaaagaactggtccttgcgagagtgtgacgtcaactgctgtatctgtagagattaaaattgctgacataaagagagagcttgaagataattcaactgctagcaagggtaaaaagaagagggccaaaaggtttcaatgtgaaatagattattgccgcatgacattcaagaaccgagctgagctttctgttcataaaaagaacacatgcacggtcaagtcatgcggcagacatttcagatcccacaagtatctgaggcgccaccagagcattcacaatgatgatatgccatacaagtgtccatgggagggttgcagtatggctttcaagtggtcatgggatcggggtgagcatttccaagtccatgctggcaaaagaccttataaatgcacaacacctgggtgcagcaagatatacaagtttgtttcggacttcacccggcataagaggaggtgcaaacctcagaggtaaaagcttgtgtgatactacagatttaggataggagtaaaaatcttgtacttgctactgtagatgttttttttatttatttgctggatgattggtgttgttctagcgacctatagcaggattgcttgttactttgttgagaaaattttacaatctgtagttcggaaattttgaatgcgtgtttctcaaatatcgttatacattctaaaaatgctgcttcat

SEQ ID NO: 18408 - DNA, 1570 bp, Oryza sativa
  ref <308>: DATABASE ACCESSION NUMBER: AK068804
  ref <309>: DATABASE ENTRY DATE: 2001-12-06
gggtaaaggtaaacgacgagagctaaagaaatctggcatggcgccaccggcaccggccgctctcctcctcccctccaaccattcctatcgcccgctcctgcctcgcccaatcctgcaccacgccaccggcttcgcctgcgcctcggcctcgccctcgccgccccctcgccttcgccttcgccttcggcatgccgccccgctccgtgccgccgccctgccggccatcgccatcgcccccggcgaccactggggcaactgggccttcctcctctccgccgccgccttcggcacctggtcggaggagtccacgtcgtggggcgccgcgctcagcggctcgctcgtcagcatcatggccggcctggccgccacggccacgggtctcgtcacggccggcgcgccggcgcaagacgccgtcatggactacctgctgccggccaccgtcccgctcctgcttctcggcgccgacctccgccgcgtcgtcagcaccaccggcgacctcctcaaggccttcctcatcggatcagttgcaactacaattggcacaacgatagcctttctgttggttcctatgaaatcactgggtcaagatagctggaagatcgccgctgcgctcatgggcagctacattggtggagcggtgaattacgtcgcaatctctgaagcacttggcgtttctccgtcagtgctagcagccggtgtggctgcagacaacatcatctctgcactctacttcatgaccctcttctcgctggcagccaagataccagctgaacctaaaactgctcaagagggtagtaacggcggcgagtctgagggcggaaggcggatgtcggtgctccatggcggcgcggcggtggcgctgtcgttcgtgatctgcaaggccgggtcggccatctccagccagctgggaatccagggcggcaccctgccgtgcgtgacggcgctggtggtggcgctggcgacggcgttcccgcggctgctggggaagctggcgccgtccggcgagaccatcgcgctgatcctgatgcaggtgttcttcacggtggtgggcgccaacggcaacctggtggacgcggtgaccaaggcgcccagcgtgttcgcgttcgcgctggtgcaagtgaccatccacctaggcatcgtgctcgccgcagggaagctgatggggttcgagcggaagccgctgctgatcgcgtccaacgccaacgtgggcgggccgacgacggcggcggccatggcgacggccaaggggtggagctcgctgatcgtgccgggcatcctggtgggcatgttcgggatctccattgccacgtttgttggcatcgggttcggcatgtttgtgctcaggaggatctgcggcgcctaaccaatctatagtactaacaattcaattggtttatatatagctgtgatcaataaataataatggaggagtagtagcaatgaagaatcatgcatgcatttcaatgaaaagtgtaaacattagaagaagaagaagaagaagaagaaaatactgtattatttatcaagagtaatactattattattagaagaagaagaagaaaagttttgc

SEQ ID NO: 18409 - DNA, 2002 bp, Oryza sativa
  ref <308>: DATABASE ACCESSION NUMBER: AK068805
  ref <309>: DATABASE ENTRY DATE: 2001-12-06
gagccagcacaactcacacaactctctctctctctctctctctctctctctcgtcgtctgcaagcttccgcctcccggatcgcggcgaccaccggaggaggagggagcagccatggcgaacatcgacatggggaagatcctggcggggctggagaacgacgacgcgcgggtgcccaagaccaagctggtctgcacgctcggcccggcctcccgctccgtccccatgctcgagaagctgctccgcgccgggatgaacgtcgcgcgcttcaacttctcccacggcacccacgagtaccaccaggagaccctcgacaacctccgccaggccatgcacaacaccggcgtcctctgcgccgtcatgctcgataccaagggtcctgagattcgtactggatttttgaaggatggcaagccaatcaagctaacaaagggtcaagaactcactgttaccaccgattatgagatcaagggtgatgagaacatgattaccatgagttacaagaaactgccagttgatgtgaagcctggaaatgtcattctctgcgccgatggtacaatctctttgactgttttgtcctgtgatccaaaggctggaactgtgaggtgtaggtgtgagaacacagcaatgcttggcgagagaaagaattgcaatctgccaggaattgttgtggaccttcctacactgactgagaaggataaagaagacattttgggatggggtgtgccaaatgacatagacatgattgctctgtcgtttgtccgtaaaggatcagatttggttaccgtcagacaacttcttggacagcatgcaaagcgcatcaagctgatgtcaaaggttgaaaaccaagagggtgttgtaaacttcgatgagatcttgagggaaacggatgcatttatggttgctagaggtgatcttggaatggagattccagttgagaagatattccttgcacagaagatgatgatttacaagtgcaaccttgctggaaagcctgttgtgactgctactcagatgcttgagtcgatgatcaaatcaccacgtccaactcgtgctgaggcaactgacgttgcaaatgcagttcttgatggaactgactgcgtcatgcttagtggagagagtgctgctggagcataccctgaagtagctgtgaagatcatggcacgtatatgtgttgaggcagagtcttcccttgacaacgaagctgtcttcaaggagatgatcaggtctgcgccccttccgatgagcccattggagtctctcgcatcctctgctgtacgcacagccaacaaggccaaggcagccctgattgttgtcttgactcgtggtggtaccacggcaaagctggttgccaagtatcgtcccagggttccaatcctctctgtggttgtccccgtgttgacaaccgattcattcgactggacaatcagctcggagggcccagcaaggcacagcctaatctacagaggtcttgttcctctcctggctgagggttctgccaaagccaccgattcggagtcgacagaggtcatccttgatgctgctctcaagtcagctgtacagaagcagttgtgcaagcctggtgatgctgttgttgctctgcaccgtattggcgtcgcatccgtgatcaagatctgcatcgtgaagtaatcgctacacggtgtcttcttagcgccattttgctgggttaagtggcaaaacaaaaactgctatgcttgtttttactcccatagtccatctttgggagacaatttaattaccgtatcagcccctgcagttcgcagggtgcctttcgttacatagatttgctggtaaaatgaggagagatagaactccattatgtagagctctatttatcgtcgatgccatgtagtatggcaggtggtttctattccatgcctgcacaattttctggtagctactgtgttgtttgattactgttttttcaggtgatgtcgatggagttgataataatattggcatcattgtcgttgtatacgagtt

SEQ ID NO: 18410 - DNA, 1355 bp, Oryza sativa
  ref <308>: DATABASE ACCESSION NUMBER: AK068806
  ref <309>: DATABASE ENTRY DATE: 2001-12-06
gattgccattgcagttgtatccttcttcttcttcttctttctctactcacctgcatctgtagagagagagagagagagagagagagagagagagagatggcaggaggtgacaacaactcccagaccaccaatggcggctcaggtcacgagcagagagccatggaggaaggcaggaagcaggaggagttcgccgccgacggccagggctgcggcctcgccttctccgtccctttcatccagaagatcatcgcggagatctttgggacatacttcttgatcttcgcggggtgcggggcggtgacgatcaaccagagcaagaacgggcagatcacgttcccgggggtggcgatcgtgtgggggctggcggtgatggtgatggtgtacgccgtggggcacatctccggcgcgcacttcaaccccgcggtgacgctggcgttcgcgacgtgccggaggttcccttggcggcaggtgccggcgtacgcggcggcgcagatgctgggcgccaccctcgccgccggcacgctccggctcatgttcggcggccgccacgagcacttccccggcacgctccccgccggctccgacgtgcagtcgctcgtcctcgagttcatcatcaccttctacctcatgttcgtcatctccggcgtcgccaccgacaaccgagccatcggggagctggcagggctggccgttggtgcaaccatcctgcttaacgtgctgattgctgggccgatctcgggagcatcgatgaacccggctcggagcctggggccggcgatgatcggcggcgagtacaggtcgatctgggtgtacatcgtcgggccggtcgccggcgcggtggccggagcttgggcctacaacatcatccgcttcaccaacaagcccctccgggagatcaccaagagcggctccttcctcaagagcatgaaccggatgaactcctccacctaacctctatctagctaaccaccaagaaccctaattaattactactgccagtactactactgctactttctgttcgagatcgatatcgagatgcttgatcgatgcaccgcatcgcatttaaaagggaagagatggatgaactactatttgtgacgtacacatatatagtagtaatttaattagcgttagttcgttgtcgtctcggctacgtgccacaaggcctcctttgtaacgcaggaattttataggaattctgtgatgtgtgtttttagatgtggggattcctataaaattcgtgtggaacttctctgcctcctatatatgtagaacttaaaaaatctatgtatatgtgtgtgtggaatagtatgttttggaccacgtgataaaattgcagagtgtttccttgc

SEQ ID NO: 18411 - DNA, 1306 bp, Oryza sativa
  ref <308>: DATABASE ACCESSION NUMBER: AK068807
  ref <309>: DATABASE ENTRY DATE: 2001-12-06
ggctcgccacccctcctcctcctctacttgcagcttcagctttcgcttcgctgccgctgcgggcgctgctctccgagtcccagcgggaggtggagatggtgggcgaatcggaggggaggccgctccgggttggcctcgtctgcggcgggccctccccggagaggggcatctccctcaactccgcgcgatccgtcctcgatcacattcagggggaggacttgctggtcacctgctactacatcgactgcggcatgaacgcctacgccatatcacctgcgcagctatattccaacaccccttcagattttgatttcaaacttgaaagtctagcccaaggattccaatccctatttgactttgcacaacatcttgccgcaaatgttgacattgtcttcccggtgatccatggcaaatttggtgaagatggtggtattcaggagcttttggagaaagcaaatgttccatttgttgggacaccctctaaaaattgcctccttgcttttgacaagtataatgcatcgcttgagctcaatgcacaaggctttttaacagtaccaaactttcttgtagaggtaaagcttcttgatttctgtgttgtttactcaatgcaatattgttcatactgtcattaagagtataatatctttattttagttttcttacaaggtatacaagttttgatgcacacagtatgcagtttagaaggaaaacaagcataacattcttgaaaattttaaatcattcacaagttctttttgtgcacttttcatttggatgattttgtcgattccagggtattgaatctttacaaacactttcaaaaggaaaaacaaatgggctttagcatgtctttcttggaatctgaaaaaagaggaagatacgactaatcattgtaattctttgtgaaatagttgcatccaacgatattttaggaggtatattatttggttgctgattctgatgctcttctattgaggcttatcatgtgtactacatgtatcgtctatggcaaaatagaaggacaaattagctaagtcgaaactggaggaatggtttcaaagcatcaatttggataaagaaaatggcaaagtagtggtcaaacctacaagtgctggatcgagtattggtgtagttgttgcttatggtgctaatgatgcagctgagaaagccgagggaataatttcagagggaattgacgacaaggttatcatagaagtttttcttgaagggggcactgagtttacagccattgttgttgatgttgggacagctaataacagtgagcctgttgttctccttcccacgg

SEQ ID NO: 18412 - DNA, 2648 bp, Oryza sativa
  ref <308>: DATABASE ACCESSION NUMBER: AK068808
  ref <309>: DATABASE ENTRY DATE: 2001-12-06
ggccgcatcctcaggtctcactgccatcgccgccgctccacctcacacgccggccgctgctccctgcctccggcggccgccccgcagccgctgccggcctgaatcggtttcatggctcctcatgagcctgcccccaagctaaccctctccaatcgatgctgctgcccaacgacgaagacacccgcctagagttccagattgggattttccccagcttcagcaccccttgagccaagcatggcttgtctcccccgagttcctcctttctgatcatccccttttctccctacttctgtgatgtgatttgattggtactctcttgtgtgatagcatgctctgaattgtgatgcttgtgaactaatcctagcgaccaacttgatgatgctataatcaggattgtacttactgtttctagggttctagataaattggcttgctagggttggacgaataaatttctgtatgccatgagtgaatgaatgaatgctgatgcaagtgcagtactggaattagaaaagctaatgaaaatcacactaacataattaagtccttgtatatgcttgcatgatgaaataactgaatttggcacaacagcaggatcatattctagaataaatcttattgaatgatgcagtaatttacatggtactatactttgaaaatcatgccaagatatgtactatagagaatggaacaccttgaatacagatagatggtaactgatttctttggatgatttactgctactgactgtatgtcatgactataatttactagattagagttgttgatgcagggaaaaaaataaactattgattaactaactatttactgtggttttattctgagagtatgattttaaacattcgttctgctacacaaatgatttggtagaaaaaaaaaacttatatgttctgttaagttattgaaatttagtagaactacgactatttatcactatatgcatacttagatgtacttctattgtctcttttctgtgtttcgtagtaaagaactagatacatatgcaaacttaacccagattcataaccaactggtttcgcatgctattctacaattcaaatgattaataatttatgatggttcctctattaagtctgggttgattttcaatacttttaaatgaaatcagattaatatacacataccctaacctttccaagaatatgcacagcttagattttactttgtttgtatgaccaaaatctgaaagttctatattttttttttaagtgcacatgcatgatcaactatctgaataaaattcatgtctttctttactaatttcccgttcctggttatataagcagttacattgtgagtttttgactgtgtacataggcataggtagcttagtttcagctacagagattgagcagattacattctattgctgtctcaaaaggtttctgatggacattatggtgttacaactatcttaatttccaagttcttaacgtatggggcaaactgaaaagtgatctgtgctcatgccagatcctaacaggggacaaatgaagtgcagtgttaaagttgcaatggcatttcaaaaaaaaaaaaaaaaaacattcatctttgatttcttgactggggctcatgtcgtggccacctccatcctcctggttgccaaccgctgaggaggcgcggtgcagcccaccgcttccatctgagattgttgcgtgggcgactggaagcggccagaggttgagttcctgctggacaactgtgggcgaagaggcaaaatggctgacgaaggccagcggtggctggagattgatgatgaagcagcagtctgtggaattcctcttctccatagccacttagcccctcctttcaagataacttctgtatgtttgatgcccctctaataatagcttaggattttttgaaatatcgatagctacaaccagtgctcgttccatcattcaatgacctgtaacaatttcaaaataactatgttgggcaccagatgaacccaggcagaggttctttggatgggtttttgtacaccacaagggtctatctgcagaaaatttaacaaaaataaactggccgtgcatcttactatgttcgctatgcaatggagtttatgggggaaagttcagttgctttttgttccatgtaatatcctcgaattgtattccgaaaccaacttcttaatataatgggcagagctccaacctttacttcagaaaaagagaaaaggtcaccttctcctaacttactcgctttgttgttttttccattcacatgcgtttgcagcttggcaactagaggagctgacttctggattgatctcctctcttattttccaacaatgagcatttgttgcaggtacaactaatattcaagttttatctgtgctaatcccactgtcgatatcgttcaaccgccgttgtctgcactctgcactctgcagcactgtgactgccgtcgtttgcaggcaacagttgaagatgccactaatctgtatggatggcccccttgcattgacactctactatgtgtctgtaattttgcttctgttgcttatgaccccaacagaatttgatgattcagatttgatgtacaccaataaagaatgtaagcaaatataagagaagagaaacgatgatgttcttagtggc

SEQ ID NO: 18413 - DNA, 3124 bp, Oryza sativa
  ref <308>: DATABASE ACCESSION NUMBER: AK068809
  ref <309>: DATABASE ENTRY DATE: 2001-12-06
gactgatcgatcatcctcaggtgtctccagcctgctagagatgagcgcaggagaagacggagtttatttcaggatgagattcttcttcttcttcttcttggttgtgctatgcttgctagattccaatatctccacgtcccatggctgcttcgtggaggagaggacggcgctgatggacattggctcctctctgacgcgctcaaacggcacggtgccgccatcatgggggcgcggcgacggtgacgacgactgctgcttgtgggagcgcgtcaaatgcagcaacatcactgggcgagtatcacatctctacttctcaaacctgtatgattctctggaagtgctaaatgcacatggtgactcgttttggcgtttcaacacgacggtcttctcctcattcccggagcttcagttcctggatctgtccagtatctatcccagttctctaaatatcgatggcttggtagggctgaagctgcccaagctacagcatctcaacctcagttataactggttgcaagagagtatcctcgcagatcttggggaactggtttcgcttgaagtcctagatgccagctccaacgccatgagtggagttgttcccactgcagttttaaaaaatcttacgaatctgaaggagctgaatttgagtgccaacggattcagcggaagccttccggggtcattacttgaactacctcaccttgatccctcaggaagttcgttagcaggacgtactccaattaattcatctttggagccagtttcactacaagtattaaatctcaacaacaacaggatgagtggagctcttccaaccgaacgagcattcggatatctaaggaacctacgagaattgcatttgagttccaataacttcactggaaacatttctactttcttgctttcacttccacatattgaacgattggatctctcgggaaatacttttgaaggacctatccctataactccatcttcaaatctttctctgtctctcaaaggtcttcggttttcccagaacaatctgagtggtaaactctcatttttttggctgaggaacctcactaaacttgaagaaatcaacttgtcagggaatattaatttagcagttgatgtcaatattcctggatgggcacctccattccaactgaaacagttagctctctctggttgtgatcttgacaaaggcataattgcagaaccacactttctacgcacacaacatcatttgcaggagcttgacttgtcaaacaataacttgtcaggaagaatgccgaattggctttttacaaaagaagcaactctggttaacctaaaccttggaaataactcgctaactggatctctaagtcccatatggcacccccaaacagctctacaatctattgttatatctaccaaccgtattacagggaagctacctgccaacttcagcgcaatatttccaagcttgtccactctggatttgtcagacaataactttcatggagaaattccgatgtcactgtgcagcatcaaacacatgaaggacttgagcttatcaaacaataatttttctggtaaaatgccgacttgtgtgttcactgattttcttgagctgtggaccttgagtgcctcaaacaaccagcttggaggtctggtgtttggtgggatgaaaaaaactgtccatcgggtttgcaatgcacctacagaacaacaaatttgaaggaacactgcctcgtaatctgtcaggagcactagtaatcatggatttgcatgataacagcctgtccggtgaacttgacacctcattttggaatctgtctaaattgcaggtactagatctttctgggaaccatataactggcagtatccctcaaaaaatttgcagcttggcaagcattgaaattttagatctttcaaacaacaacttatcaggatctataccaagatgtgccagtgcatctctaagttcgcttaatctgtatgggaattcattatcaggaaacatctcggatgatcttttcaacacatcaaatcttatgtatttggatatgagacataataagttgactggtaacctcaattggttacggcatcttgataaaatcaagacactttcattgggatggaatgactttgaaggccaaatcactccaaacttgtgtaaactaaagtgcccaaggataatcgacttctcacacaacaaactctcaggctcactgccaccatgtgttggcaacatctcttgtgagagtgatacggcagctcaaaattattcaccattgctacttatttatgttataatagaggcttacataattgttcatgacccaatagacttcacctttgctacaaaagggggacaatatacatatggttacaacttcttcgatctgatgtctggtatcgacttatccgggaatatgctgtcaggagaaattccatgggagcttgggaatctgagccatatcaaatccctcaacctgtccaacaatttcttcactggtcaaatcccagcaagctttgcaaacatgagcgagattgaaagcttggacctttcccacaatgaactgagtggattgattccatggcagctgaccaaattatcgtcattagcggtgttctctgtggcatataacaacttatcaggatgtattccaaactctggtcagttcggcacgtacggtatggatagctaccaaggcaacagtaatcttcggagtatgtcaaagggaaacatatgctctccagattcaggagcaggtgacttgccatcggaaggaagagacagtatggcagatgatccagtgctctatgcagtcagtgctgcctcattcgtcctggcgttttggggcaccgttgctttcttgtttttccatccactcggacggcgtgcaattctcgcgacaaggaatttggtgttttggtgtggtcattaacgatttgaagtttatttttctgtcatccatttctgattgtgaagtctccacttaccaactgcttcaaaattcttgagtctataatttttaatctaatgtccatattttgttttgggcctgtcatctaaatgtcgatgttgtgtaaatggctgttgagaagtgtagcttgctataagatgaatgaatatattaggctgcaattt

SEQ ID NO: 18414 - DNA, 1205 bp, Oryza sativa
  ref <308>: DATABASE ACCESSION NUMBER: AK068810
  ref <309>: DATABASE ENTRY DATE: 2001-12-06
gagctagccgagcacgagcagagcgtcttgtgcgcgcgcatctgcatctgtatgcggcgccggcgatctcatcaattctgcgctgccggatcgagatcgagctaggccaataggccatagccaaaccatggcactcatgctcgcggccgcggcgagggagtggacgccgtgcgcggcgatggtggcggcgcagtgcatctacgcggccatgacgctctgggccaaggccatgttcggccgtggcgtcagccccgtgatcttcgtcgtctaccgccaggccatcggcaccctcgtcctcgtccccatcaccctcctcgccaacagggcaaaagtgaaggagacgaggagccttgggacgacaggcttgttcttggtgtttgtgacggttttgctcgggcacggcgacggtaaaccagaacctgacctaccaagggctgcatctgggctcgtcatccatggcgacggccatgaccaatttgatacccgcgataactttcttgatggcagcgtcagcagggcaggaaagagttaacgtcagagaacggggcaccatggccaagatatccggaaccatagtctgcgtgggaggagccacggccatggcgttcttcaaaggcccaaagcttctgaactacacgcttggtgacctgaacatgctcctccactcgccggcgatcagcaagtgggttctcggcgcgctctgcctcgtcgtcagcagctcatgctggtcactccggctcatactgcaggtgccaatctgcaaattttatgtggatcctctgtctctgtcggcatggacctgcttcttctcgacgctgcaatgcgcagcgctcgccgtcttcctggtcccggacgcgaacgcatggaagatccactcgctcttcgagctctcgagctacgccttcgccgtgagttcagaattgccatgcgttttgttgtgtgtgtgcccggacagcagaatggacaagttctggttttctggatctgaactgaacagagctggacataaataatgcagggagtgtttgggtcaggcgtctgcttctacctgcaatcatggtgcatctcggtgagggggcccctctactcggccatgttcacccctgtctgcaccgtggtcaccaccatcgtcgccgccgccgttctccaggaggagctgcacattggaaggcacgcttcttctcttctctcgacgacagacacgc

SEQ ID NO: 18415 - DNA, 2198 bp, Oryza sativa
  ref <308>: DATABASE ACCESSION NUMBER: AK068811
  ref <309>: DATABASE ENTRY DATE: 2001-12-06
ggcgccaaagcccaacgccggtgagggttccggttccccaactgcggcggcggcggtccgggcgctcccggagcggagcggagcccccgatggcggagggggagagggagctccatgtccgggccctcgacgggcggtccaccgtcgtcgcgctcgccgccgccgcctccgtgcgggatctcaaggccgcgctccggagctccttccctcccgcgcaggtctcccccagcttccacctcttcctcaagggcaccaaattgcgcgtggaggccgagattggcactcttgctgttggtgagggggaatttattgtccttgttccattcgcaaggaagtcgcagcagtgttctccggtggcaatggcagaacaagggcagattactgaatcaccaagatcatcgcaagtgtcaactggggcgaattcagctcggagaggcattacggataacctctcatcaatcccaagcagcccacatgctgaaacggcgtccagatatttttcgagtggggctaattcagcttggcaagaaattatggatgatctttcatcgatctctagcagcccacaggatgattctgcatccaaaaacttttgtgcccaaagcactatcccttgttctgggaattctgtagaggatgtgtcaacagatcaaaggttacctactgggaattcaaataaaaggaggaagccatgtaaggaaaatggaaatgcattcaacgaaatgcctacctctggagcgaacagtgctgctggccagcctagcatagataagaaaagtagcattgccagatctgctgcaacatcttgccatggcacgtgccatttagggcctgctgaaatggctgaccatctgaaacaaggacttggaaaggagggacagattgtacatattgaagagataccatgtcgagcggcatcttttgcagaacttcctaatcatctttcagaggctacgagggaagcattaaaaagtattggagtatctaggttgtacagccaccagtctcgagctatacactcttccattgctggaaggcatgttgccattgcaacatcaacatctagtggaaagtctctgtgctataacattccagtccttgaatctctctgtcaaaacctgatggcatgtgctttgtatatatttccaacaaaggctctagctcaagatcagctaaggagtttactcgagatgaagaatgcacttcacactgatattgatgttaacatatatgatggtgatactcctagagaagaccgtacgtggatcagagataatgcccgtctgttaattaccaatccagatatgctgcacatgtcaattttgccatgccatggtcaattccaaaggattttgtccaatctcaggtatattgtcattgatgaagcacattcatacaagggagcatttggctgccatactgcacttattcttagaagattgaagcgcatttgttcaaacatttatggcagtcatcctactttcatattttgtacggctacttcagcaaacccgcgtgagcatgtgatggagctagccaaactggataatgtagagctgatcgagaatgatggaagtccttgtggttttaaatactcctcttgtggaatcccccgctacatatgacgaaggaggggagttcaaaagatagcttattaactagacgctcaagatatacgcaaatttgttcactggccatcgatgcaggaattctaagaagttgtcctattaaatagtttcttggcaggatgatttgatagtcaagatagagaatacttctttgccaacctgaatttgaaaattttgggccaggggccatactgctttgccaacttcatctctgtactgtcctgtgatccttgagtggcatgttaatttccaacactcaacaacggatccttttatttgatgagatacagtaattgttgtggacttgaaagcaaaagttatgagttcatcacagtacaaagggacgatgtttaatttttaagccaaaaattgtaaacatataattgttctgtagtggcatgtaaatgtgttagttattgcagtttaacacttcagcattttgtttcttatggcatgccagtacagcagtgtttgtttctatattcataattttcttataactactatgtgtaaagatacactaataatttgtatttcgtgtattagtccaatagttgaggtttcttatct

SEQ ID NO: 18416 - DNA, 2348 bp, Oryza sativa
  ref <308>: DATABASE ACCESSION NUMBER: AK068812
  ref <309>: DATABASE ENTRY DATE: 2001-12-06
gttaatgtgtacttgagagtttacaacaaccaaccagattatgaaataagtgaccaggaaggtttttgcatcgcgctgcttaaatttatagcagagctagtacagaagtggaattcattaagtttggatgaaaatatgatgcatcaatgtggtacagctattgagacatcagtcactgaaaatggtgatatcagtggttcaacgaatgaaggaaaagaagaagattcattggaaaaacacaatagaggagtaacagatggagattctgaagtgattatgaacctccgaagtgggctaacatcactacagaatcttctaaccagtaatccaggattggctgctgtttttgcttccaaggaacggttgacacctctttttgaatgtcttgcgctacctgttcctcctgaaagcaacatcccacaaatttgcctaagcgttctttctctcctgacgaagcatgcgccttgtttggaagccatggttgcagaaagaacaagtctcattttgcttttccagatactgcactgcaatcgttcttgcagggatggagcccttactgtcctctattctttagccagcacaccggagctggcctgggctgctgccaagcatggtggtgtagtgtacattctagaacttatgttaccacttgaagaggaaatccctatgcagcaaagagttgcagctgcatcattattgggcaaacttgttgggcagccaatgcatggtcccagggtggcaatcacacttgctagattcttacctgatggtttggtttctgcaattagagatgggcctggtgaagctgttgtttcatgtcttgaacagaccacagaaacccctgaacttgtatggacacccgcaatggcagcttctctttctgcgcagttgtcaaccatggccacagacctctaccaagagcagatgaaagggcgtgttgttgattgggatgtgcctgaacaagcatctggccagcatgtaatgaaggatgagccacaggttggaggtatttatgtgagactcttcctaaaggatcccaagtttccattgagaaaccctaaaaggttcctagaagggctgctagatcagtatgtctcatcagttgctgccacacactatgaggcgaatgctgttgatccagagcttccgttgctgctttctgctgcattggtttcattgttgcgtgttcatccagcccttgcagaccatgttggttacctaggttatgttccaaagctggtttcagctatggcatatgagggtagacgggacactatggcatccggacaaaccacaagtaggttgcaagcggaacctagcaatcaagagaactcggcggactctaccgtgcagactccacaagaacgtgtccggcttagttgtttgcgagtgctgcatcagctggcttccagcactacttgtgcagaagctatggcagccacaagtgcaggaactcctcaggttgttccattgcttatgaaagcaattggatggcaaggtggaagtatactggcactagagacactaaagcgtgttgttggtgctggcaatcgggctagagatgcacttgttgcacaggggctaaaggttggccttgttgaagtactgcttggtattcttgattggcgagctggtggcaggcagggactgtgtaaccaaatgaagtggaatgaatcagaggcttcaattgggcgtgttttggcagtggaggtgcttcatgcttttgcaacggaaggcgcacactgtgctaaagttcgtgaaattctgaattcttctgatgtatggagtgcttacaaggaccagaagcacgatttattcctcccatccaatgcacagtcttctgctgctggagttgcagggctcattgagagctcatcgtcaagactgacctacgcccttactgcaccaccacctcagcctgccttggtccggctaccttctacagctccagcgctaccatcggctcctgcaaatcccagtgggcggcattcttatcagcattcatagcgtgcgaaatgaaccacgttaagctcagatcattagcggtgtgatcatttcaagttttattctttggcttggttggcctagcaatttcgcacacaggccagagcgccacaaaggggacttgctacaacagcaaaatacagtttcacccatacattactcgcaacttggggcaggaggcctgcgttgcagtgccagtacatagcctgtacagttttccattacatagaggtcgagttcatgctagtttcttgagaatgtaaagcatattgttgttttgttttttttttacactgtaacatacctgtccatagaatatgcaagctgaaaatgtgtatcgattc

SEQ ID NO: 18417 - DNA, 1024 bp, Oryza sativa
  ref <308>: DATABASE ACCESSION NUMBER: AK068813
  ref <309>: DATABASE ENTRY DATE: 2001-12-06
ggttttcatcttcttcttgttcttgtactaactactcctaactcccaccacctccgcctccgcgtcgccccgccgcgcgcctcctccccgcctcgccgccggcgcgcacctcctcgcggatcgcgatgcacaagacggcgcaggcctggttcaccggcggccccgccgcccccgccgcctccgccggcgagtcgcagccgtccctcctcgccgactggaactcctacgccgcctcccgccccgacgcctcctcctcctcccctctccctttcgacatcgaggccgccgtccgctccgccaacgacaccgtctccggcaccttcagcgtggtgaccaagggcgtgcgggagctgccggggagcttccagagcgcgacgagcagcttcccgtcggggaaggcgctcatgtacttcggactcttcctcgccaccggcatcttcttcgtcttcatcgcgttcgcgctcttcctccccgtcatggtgatcatgccgcagaagttcgccatctgcttcacgctcggctgcgggctcatcatcgcatccatcttcgcgctcaaaggacccgccagccagttcgcccacatgacctccatggagaggctaccatttacaggggcacttattggatgcatggttggtaccatttatgtgtcaatgtttcttcacagctatttcctctcagtgatattctctgtccttcaggttctatctcttgcttactacaccatatcctactttcctgggggttccagtggattgaaatttatctcctcgagtctcttgtcatcagtaacgagctgttttggccggtaacctgagtaggatgacaactacttgatcatatatccttcatttttcttgcaatatttttgtatgtagcactgatcaacgatagagagattgtgacacccctcctactcatgcttgttgctgtttagactaagatcaatacggggtgaaaaggtttgtcgtacttatgtatctgaaggtcatattgtggaaataaagctgtcctttcattgtgt

SEQ ID NO: 18418 - DNA, 911 bp, Oryza sativa
  ref <308>: DATABASE ACCESSION NUMBER: AK068814
  ref <309>: DATABASE ENTRY DATE: 2001-12-06
gaagccaaacaagaaacccaccgtttctctctcaaaaccgcgggaatcaatcaatcgccgttcgcgtcgcgccacgagatattttcccccaagaaaagttggagtgagggatgagtgctatggcgatgtcgtcgctgaacccgaacgcggcgccgttcatcccggcggcgttcaggagggtggaggacttctcgccggagtggtgggagctcgtcaagaccacggcgtggttccgcgaccactggttcaggcagcaccagatgtacgaggacgctgcggcggaggaggaccaccaccgccaggtgttcgacgacgacctcgccgcgctcctgcccgacgactcgctcgacctcctcgacatggtcgacaccgacgacctcttctacacccccgacccccccgtccaccacaagccgacgacgactcccaccctcgacgccgacgtgctcagggcgctcagcctcaactcgccgaggttgggcggcgccgggatggtgaggcacgccgagaagccggcccagttcgtcgccgccaagggcggcgccgcccgccacgtcatccaccagcctcgctagagcgccatgggtgagtggtgatgctgctgctgctgctgtctagtgtataaccttggagttttcagagtttagtctctctgcttttcttcactgtgtataaaaactgaaaaaaaaagggggaaaaattgcagctttctggtgctgcatcccttgtagtagtaaagcagcttctgttcagtttcaggtgcatcatctaaaatgtgttagaaaaaaaaaagcaaaaatagagagtgatgtagaatcatgtgtactaatgattctactaccgcccttgttaatgttggatatattaagatggcaagcagtctaatgtttagaatctttcaacttctgatt

SEQ ID NO: 18419 - DNA, 1544 bp, Oryza sativa
  ref <308>: DATABASE ACCESSION NUMBER: AK068815
  ref <309>: DATABASE ENTRY DATE: 2001-12-06
gtcgtcctcctcctccccagcagtcccacccgcgcacgcacgtcgatccgggagagagagagagagcgcgatgacgccgctccacgccgccccgcaccatgccgcggccgcggccgcggtcgtctcctcgccctcatccgcgccgctcctcctccgcgccaagccttaccaccccaaggcggcggcttgctccttcaccgtgaccgccaccactccgtcgaggaaagctttcctgtcgtgcccggatcacggccaggcggcggcgggggcggcgccgccgcgctccgccccggcgtcgtcgccggcgctcatctcctccgtccaggacctgtacgacttcatctgcagcggcccgctcgtggacaggatcgggtacaccaaggagaagatcgccggctccatcgaccggtggctgcgctgcggtgtgcaggtggcccggctgttccgcctcaacgagctccacctctcggaggcggagaaggccaggatataccacttctacatccccgtcttcctctggtgcgaggaccaggtcacggagcacagggccaagtacaaggacggcgacgagatccctccattagtgattggggtcagcgctccccaaggcagtggaaagacaactcttgttttcgcacttgattatctttttcgggttgctggtaggaatgccgctacattatctatcgatgacttctacttgacggcagcagaacagggtaaattgagggaaagaaatcctggaaatgctcttttggagcttcgtggaaatgctggaagccatgatctcccgttctcagttgaaacacttgaatcgctgcttaaactaactaaagaaggtttgaagatgaagcttccacggtatgacaagtctgcttttggtggaagaggtgatcgggctgatccttcaacatggccagaggttgaagggcccttagaggttgttctttttgaaggatggatgcttggattcaaacctcttccaaatgaagttgtaaaagcagtggaccctcagcttgaggtggttaataagaaccttgaggcatactacgatgcatgggacaggttcattgggtcatggatggtcataaaaataaaggaacctagttgcgtgtaccagtggagactgcaggcagagatagctatgagagcagatgggaaaccaggaatgtctgatgaggaggtcatggattttgtgtcgcgctacctaccagcataccacgcatatttgcccactctatataaagagggaccaaacggctcgaacccagaccacctgctggtcgttgacatagacgaaaagaggaatcctatgtggggtagatgagccctgaatgtacattgctgaaagaaaatggatcttctgacccaatggtggagtttgggatatctgatctttctgagaccacatattccaagcaagcaccactggcctcttgtttcttgtggcttgaacaagtactaaacgtgtaaaactttgatgtatacgaaatcttgctattacttataaggaaatcggaatcccaattcattttgctgagtgc

SEQ ID NO: 18420 - DNA, 3365 bp, Oryza sativa
  ref <308>: DATABASE ACCESSION NUMBER: AK068816
  ref <309>: DATABASE ENTRY DATE: 2001-12-06
ggcatcgtacaaacacaccatctatatatttaacaagcttccgtgttgtttcggcagcagaaagagagagagggatgggtggtgttagtggtaagctggtgtgggtgttgctcgtgatgtgctcctcatggctgatcgccgctgttcatgcccagcaagcggcaacaactgatccaatcgaagtggcggcgctggaggcgatcctggggagatggggcaagacgacgtcgccgctgtggaggatgagcggcgagccatgccgcggcgtccccgtcgacggcagcaccgacctcgacggcaaccccaagaacaaccccggcatcaagtgcgactgttcctacaacagcggcaccgtctgccatattacccagctgagggtatacgcattgaacgttgtcggtcagatacctgcagaattgcagaacctcacctacctaacttacttgaacctggatcaaaattacttgtcaggccccataccatcattcattgggcaattgactgccttgacagaattgcacgtgggattcaatccactctcaggatcacttccaaaggaacttggaaatctcacgaacctcaatttgctaggcattagtttgaccaatttttctggtcaacttcctgaagaattgggcaacttgaccaaacttcgacaattgtatactgatagtgctgggttgagtggcccattcccttctacgctctcaaggcttaagaacctaaaactcctgcgggcatcagataacaattttactggaacaatacctgattttattgggagcttgtctaatttggaagatctggctttccaaggtaattcttttgaaggaccgatcccagcaagtttgtctaatctaaccaaattgacaaccttgcggattggtgatattgtaaatgggagctcttcattggcctttatcagcagtctgacatctctggataccctcgtactgaggaactgcaagatatctggagaccttggagcagtagatttttcgaagttcgcaaacttaactttcctggacttgagttttaacaatatctcagggaatgttcctaaatcaattctgaatctacaaaagcttatattcctgtttcttggcaacaacagcctaacaggagaattgccagatgggataagcccttcgctaacgaacttagatttctcatacaaccagctcactggtagctttccctcctgggttacccagaacaatctgcaattgaatttggtggcaaacaactttattcttggcagcaccaacattggcatgctacctccagggctaaactgcctccaggaagatactccatgttttcgtggttctccaaaatattattcctttgcggtagactgtggtagtaatagatctatcagagtttcggataatactatgtacgaattggattccacaaaccttggggactcatcatattatgttacaagtcaaacaagatggggcgttagtaatgtaggaaaattattccaggccccaaatgacagtaagataatacatagtggtgagaagatccagaatgcagtggattcagaactattccaaactgcaaggatgtcgccgtcgtctctgagatactatggccttggacttgagaatggaaattacaccgttctgcttaaatttgcagagttaggttttccagacacgccaacttggcaaagcttaggaaggagattttttgacatatatatccagggtgaactaaaagaaaaggacttcaatataagaaagatggctggtggaaaatctttcactgctgtttacaagagttacacaacaactgtgtcaaaaaactttcttgaaatccatctattctgggctggaaagggcacttgttgtattcctattcaaggttactacggaccattgatctcagcattaagcatcactccaaattttagtcctactgtgcgaaacggtgtacccaaaaagaaaagtaaagcaggtgcaattgttgggattgtgattgctgcctcggttttaggatcagctatcttattcggaatatttatggtcataaagaagagaagaagaatggcaaaacagcaagaagaattatacaacctagttggacagcctgatgtcttcagtaatgctgaactcaagttagctacagacaatttcagttctcaaaacattcttggggaaggtggatatggtccagtctataagggtgtgctacctgatggaagagttatagctgtaaaacaactttcccaatcatcccatcagggcaaaagtcagtttgtgacagaggttgcaactatttctgctgtgcaacatcggaatcttgtaaaattgcatggttgctgcattgatagtaacacacctttattagtttatgagtatcttaagaatggaagcttggataaagcattatttggaaacggtagcataaaactggactgggcaacacgcttcgagatcattttaggaattgcaagaggcctaacttatcttcatgaggagtcgagcgtgcgcattgttcatagggacatcaaagctagcaatgtcctacttgacacagacctcaccccaaagatctctgactttggactcgccaagctttatgatgagaagaagactcatgttagtacaggaattgcgggcacatttggttatctggctcctgagtatgcgatgagacgacatttgactgaaaaggttgatgttttcgcattcggggtggtagcactagagattgttgctggtcggtcgaacaccgacaattctcttgaggaaagtaagatctatctctttgagtgggcttggagcttgtatgaaaaggagcaagcactcgggattgttgacccaagacttgaggaattcagcagggatgaagtgtatagagtcatccatgtcgcactcatctgcacacagggctcaccctatcagcgaccaccaatgtcaaaggttgtggcaatgctaactggagatgttgaggtggcagaggtagtgacgaagccgaactacatcaccgagtggcagttcaggggtgggaataccagctatgttaccagccactcaggatcaactacccctaagctaagcaggcagaaagagattgatcctctcactcaatcaccaacaatcaccggagttagccatgagcatgagggaaggtgaatgcaaagttgaatagatgcaggtgatcttggtttgaagtgacaatactatatgctattcgtgcttatgtgactatatgtaaatgtgaatcagagcaaatagcggaacttatttattctgaagtctgaactatgtgtcatgatgataaaagtattgctccttgtaatttgtaatggtgaaatatagtgctatatactaggatgtttggagttgatc

SEQ ID NO: 18421 - DNA, 2332 bp, Oryza sativa
  ref <308>: DATABASE ACCESSION NUMBER: AK068817
  ref <309>: DATABASE ENTRY DATE: 2001-12-06
gaatcactgttagccatccatctgcacgatactacccagccagactccagccgccgcttccagacgcgtcggccccaagagacgaggaacgagtctttcttcttccccggcaccgtcgcggcagtccgttgctgccgctggccgccgctgtgcgcgtgtcctcaaggctgccgcttccgatcttggagaagcatgggcgggcgacctcatctcggttttggagaagccggcgtcatcaggagtagtacagcactcggaaacctctccgtgtctctgagaattacaaccaagatgaagacgggcccccatggggatgctggtttcggagaaggtgtggtaggcgcaagcgcaagcacccgcgaaatcgaagacggggctccatggggatgctgggtctggcgaggatcatgtcgatgaaacgccggcggcggcggcggcggcgaatccaggccggtatgcctctttttcagcttgctctctgttttaattcttgttctataataaccagatccattgacctagatagctaatcatcaagttaaagggcatcgtcatcgatctgtgcacagaaagctcaaatttttatcgccctcttttccatcagcttgtaatctgtttacagtgtaataagaaaatatgcatattttcggaatcgctagatttctatcgcatgattctcggggggccaaaataatgcgaatgaagccagtagaattagggttctggatttggggaggaattagggagagattagtggtccgagaggtcgatgggccggcggtggcagcagcgatcagcagtcgagccagtagggctagtcggctagaggttatggatctggggaggaattactgagaaattggtggtcgtggaggtcgatgatgtggcggtggcagcgacgatcaacatttgagccagtagggttagggttctggatttggggaggaattgatggtagggaggttgatgggccgacggtggcagtggtgatcgggacagggaggtggcggatcactccctccatgcagaggaggatggatggttgatagagggtttaggctttgaaaatgttagctccagcggcggtcatgtgtggcggcaccagcattgccgaatctgagctgggtgttgtggcagcaggtgcgaatatagaagcccgtgaaaggggaagagaggatgtgcggtggcggaggaggaaggagctgcgataggttgggttgagtgagctacgactggtgctcttggggttggtgcattttatatgagagcgcaaaccaacctggaccagtaaaatcaaatggttatgtatgtctgtgtgattttgcttccttatgttatatagcaagtccagtgttaagacacagacatgtccggttcggccaaacaatctggacacccccccccctctctcttctccaccattttgttttctgtaagcagaccagatttgttccctatcaccatcagcttgctgtgctgtagatggatcgagtgctttagacatgggaagaaaggattcacgcagcaggtctggaagtgccaagaggaggggaccacatctcacactggacaggctcccacgggtacataacataatgccgagaggcgatctagttcagattttagcaaaacattctggagagcacaaaagattcagcagtgccagtgcatggacctgaaacaaaattatgatatgtatacattcaggcattgtttcagctcttctgaataagggcatagctgcttcagcaaataagtaaacaaataatgctatgagattaatagaataggaatgctatagcaatattaactttatgacatgtctttctatctcttgcttttctcttgtaagcattatcactttgtccaactcaacttcgtcctcttgccatcctgttgttgaagttgtctgttatgtatctcttgcttaggatgtgttgcatcagataattgctctcctgccaatgcaagatgctgcacgtgctgcctgtgcctcacgagaacttttacagtcctggagacattatcctgagctcaaattcagtgccaaaacactagccatggatggacaacacaattgtatacaaggtcaaatggattcatatatcaagaggattgatattgctctgcaaaactgcactggtggttgggtgaagaggtttaggtttgaactacaattttttcatgagttgtctgcccatcatatcaaccattggcttgatgcagctatccctgggatcgaggagctcaccctagagctgccccgggatgataaaatgaaatataaattcccatgtaaactcttgtttgaaaagggatgctcaattcagtc

SEQ ID NO: 18422 - DNA, 2228 bp, Oryza sativa
  ref <308>: DATABASE ACCESSION NUMBER: AK068818
  ref <309>: DATABASE ENTRY DATE: 2001-12-06
gattcacccatctctctctcctcctcctccatgccctacaaactacaaagtacacttcctcttcctcctccaccctctccctctcccactccagtggctggcctggctacctagccacctagggtcatctgctcctactctctagctctctctctctctctaagatcacccggccggccaccagctggggatgaacctgaccaaaacaccataaaatagtgtgtgatctccccacacgcacacagaagctagcagcaacaagcttcattcgcctcaccctctcccatcatatcatatgaggaagcaggattctttccaacctacaatatatcttttccctgatggctagctagctctttctcggactttctttctttctctctctctatccgtctctaccacatcgcaccacctaaccttctcgagctagacccacccacaacgagagggaggcaggcaggccgcccggagacatcaaattcattctcctcttctcttccaaacaaccacctcacttaccagcctaaaaaatccaatcaaagagaggtatagttggtttatatctgtgtatatataccatggcctaattgatgaccatggacgtcgccggagacgcaggaggtggccgccgcccaaacttccccttgcagcttcttgagaagaaggaggagcagccgtgctccagctcggctgcaggaggtggtactgggccatcatcggcgggtggcaacgggaacaatggatcgggaccgggcggtgccggaggggagatgcagctgcggaaggcggcgccgaagcggagctccaccaaggaccggcacaccaaggtggaagggagggggcggcgcatccggatgccggcgctgtgcgcggcgagggtgttccagctgacgcgggagctggggcacaagacggacggcgaggccatcgagtggctgctgcagcaggcggagccggcggtgatcgcggccaccggcaccggcaccatcccggccaacttcacctcgctcaatatctccctccgctcctccggatcgtcgctgtccgccccggcgcacctccgcgcgttacctagccccgccgccgccgcccggttcggatcccgtgcggacgcgtgggaccgggttgtcagcctcgggttcccgtccgagggccccgcctcgtcgtcctcgtcgccgtccccgcttctgttgaacttccactcgggcagcgtcggtctcgatgtgcaaccttcgccttccgccgctgccgccgccgccgacctctccaggaagcggcgctgggagcaggaaatgcagcagcagcaacagcaacaacagcagcagcagcagcagcagcagcaacagtaccagcagcagatggccgggtacacgcagagccaaatgccgggcaccgtgtggatggtgccgagcaacagcacgcaaggaggtgggccgtccggtggtggcggtggcggcggaggaggcagcggggagtccatttggacgttcccgcagatgagcagcgccgccgcggccgccgccgtgtaccgggggagcgttccgagcgggctacatttcatgaacttccctgcaccgatggcgctcctaccgggacagcagctggggctcggcccagttggaggcggcggtggcggtggaggaggcggggaggggcacatggggatccttgccgccctcaatgcttaccggacacaggcggcgacggatgccgccggtcagcaaggcggaggaggaggtggaggaggatctagccagcagcaacacggaggcggcggcggcggcggcgagcggcatcagagcataagcaccagcgactcgtagggctctgaagatcgcgtcgcgtcgcatgcattggcccggtcggtgtgactttgatctgttctttgtcttggtttcattctttcttcttttgttggtttccttccactctctccctaggcaagagcttgcaaggactcacacacttagctgcattccatggcattcttacgtacgtatgctaggctagctagctacctgaacttgtgcttatgggtgagagcgaggtgatgatgcctgggaggatcaagaggagggaaacgcacgcagctgcatgcggagagattgttctttttgttcatttagctctagagtttgatcgagtgcgagcagaagagaaatttttttttatcaagcatggcaatccattatctgcatgccatgacgatggttcatttttttttctcc

SEQ ID NO: 18423 - DNA, 2803 bp, Oryza sativa
  ref <308>: DATABASE ACCESSION NUMBER: AK068819
  ref <309>: DATABASE ENTRY DATE: 2001-12-06
ttttgcatgcttctatcatttggggtggattgttctacacgggatcatgatggaaaatctgcattaggttgggcagaacaagggaatcagcaagaggtttgcgaagttattaagaaacatatggaatgtggttcagcaaagttaactgaagagaatgagctgctcaataaatacttggcaaccatcaatcctgagcacatcgatactgtgctaatagaacggttgctcagaaaaatttgtgttgattccaatgaaggagctatcttggtgtttcttcctgggtgggaagatataaatcaaacacgggaaaggttgcttgcttctcccttctttcaggattcgtcaaagtttcttgtgttgtcactccattccatgatcccatcttcggagcagaaaaaagttttcaagcgtccaccagcaggatctcgtaaaataattctctcaaccaacatagcagagactgctgtgacaattgatgacgtcgtatttgtcatagatagtgggagaatgaaagagaaaagttatgatccatataataatgtctcaacacttcattcttcctgggtttcaaaagctaatgccggacaacgtcaagggcgtgcgggtcgttgtcagccaggaacgtgctaccatctctactctagatttcgagcagcctcattactggaataccaaatccctgaaataaagaggatgcctattgaggaactatgtttacaggtcaaactgctgatccgaactgcagaattgcagactttttaaggaaaactttggaccctccaattccagaaactgtaagaaatgctatcaccgtacttcaggatcttggtgctttgactcaagatgaacaactgacagagttaggggaaaagttgggctcccttccggtccatccatctacaagcaagatgctcttgtttggtatattaatgaattgcctagatccggcgttgacattggcatgtgcagcagattatagagatcctttcctccttccaatggctccagatgagaggaaaagggctgctgcagccaaagttgagcttgcttcattgtatggtggatacagtgatcagcttgcagttgtagcagcaatggactgttggagacgtgccaaagataggggccaagaagctcaattttgttctaagtattttgtgtcttctaacaccatgaatatgctttcaaacatgaggaaacagcttcagaatgaactagcccaaagaggatttgttcctgtagatgcatctgcatgcagcttaaatgctagagatccaggtatcattcgtgctgtccttatggccggtgcttatccaatggtagggagattgcttccccctcgcaaaaatactagaagagcagtcattgaaacagcaagtggtgccaaagttcgactgcatccacattcttgcaactttaacttgtctttccgtaagacttctgggaacccattagtgatatatgatgagatcactcgaggcgatggtggaatgtacataaaaaactcttcggttgttgggtcctatcctttaattattcttgctacggaaatggttgttgctccacctggggacgatgatagtgatgaagaggatggggattctagtgaggatgaaactgagaaagtcactttgggacaacataaagagataatgtcttctcctgataactctgtttcagttgttattgatcgatggcttcggtttgatgctacagctcttgatgttgctcaaatatactgccttagggagcgcctagcatcagctattcttttcaaagtcaaacatccacaggatgtcctcccacctgatcttggagcgactatgtatgctattgcgtgcatcctatcatacgatggcttgcctgctatgattacatctgatgatgttgctacaagtcagggttcaaaccaaagttcagctgaatcaagcagattctctcagggtcgtagagtcggttatattccacctggcggtttcctcatgtctttgttatcggataaacctcttaatgcgcctcattttcagaagtcctttaatcatccagatggagcttcagggcatattcggtcatcgaggacctccgtcggtagatttgatcagtctcgccatcctcaacgtaataattctggacctgggagttcagcagcacggactttcaaaagacagcgcaacggtgcacagtgactctggactagcggccgcgttttgcagatccttcggctatgctggaatattggatgaaaggcttttgtggcagaaataaaggattgctgtcttggccgggagttaaataggacttgcagccttcctttgttgaagggccatacgatggcaacgtgatgccttgagctgaaatcataatccagaaacgctgttttgctggtgacttgcagccttcctttgttcggtgcacgttgctattctgttcagctctgcttcccaacttgagcgtgccttgtaatctgatggcaaggcgacgccatgccatgccacagtccactggtgtctaaccaccaaattgtactcgttggaagagtgacccatacaggctcaacgggagtctgaattctgatgtccctcatacagccatacaggagtagtaggttggtagtctgaaacttttgttttgctctgatgatgtacgtgaagaagtggtgtgtttcccttcttcgacctatggttcttttatagtactggagtagtacagtagtactagtagtacatgcgcctaaattctccatgccatgtgtaaccacagtgatgttatgccgtgcgcctaaattttcccgttctggtttgag

SEQ ID NO: 18424 - DNA, 2126 bp, Oryza sativa
  ref <308>: DATABASE ACCESSION NUMBER: AK068820
  ref <309>: DATABASE ENTRY DATE: 2001-12-06
gagcgtagccatgagcccatgacaccgagcagagagcgatcaccatggcggcgttcatggcgagcggcaggtcgacggtggctccttcgaccacccgcagctgccggccggcggcgggattcgtcaccccgcgcagcctcttcagctggggcggcagaagcgcgccgccgccggagttccagtaccacgacgtcgcgccgccgttccccatgtccctcgtcgccaacacccacctcagaggtcgcgagctgaaatgctgctacaaggccaccgtggacggcttcagcgcgacggacttccatcgccggtgcgacttcaagggcccctgcgtagtcgtcggccgcaccggcggcggggtcaggttcggcgggttcagcccggaggggtaccggagcacagacgactactacgacacgctcgacgccttcctcttctattggccggagacggacacggacgcagcggcgaaggaggcggcggtggtggtgctgccgaaggtgggcgggagcggggcggcgctgttcgactacgcgcggggcgggccgcagttctgtcgaaacatgaattcggcaataataaaaggaggtagcgcacgagacctaaaagtggatggatgcagagacaaaggatttagacaggttcaggccctctcgatgagaggtaataccctactcctgtttggggatttgaatccgccggtgtagtatagatctgacgatcaggttgtctcatgccccctagagggcctcctgcccaccttatatagggtggggggcaggattacaagatagaaactttaaccaatacggtatcggtttcctaaatcaggactttaggccgttccgtaatatacaaggaaacgtaacacccaagtcatgatctgttacatattacatagagataagttatcccctataactagtcggataaccatgccgtatgggtatggggtacccataatatccacagtagcccctgagaccttcgcagtcgaaaagataatcttctctcgaaccagattactccaaagccgagtgcttcaatcatctttgtcatggtctcccgagtacttttaccaaatctgaagactgtggagggctgaaaaataaagtcaggtgcaccgactagatgcacctaataggtgtagcccccgacaatgtggttaattgaacaaaccaagcatatagtcaaggaataaataatccaaccaaccgagtggttttgataatcgtaatcaaccaagtgacttgatatcaatatatagcatatgcggtgtgaatcctccaaataacatgatccgagtgatataccaactgctttgtaaaatatgatgagtgatatagcaaaatagctataaagaagcttgtatattgtgaataaagaaatttccaaagtattgggcatacgccatgcgcacactgctttaacagatgtgtttaagtccctagaagacacatggtttcaccacacctggaaatatatggcatatgtggtgtaaaatccgagtaaataaactcataaaggatttaccaaccgcctagaaaaagaccacaatatataatcagcctaagccataatattggtcaataaaaatgcacacttacgtggcgaaaagcaatgatattgtatccaatcaattgcttaaaaactcaaacagcaccttgaattatatataaaaaagtcagcgggacagctatataaagctttactgtttgacaccttttaagatgcattgtatcaactcctaaaaagttaagtaactgcggtataaaaggattttaaggtattgggcacttgatcacgcgcactttggcctaagcaaaaagtgcctaagtccctaaaagaacgtgacaggccacacctgaaaatatgggctgcagacatattaggcctaggccaaaacatatgccttcgacaccctttaaaggatgacgcatataacatgctcccgagtaataaatcttccgggtaatatagaccaagcgtagctcatatgaatagcttctgatctgagtggttatcccttatgggatactccaaaatagatgtaacaattgaatcccgactggcgcaagtattcagttgataacccttacggggaataataaatagtccagtctttgagc

SEQ ID NO: 18425 - DNA, 1090 bp, Oryza sativa
  ref <308>: DATABASE ACCESSION NUMBER: AK068821
  ref <309>: DATABASE ENTRY DATE: 2001-12-06
gcgagtatacacaattgcagctaaaccagaggagagagagagaggaggtgggaactgggaagaaaaaaatggcggctttgctccgccacgccgcggcggcggcggcggccgtggtcctcctcatcgcggcggccgcctccaccgacggcgccaccagcttccacgcctcggacccaaacctcggatccgcccgcgtcgtcttccagacaactcatggtgacattgagttggcttctttcctcatgttgctcctaagacagttgaacacatttacaaacttgtgaggcttgggtgctacaacacaaatcactttttccgggttgacaagggttttgttgcacaagttgcttctgttgtgggtggtagaactgcccccatgaatgatgagcagcaagaggaagcagagaaatcggttgttggtgaatttagtactgtcaagcatgtcagggggattctgtccatgggaaggcactctgatccaaacagtggtggttcttccttttccatccttcttggagatgcaccacaccttgatggacagtatgctgtatttggaaggctcacaaaaggtgatgatacattaagaaaacttgagcaacttccaactcgtagagaaggcatatttgtaatgcctattgagcgtatcagcattctgtcaacatactattatgatgttgatttagagagctgtgaagcagaaaagtccattcttaggaggagactttctgaatcagcatcagaagttgagagatggagaagaaagtgctttgcatgatgctggagttatgttagcagaacaggttcaagcttctccctgacttgattgctgaggcctgaatattgaaagcatggcgagggaacccctggaatggaatttgtatgttgtgtgcatttatcctagcaaaatgctgtaacagttcaatagaagtgtggataattctctcttctttttttctgttaatctttccagcacacttggatctgtacacaactacacatcatactgaatttgtcattgcttttacaaaaaatacattgtactagtatcttattttacgaaaatattgtatattaccatctccatttctgc

SEQ ID NO: 18426 - DNA, 1217 bp, Oryza sativa
  ref <308>: DATABASE ACCESSION NUMBER: AK068822
  ref <309>: DATABASE ENTRY DATE: 2001-12-06
ggcagaatcaaaccgacttggggttggggctcgcaaattcgcggaatccatggcggcgatggggcaggaggacgacgacgtcgaccactacgaggtgctctgcctcccctccggcgaggagggcgcggggctctccctcgagcagatcgagaaggcgtaccggacgcagtcgcggctgcgccacccggacaagcgctccgacgaccccaacgccaccgccgacttccagcgcctcgcgagctcctacaacttcctccgggacgagtccctccgccgccagttcgacgcgcgccttcgcggccggcgcgaggcggccgcccgcgccgccgcctccggcgtcaagcggcggaaggccgtgtccgacctagaggagcgcgagcgcgccgcctccacgggccaggccgtcgatgccgccgaggccgctaggcgcgaggacaagcggaaggccgccgacgtcaagcgcgagctcgaggagttcttcgctgccaagcaatcggcctcttcaagcactcctcccgcttcggcacctggagccccacaagatgcaccaaaaacagacaagggtaagattttgaaggtttcatgggaaggaggtgcagattattataatgctgcaaagctggaggagatctttaagcaatttggtggagttgaagatgttgttatcaaaacaaggaaatcaaggagtaggggatcagcaattgttgtcatggcttccaaggaggctgcactatcagcattacaaaaccattctgtgtacaatgttttctctgtcccattgattgttgctcctgttcaagaatcgggtggtgttccaacaaggtcaactcatacacctgaaacgaggccaagcaaccttggtggaactggattcaatgatttggaagcatcagtattccgtaaacttcaagaggctcagaaaaggaagcaaagcggctagttaggcgtttagttgaagcgtcagcaggacgtttcctgcttaagaacaactgagaatagctgggagacttacgtcagaaatttgaacaattttgtagttgggggcgatcttgttgataatctttctcatgcggatggtgatgccagttttcaggcattcactaccatgtatgttgttccaatagactataacgtcagatttttaactgtatacttcaatatttggtttgggataaaagtgatatacaaacatgtaggtttatcttgtgcgattctcc

SEQ ID NO: 18427 - DNA, 2801 bp, Oryza sativa
  ref <308>: DATABASE ACCESSION NUMBER: AK068823
  ref <309>: DATABASE ENTRY DATE: 2001-12-06
gagtctgccagccgccgccgccgccgccgatccccatccatcatacgaagcgcgagcgagcagggcgccgtcgttcgtcatgctgcttccgccgcatcctgctgaaatctgtttacgatgaaagtggaggagaaaaaaagatctataacagttgcccccttcgagtgtgcttgggatgaggagtttcggttcagggagactggtcgcgggtgcatcacctttgaggcatctgcacacaatgatgttaccctggtgttccgcgaacaacctgggagccagcattatcactacaaaatggataacagtcgtcactacattgtgatcttgggcagccataggaacaaaagattgaaaattgaagtagatggaaagactgttgttgatgttgctggcattggcctatgttgctcctcgtcttttcagagctactggatcagcatctatgatggactgataagcatcgggcaaggaagacatccaaataacaacatcctgttccaatggcttgaccctgatcccaaccgaaatgttcagtatgtgggactatccagctgggacaagcatgttggatacagaaatataagtcttatgccatcagctcctcaaaacagcatcctttggagccaaattgagtgtgcatatgttgagccggatggtgctggagggcatacaagaaaacaagaatcaaaagatggcttagaccaaagggcacttgcaaactttctagagaactgggatttctcagattctatatttgtggttggcagcgaaagaaaggttgtcccagctcacaaagttgtcttgggttcttgtggtgatttcccttttaacctgatgatgagtcgaccagctattgagcttccatctgtctcctacccagttctgcactcccttcttgagtacatctacacaggttctacgcagatttcggaatggcaactggtttcactgctggagttgagttcacaatttaaagttaaaccattggtaatgtattgtgaagaaattattggctgtttgaagatgagtgatgcagtttctgagtctagcaaaaaaatacagttatcaagtggtggttctcaagctcatcaattttattatttccctttcaaagctccattaaatacacagaaaattgaacagttccttgtaaatggtgagcacagtgatgtaaatatctatgtaaatggacatggtcttgttactcatgctcacaaactcatccttagcttgtggagcatgacatttgacaagatgttcacaaatggaatgaaagaaagcagtgcttcaaatgtatttttcgaagatgttcccgtcgaagcattctttctcctcatccaatttatgtacagtggggaacttaaggtggatatcgaggaaatcacaccagtgttggttgagctgctcctattgtcagaccagtttgggatcacggctcttcagtttgaatgctgtaaaagaattatcgaattcctctcaaaggacacagtatgttcagttctacgagcagtttcgtcaattccatcttgtaaactgcttgaagaaatgtgcaagaggaattttgcagaacactttgattattgcacaactgcttgcacagactttgtgttgttggatgaggcaacatttaaggatattcttcagcatgggcatatgactgtaacatcagaagagagggttctggatgccatattaacatggtgcatggaggcttgtgactgttttaactggacctctgtgcacgagctcttaagcacttcaagaccagagaaactctttggagggaggctcactgccatcaatactttgctaccatttgtgcggttccctttagtgcaaccatctgtccttcacctgatggagaaaagtaatctagcaaaaaacatagaagcgttcagacagttggttgcagaagccattgagttctctaatgcgggactacggatggcaacaaatacatgtgagagatttcatcatagacgctccagctataaagagcttcagtatatttcggatggtgataacaatggtgttatctactatgccggtacatcatttggtaaacaccaatggatcaaccctgttttagccaagaatattacagtgacagcgagcagcccaaattccaggtacacggatccaaaggctttggtttcaaaaaattaccaggcgacttgttttgctgggcctcgtcttgaagatggcaagatgtgttcttggtggatggtagacattggaccggatcaccagcttatgtgcaactactacacggtgaggcaggatggctccgcgaccttcatgaggtcgtgggttcttcagggatcaatggacggccgtagctggactagcctgcatgtccacgaagacgaccagaccatctgccagcctggccagttcgcgtcgtggccgatcaccggccagacggcgttgctgccgtttcggttcttccgggtcatgctgacggccccggcgaccggcgtctccaacacctggaatctctgcatctgcttcctcgagctctatggctacttccggtgattgggacagctttgctgcacacccctgagaagagatcggcagtgagcaatgatctagctaggtggctctgtaatccggtgtgttcatatctgcactagtaaagaacttttcgttttagtttgctttggtcactttggttttttttttttctttgcggtataattaccatagaaaaagtgaataatgcttatacgtccttgtaatacacatgtgtcatctgtaagttggtacaaaaccgtgattacacgaggaatgcttggacg

SEQ ID NO: 18428 - DNA, 1334 bp, Oryza sativa
  ref <308>: DATABASE ACCESSION NUMBER: AK068824
  ref <309>: DATABASE ENTRY DATE: 2001-12-06
gactactcctcttcacccactccacgccatctctctcgcgctctctccggagccaaggcgaggaggcggcggcggcggcggcggcggcggtgcgagacgagatcgtcgagtccggcaccccacccccgtccttcgcttcacacgaaaaggaagggaggaagatgagctccgagtctgaggcggcgcccgggaccgggaagctggtgtgcgtcaccggcgcgtcggggtacatcgcgtcgtggctcgtcaggctgctcctcgcccgcggctacacggtccgcgccaccatccgggacacctctgacccaaagaaaacactacacctgcgtgccctggatggagccaacgaaagactccatttgttcgaagcaaatctgctggaagagggctctttcgatgctgcggtcaatggttgtgattgtgttttccatacggcttctcccttttaccacaatgttaaagatcctaaggctgagttacttgaccctgcagtcaaaggaacccttaatgttctaggctcctgcaagaaagcttccattagaagagttatcgtgacatcatccatggctgctgttgcctacaatgggaaaccaagaactcctgatgtagttgttgatgagacatggttttcagttccagagatttgtgaaaagcatcagcaatggtatgttctgtccaagaccctagcagaggaggctgcttggaagttttcaaaagataatggatttgaaatagttacggtgaacccagcaatggtcattggtcccctgctgcagccttcactgaatactagtgctgaagcaattctgaagctaatcaatggatcatcctcgacatatcctaatttcagctttggctggataaacgttaaggatgttgccctggcacatatccttgcatatgaagttccttcagcaaatggaagatattgcatggttgaaagagttgcgcactactcagagctcgtccaaatcattcgtgagatgtatcccaatattcctctgccagacaagtgtgcagatgacaagccatcagtgccaatctaccaggtatcaaaggaaaagataaaaagcttgggcctggaactgactcccctgcacacgagcatcaaggagaccatcgagagcttgaaagagaaaggatttgttacttttgattcaagcaacctgtaaaacaacagagctccatacacatgaacttgcttgtcatagctagtactctagcggtaactttgcatgaactactacagatgtggtctgtattctgtactacgatctgaaataaagtggaggcaaattgcagtgttgattattctgccatgtttcttggacttg

SEQ ID NO: 18429 - DNA, 3317 bp, Oryza sativa
  ref <308>: DATABASE ACCESSION NUMBER: AK068825
  ref <309>: DATABASE ENTRY DATE: 2001-12-06
gcttcctctcccttctcacgctcgccctcaccagctctccgtcattccgcctcccgttgaccggcgctcctccacatctcctctccatggtcgcgtggatccgccgtcggcggcgacggcaggggtggatccaccgagctccatcatttgtccgcccccgctcgcgccgatccaccgcctctcgcgtcggcagcgacgggaggggtggatccggcgacctccgtcgtctctccgcccccgctgacgccgatccaccgcctctcccgtggatccgccgtcgacggcgacgggaggggttgatccggcgacctccgtcgtctctccacccccgctcgcgccgatccgctcgggctcgtcgtcgcgtcgtttgtgggctgcttcttcacgtccgtcgcctcgctcatcatctccaagctgcatccgccgtcggcagcgacgtgatgggcggatccagcttcccttcagtcccaactctgtctgggtgtccaggaagagaccggcggcggggagggccagaatggcggcggtggtgagggcggaggcggtggacacatccatcagcccaacgatgagggcgctccggtcgtccaagaacatggccatcacagaccaggccacgacgttgcggcaggccggcgagctggtcatcggcctcgctgcaggggagcccgacttcaacacaccggcctcgctaccgagacggagttgggtttagatctttgctggttcttttgcggtgatcggtgacggtgagggacggcgccctccctggtcgtgggaccatgcagagggagacaggaggtctggacagcgacaccgtgggacagcttgtcggccaggtgatgatcagcgctccctcagcggcgagcgacatcccggtccccctttgtgagaagggtccggtcgaacgcgtcgctgcaattaatgcagcggcgtcattgaaggagggcgtcaccaatgaggcgtccgacgttgcagctgctgctaccacgagtggcaacaacgttccgaggaaggggaggaattctcctccgtactcgggacccgtcggaaggcgccaaacccggcggactcggacgcgtctccccacctcagcgaaggcaaaggctagtgactagtgacgatcggcgagaaggcggcgcaggcgaaggcggcgcaaggtgggaccggtgcggcttccagtgcgtcccctgcagtgacctcgacagatgtagtggtcgctactaaggaccgggaggcgacgtcgagtagccccgccgtcaaccttgtgtctgctcggggcccgtcgaccgatgccctcacctggggggagctccaggcggagatggagcgcctcctccaggccggtgctcggggcgtaggccgcgaggtcgaggaggccagggcggcagcgtcgtcagcaaaccagcgtgctgaccagctggtacgtgacttggcggaggcccgtgaggacctcctgaagatgagggagctggtggccggcaacgagaggcagcggcaagggctcgagcaccggatgttggagctcgagaacaatccgtcagaaatccgatgctcgctgcgggtatcgtacaccagcctacaccagctcgccggggaacgtggtgtcacgactaccagctggcctgcaaaatttgcacatgaacgtactacttgcctatagatgatggtggtgtggccgtgtgggcaatattgggtgcatatgaaaatgctgcaagaaaaaaaaagggtgccctttataccgatcaagaaaaagaagtgcattttagcttgatcaagaactaacccaaaagcaggctactcgtcaacactgtttcactccctctcagtgatatgtgttcatgtctattcggccagcaagcacattgcgttcgtcaatacatgctgtcactgcccttttgatcgcccgcagaagagccaccccagcatgcacgcagacaacaagacaacaacaagctttgagttgaagggaaatccagattatatatttgatattagttaattcagtgtctcaaaaaatatcatcaactccaatttgatgaccaaaaatcctctgcaaaactgataattttacaaccttgatgctacagatcaaataacaggactgaatgtgccctagctccaaatatcacaatataggtggtatgtgttcctatcgggctaacctcacctacttcagggaagaaattggtcagcagccatacttggataatggcagcatgaccgtcgccgtggcctcgcaccgccagtggccggcgcacgcgcaacacaccaggtccttccgctttggtcaccacttgccactctttgcctccattaatgacaccacctcagcgactagccaccataggtttggccccaacaatcacttgaaatgaaagttgagattacaaatacggcaagcaggaaagccggtgaaatcaaactgcagcatcatgccattctcctctcaaatatggccgtaaagcaacacaagaagggatgtttttacctctcaaatctgtttgccgacaccgccgctgtggtggaggaggaggccgccatgtaacacagaacagtaacacaagaaggatggcagtgttttatcagacttgatttgtacctgaagggcggcatgttggtggggaatgcgtagatgcagagaaccatctccatcggccggcatgcttggtccgccacaaaccgcaccggatctcatcgctgtgttcttgtatccgcccctgccgagagctagctatccacatcgtcttcaccgagttacctcgccgggattgctcgccatgccgtgaagagggccgacgtccgtggttttcgtcaccgacgacgttcgtccacaagcctcttgctggaaaccagaactcctcaaccatttttgtcaagccatcacagcgcctgatgtccaagtgccttttcgctgccgtcgctggttgttcgtgagcttcggaacagacattattcaccagcgagctgcattacctgaaagcatgccgcggcttccaaagtgtgcgagcatgagaagaaatgtgaagcgtcgttccattcatgatgatgatgactttgtcactccaccttcaaggaagaaggctgttcgtgttaaattcgtggcaccggtttcgcgttgtgtaccatcttccatcacacctatcatacagagatttagtgctgaaaagaaagagctggtagctgagataattatgtcattcatcttgtgggatatacatgtatacgtgttcgctctgtcactcataaacctatgtgtacatgtacacctgtaaaagtacagattatgtcattaatcttgtggtattcagacgtgc

SEQ ID NO: 18430 - DNA, 2434 bp, Oryza sativa
  ref <308>: DATABASE ACCESSION NUMBER: AK068826
  ref <309>: DATABASE ENTRY DATE: 2001-12-06
gaggttgctggcattttggtgcctacttttttgctcgctgttgccgccttctctaatcccaagaggggagaaatggagtagaaggctaaaataattcagatgcagctttgctcatggcttcctcaggcagttagggcctaggggtggagaagcctgaaactttgcctgattgcctccccaatcttcttgcctcctctcctttcacttcttctctcctctccgctgtggtttcttgctggttcttggaggcctccacttggttaaatgatgggtgtaggtggtggtcttggtatggaagctactaactgtggtgctttgctcagggagcttcagcaaatctgggcagaggtaggagaaagtgaaggtgagaagaacaaggttctgtcagagatcgagagggaatgcttggaagtgtaccgcaggaaggtggacgatgccaatcggaccagggtccagctgcaccagtctgtggccaccaaagaagctgaagttgcatccttggttgccactctaggggagcataagctatatctgaagaaagacaagagtgttgttccactcaaagaacaacttgcggcagtcgttccagtacttgagaacttaaaaggcaagaaagaggagaggctcaagcagttttctgacattcaatctcagatcgagaaaatccgctcggagttaagtgaatatagcgatggcgatgataaagcaaatagtctcatcgtcgatgaaaatgatttatcaacaaggaagcttaacaattaccaagcacagcttcacgcccttcagaaagaaaagtctgatcgccttcacaaagttctggagtatgtgaatgaagtgcattgtttgtgtggagtccttggaattgattttgggaagactgtaaatgggattcatcccagtttacatcagaatggtcttgagcaatccacaaacatcagcaacagcacactggaaggccttgctaatacaatatcaaatctaaaagcagaacagagatctagaatcgataagatgagagagacaatggaatcattgtgtaaactctggaagttaatggactcccctcaagaagagagaagacaatttaacagagtacttagtgttctcatatcatcggaagaggaaatcttatcccccggggttctctcacaggaaacaattgaaaagatgggtgctgaggttgagaggttaacaaaacttaaagctagaagattgaaagaaattttcatgaagaaaaggtcagagttagaagagatatgcagatctgcacacatagaacctgatgccagtacagcccctgagcaaactaatgaaatgattgactctggtactatgctatgtatcttgctgctgctaagttcacttgttactattgtatataagttgtaattttcttgtgcatgttccatccaggcatgattgacccttctgagcttctggcaaagcttgaatcgcaaatattaaaagcaaaagaagaatcccttagcagaaaagatatcatggacaggataaataaatggatttctgcttgtgatgaagaagcttggctcgaagaatacaaccaggactcaaagaggtacagtgctggaaggggtgctcacataaaccttagaagggcagagaaggcacggattttagtcaccaaaatcccagctatggtagataacctgataaatcgaacatttgcttgggaaaatgcaagaaacaagcccttcctctatgatggggggcgtctaatatctgttctagaagaatacagactaaacagagagcagaaggaggaggaaaagaggcgataccgggaccagaagaagttggagagcatcctactcaaagagaaagaagctatttttggatctaaaggaagcccaaaaagggcagtcagcttaaatagaaggacaaatgggtaccgttcaagtggaactaccagtggactaatgactccaaatccccggagatcatctcttggtggtgctactcctgagcttttgacacccagatcgtgttctggtcactataatagatactttagtgattcaaggaggctatcagctactcaattgaacttcggtgacgactcgctatccactttcacatccattagtggttctgaaccagaatccccttctttgggataaattcagtaccttttctggtcaatttattggtcttattgccaagtaatcacctgttaatggagcactattctatgagtttctcgcatttgtatgtacattactgatgtattgtatttagcttgtctgctggtattgacttgtaagcactggaatggttgacttggtttgggtttggagttgatgttttgagttgagggctttgtagattgacggttaggtgaaagatacaggaagtggttttggttgggggtcagtcacctgtataatatatttatgtgattggcttgtctaattat

SEQ ID NO: 18431 - DNA, 2247 bp, Oryza sativa
  ref <308>: DATABASE ACCESSION NUMBER: AK068827
  ref <309>: DATABASE ENTRY DATE: 2001-12-06
gacccagagccaagagggataaagggggagaagaagcaaagaagctagaggagagagctggagaagaagaaagaaaagctaagagaagagagatttcagagaggagaagctcgccatgatggccggtgtggtagcttggatggttaaagggaggacaccactcgtctgatgctgcagctggctcatgattaatactggctgctgcggagctgtggtggggaagaggtgattttttggtgaactggtgatgttgcagttcatgaatttactcaaggattggggcttggtgcgtgcccggaactgaagagtggaggaggattgtgctcagtgcctcttcagtcagaggtatatgaacaagtgctagttctacagttaatatcagacaagtcattggccgtaagcttcctaaggcaacatgacagagttcaaggttgggagccttgatgcccgagcaacaaagatcagaaatgtccccattgctgtaacaccagaaggattctggtgctgcccgtcgcaggccgtgctccaaaagacaatgaagaaccaaaatcagcaggcaaagcctaaagggggtgcatctcctcttgcatcaaaggcctcttcggttcagagggcgcctaccatttcatcagagagaagagcgcattcaactccgacaaggtctagaatcaattcggatgaacagaagtgcgcgccagcggaaaattcaacacccaatccaccgaaggtagcgaatgatagaccacagaagcagcataagatatctgttggatttggtcaacttgagatgagtgatctcaaggttgtgttgtatggcaaggatggtgttgctgtaaagatgagtgttcacaggaacatccttgcagaaaatagtacctggtttgctgataagctctcaagacaatccccaatgtcaagcatggaggtgcctgattgtgaggatgtggagatctatgttgagacagttggattgatgtactgcaatgatgccaagcagaggcttatcaagcaaagtgttacacgcgttcttcggatcttgaaggttgcagaattattaggtttccaagcatgtgttttgtcttgcttagagtacttggaagccgtcccttgggtcggggaagaagaggagaatgtggtatcatctgttcagcatctgcaaagtgggaattatggtgttagcccaatactgaagagggtatgctctgacctaacaagcccaccaaatgacacatttgtgcatatcatagaattagtcttgaagagcggcgaggatagagggcgccgcgaaatgaaatccctggtgctgaagcttctgaaggagaatagcagctgtaccagtacatctgtggatatctatgctgagactctctacagctcttgccagaattgcctggaatccttgttgaccttgtttcgacaagcgactgccgacgattttgctgagcaatccttagaccttaaagagccagtttttcgacaaattgctctagaagcagataatctcctttggttaactgagattttggccgacaggaatgctgctggtgagtttgcagtcatgtggtctaaccagggtgagttggctgagcttcactccaagttaccaaccaagtcgcgccatcttgtcagctgcgtcacagcaaggctctttgtggcaattgggaaaggagacatgctcccttcaaaggacacaaggaagcttctcttggatgtctggctgcagcctctcatggatgactacaactggttacagcatggctgcaggtcatttgaccgcaaagttgtcgaggaagggatcgggcgtactatcttgacactcccgctcgaggatcagcagacgatattgctttcatggctcgggagcttcttgaaggttggggatagctgccccaatctgcagaaggcctttgaggtgtggtggaagaggactttcgtgcggccttatgttgaacaagggaatcaatctcagccgggtcggagttgaggtctcaagtggttatagactgcaagaaaaaattgtcatcttttttcatgtagaatatcactgagaaagtagtggtaatgtcttactttttagataatgggtaatgtcttactcggtttgctgttagggagaaccccaggaaatgaaaacaaaatggggatgtaaattagtacttatcttgcaaggcttgagaatatgtgcgcgttgtgcttctgatgcttcattttatcaaatataagtgaagctctctgaattctggttgc

SEQ ID NO: 18432 - DNA, 2194 bp, Oryza sativa
  ref <308>: DATABASE ACCESSION NUMBER: AK068828
  ref <309>: DATABASE ENTRY DATE: 2001-12-06
gactggcgtgcagggccgctgctgctgctgcttgctcttgctcttgctgctgggtggagtgagcgagagatcccatgtggcattggagcgctgtctcctgctgctgcacagtctactctcacctgctccgcctctcccctcgttaattcttggcggctgtgtggcgaggaagaagaagcggtgatggcatgctgatgggctgcgggttcttggatgcatttgggtggatatgcggacatggtggaagctgtaatttgagagcgatgggagcatcttcttagggatcctcttccactggctagcctacagctgtttttctccttcattggtactccaatcttggctggaattttgaatcttttgtccgggaagtgataaaatttagaaagacaacacaaccattggcacttcttacagttgtgagcgctaagctgagcctccaatggcgtggcattttactgcggctttcatgatcgcaacctgtttgatgttattcccaagaagcgagcagtcctcgcagggtgaggtgctgcagcagctaaggaagcagctggagtacccaaggcagctggatgtatggaataacccaaacagtgacccctgctacacccagcctacttcggtggtcaccgtggcatgcgaggggaacgccattacagagcttaagattatcggtgacaggatcaccaagccaccaaagttcagtggctatcctgtctccaatatcaccctctctgaagcctttgttctcgattcgtttgttactacattggcaaggttacctgccttgcacgttgttatcctagtatccttggggctatggggtcctcttcctgacaagattcaccggctgtcatctcttcaagtgcttgatttgagctccaatttcctttatggatcgattcctccgaagctgtcagccatgccaaagttgcacaccttgacattggatgggaacttcttcaatggtaccatgccggactggttcaacttgtactcgaacctcacggttcttcgcttgcagcgtaaccggttgaaggggcccataccagcatcaattggtaaagctaccatgcttagtgagcttgctcttgctggcaacagcatcgctggcgaggttccacaattaggcagcttgaataagcttgagatgctggacttgagggacaatgagttggatggggagctcccagagctgcctacagcattggtaacaatcctacttagcaaaaactcactcaagggcgaaatccctgagcagtttggtcagttgaaccgacttcagcacctcgatctctcattcaactttctcgtggggaagcctcctgaaaagctcttcgctcttccaagcatcagctatctcaacctagctgcgaatatgctcagtggatcattttctactagtttaacatgcagcagtacccttggctttgtggatttgtctacaaaccaactcacaggtgacctgcctgtctgtcttaatgttaatgtcaataacagggtagttaagtttgatggtaattgcttcagtgacgaccctgaacaccagcatgaaactaagtattgtcaacaacctcacaaggggagaggatcaaacaaggatgttggacttgtggtcactgttgttggggtggtgtttattgtgcttgtgctttctcttatattaatggcttcaaacagaagaagctgtcagagagttttagcagaacaacagttacttcaaaagcaaatgcaagataattcgacatcaggaatgtcaactgaactgctagtaaatgcaaggtacatatctcaagctgtaaaattagggacacaaataatgcccatgtatcgagcattttctttggaagagctcaaggaagcaacaaaaagctttgagaggtcggcatttttaggcgaggggtcaattggaaagctgtacaagggaaaactagagaatggaaccctgattgccataagatgtttggcattgcaccaacgatactcaataaggaatctaaaacttcgattagatctactggcgaagcttcgtcacccaaatttggtttgcctcttggggcactgtattgatggcgaagttgatgaatcaagtgtgaaaagggttttccttgtctatgaatatgtacctagtggaacgtttccttcatatctttctggtaaggaactaaaaataaaatgaggaattaaagtcgtg

SEQ ID NO: 18433 - DNA, 2424 bp, Oryza sativa
  ref <308>: DATABASE ACCESSION NUMBER: AK068829
  ref <309>: DATABASE ENTRY DATE: 2001-12-06
gagattccttcccttttccgacccaaattacatcttcctcccttccgattccgacctcaatatccaccttccctatctaccccgaccaccgcaaccgcaaatccaatccaaaccctagctcgcctcgcctctccgcctccgctccccagatctctccctctcgcacgcgtctcatggccgcgagagctcttcccgtctgcgccatctagccccacgcacagcacagcacagatcgcccatggaggctcccccgccgccgccgcccgactcatgggagaccgccgacctcgacgagcccatgagccgcctccacctcccctccgcgcgccgggtctcctcctctcccgacctcgccgacgccgatgccgacgacccgcagcacccgtcgtccggtcgccccgattcggttgaccagctcgatcagttcctccgggaggcgctcgagaagccgagggagcggctctctgtgctaaggatggagcaagacattttgaagttcattcatgaccctacgcagacagagtttgacttccatggtcttcctacttcttacctgcgtcttgctgcacatcgtctggcacagcattatttcctccagtcaattgctctacaagataacggccttcctgatggatctggttctcgtatcatccttcgcaaaacatcagctgagtgccggttgcctgctgtgcgcctatcagatattcaagttaatctgcctcaagatgagagcaactctatagccaaagttgctatcaagcaaagacctcagaagcactaccataacaattccagttcaggtgctcactcttctagagccaaccttcagaaaagtgttgaagaaagaaaggaggaatacaataaggcacgtgcacggatatttaataacaacagtagcagcggcaatgctgctgatggaagaccaggtgatgaagtaactttgccaaatactctccataggtccagttccttggagctaagctcaggtaacaggctaggtgaagggcctgaaattacccttgaaaggagtttgactactgcctcgtctagcagcagggtaaatagaaacaagactgagaaggatcctgcatttaatagaaacaggcaaaacaacagggtggcgatatttcgagaccgtgagtcagatcgcaaggatcctgattatgacagaagctatgacaggtacatgcaaagatttgatcctggatttggatttaatggaggttcatacactattcaacctttgtatgcccctgctgttaactacaacactgagttccctcagcttgggtctcatgggtctccagttcctgttgaacagcagcctcagtcaatagcacagcatattcctgggccctggtcaccggctcaatcgcctaatgcgattgggtacagacctccggatggttccatgccaccaccttacagtcctggtcatgctggtgctcccattaggtcatctgtttttatgcatactccccaacaatttgctatgccttcacggccaggagtcacatatgtacatccacaggaacccatgcgtccatttgcacagactcaccaacaacaacctgaagctagtttgcgcttagcccggccccgatgaggggcctgggcatgcctgcaccctgccagcgtgccctgaatgtgtaaatcggatgtcatacccgattcatttcttgctggtagatggtagcaggcataaaagaaccgagaactacatatctgagctaaacaatccacttgatcttgttagcttgtggttcttggtgttgttgcaccctgcacattcaggtgcaggagaggcaccttcttcgtcctggaagtaaattgcagactgttgcatacgggacctcaagtccaatgcatagaagctgagaaatgaaggggagagcagtcatggctggcatgatcggtgctgttctgctgctgttccttgcagttcagttttgagattcaggaggggcacattgcccccttgaagtcaagcactcagcgcgggtgatgagaagagaatcggcacaacatctaatatgtggatatttattcaggacgtgctgcttggtacttgtcgcttgctgaagcttcgccttcgccttccacctgaagtggcgtcagattgactggaccgaagatgcagcgctgtagtccccacagtgaacctaagcccctcgctgaggcttaatcagtgtctgttatagatcattgtagttgtagttgagtaaccccaactttgtaactccactctagtaagttaaaacaatgtactaagctcgattgccaattgtactagtagcactatatgtattgtcgtatggactgggctgtcgcagttactgcttgtacagtggagctgcgtaactttaacccattactacagctttatgccgccgattttattaggtccctttgtgttctgtattg

SEQ ID NO: 18434 - DNA, 2415 bp, Oryza sativa
  ref <308>: DATABASE ACCESSION NUMBER: AK068830
  ref <309>: DATABASE ENTRY DATE: 2001-12-06
ggtaaaatttccgcactgttgtagacagcatatctctctcgttccccttttgctctccgaaaaccctaacccctcgccgccgatccggccctcctccgccgctggccgccatgccggacgtgcagccgctcgtcagcgagttcgtcctcaagctcaagcgccgcaaggtggaggggtcccatgccgtggcgcggcagacggcgtcggagagcagctcatcgccgccaaccccatcgaacttgctgttggaaacattgtgagacgtgttttgcatataataaaagaagaggatatatcttctacagcagttggtattgaaggcctttctgtcaccgctgagagcgatgatgaatatgacagtggaaatgatgatcaccctaccttatctgctgctgtccttgctgcccatgctagaaatgcccttcgggcaccttcattgcagacacttctggaagatattcctgtgagcactgcgctttcacgttccgcatcgtcggctggggactctgatggaaaatctggagataagagctcaaaatctcggaaactcaagcatgatgttattgcagccattggtgatctaattgatgaaattgatacgtgctatgaccagatctctgagcaagccgtggaacatattcaccagaatgaagtaattctaactctaggccgctctagaacggtgaaagagtttctgtatgctgccaaagagaaaaagcgatcttttcgtgtatttgttgctgaaggtgctcccagatataagggtcatgttcttgcaaaagagctggttgagaagggtgtacaaactactgttataacagactctgcagtttttgctatgatctcccgtgttaacatggtcatagttggagcccatgcaattatggcaaatggtggagttattgcaccagtaggaatgaacatggttgctcttgctgctcaaaggcatgctgttccctttgttgtggttgctggcagtcacaaggttgatttctgtatactgtgcatttaattatgacatcgataaccagaggttgctttctgagcaattaaatacaacatatgttctatttcttgaaggcatagattatgtcatgctgtcattagcctgatattatcattctgtgcatcttatgttattaacccaaaatcatttttctttagctactattattcccactttattatttttagtacttcttgttttggctcacatggttcgatttcggttcatctccagcccaccccaacttgggactaaaggcttaagttgttattgctgttgttgtcatgttattacacttgtccctatgtagtattagctggacaaagtaggctcaattggtcatgatataatgcaatcattatacgataggataccaattatgctttaaccagatatttctactttattaaattcaacacaaaacatttgttatcacctgctgctcctcacaaatcccctagtcacctctgccttagactcaaagtatatgctaccaagtcattcattcttgttgtttattttagttccgtgacaagataccttgtccttgtgaggattagccctgtggcctctgagttgaaaatagtgaccagcatttgactgagatcccacttatatgctcaagagaagtcatttctgccttcgaagctatagatattttcttaagcgattattcattcataacaagagctgttatttgatgtttgaacatttgggtcacctggtatcactaataatgatttgaaacactatatctttgggtagaaacttaataatatttcttcattcacatcgcagctatgtcctttgtatccacacaacccagaggttttactgaatgaacttaaatcaccatctgatctgctcgactttggcgagttctcaagttgcatgaacttcagtactcaggatggcactcctcttctgaatgttgtcaatccaacgtttgactatgtgccaccaaagcttgtgagccttttcatcactgatacgggagggcacagtccatcatacatgtaccgccttatcgctgagtattactcagctgatgatttggtagtgcggcggaagtcgacatcttcatagaacaaaaaaggcgcactagagtactttagtatgttggcattctgaaggtacaatctaggatgtacacaaatgctgttagagaggttgctgtcctcaatggaatcagctgttttgatctggaagttgaattctgtaattattaccaccgaaccgcaaccaagcattttgagtgtagactgtttgaggctatgggcgtgacggatgcctgattggaacatgaattgtataaactagagaaggaagctacatatgtgatgcagggtgtaaagtgtggatgttttcgagtccgtgcatcctgtgatctgccgagtccaaattttgtc

SEQ ID NO: 18435 - DNA, 1725 bp, Oryza sativa
  ref <308>: DATABASE ACCESSION NUMBER: AK068831
  ref <309>: DATABASE ENTRY DATE: 2001-12-06
tgagaaggcctcgcggcggaggaggaagaaggaagaagaaggcgaggcgatgccgcgggaggggacgcggatggcggggctgtgggagcgcgaggtcggctgcctcccgcccaagctcttcgccaactccgtcatggcctcccaggactttgtgcggtctctcggtgtccagaagaggctgcggaagcacaggggctgtgtgaataccatcagctttaacgaggatgggagcttgctcctgtccggttcggacgatcgggccgctgtactgtggaattggcaagaggggacgcctaccttcgcgttccacactggccacagcgacaatgtgttccatgctctgttcatgcccttctcaggtgaccggagcatcatcacatgcgctgctgatggacaggtgaggcattcgcaaatacaagaaggtggtcgtgtaattacaaatgagctagttgatacagaggtagcagtgcacaaactagctattgagcctggaaatcctcacacattctttagctgcggagataatggctccgtttttctttttgacctaagggagaaatatgttgctgaactctttaaatgcgcagaagttgatcattttggtggtgataccattgaactctatgctattgccatagacccgagaaagcctagttgttttgcagttgctggatctgatgagtatgtgagaatatatgatagccgcaagattgatgtgaatgggaattctagttttggtcggccaattgaatacttttgccctccacatatgatgggcgaaaacaaagatggaatatctggtttggcattctcgcagaccagcgaactattggcatcctatagttatgataacatctaccttttctcgagagaacatggcttacacttcaacaatattgaggtaggaaaacgactcctgatggatgagattgaaggagactgccatataaatacagctccattacccttttgtagagataagttgcctacacctcaaatattcaagggacatcgtaacaagcacaccatgaagggtgttaatttccttgggcccaactgtgactatgttaccactggatcagactgtggccgtgtatttatttggaggaagaaggatggggagcttatgcgggttatgaaaggggataaacagattgtgaactgtgttgagcagcacccttatgggattgttattgcaaactgtggcattgataaagatatcaagatttgggctcctggtggaagtgagaaccctgacgaggttgagacagattcttgttgctctgatatcagtgagtcctatgactcggtttactttgatgattacatattttcctcggattttgattcatctgaagaggacgacgaagacgacgacgacgatgatgatgatgatgacgatgacgaagaagatggccttagtgttagtatcaacgaagacatgagctatgaagagaaagatgcagccagcgaccatgacagcgatgtttaaaggttgcattcagctattatgagaccgtaggatggttcagtcttagaacatggtcagttaggggatcatcgacagttttgtatgatgtatgccttaggttgttttatcatgtgttcctttctcagtcctcggccgtattgcttgtacatacatatacatatgcctgagatagctaagcaaaagcatacttacatgtggacaaatttgagtggatggagaattttgtgtatatt

SEQ ID NO: 18436 - DNA, 3323 bp, Oryza sativa
  ref <308>: DATABASE ACCESSION NUMBER: AK068832
  ref <309>: DATABASE ENTRY DATE: 2001-12-06
ggtggccgtccgtcctccggcctgcaagctcccccaactggcgagggctcgccggactccgacgatggccgcgcgggcgccacctcgcctccgcgcgtatcccctcgccctcttcttcctccctgtggcgctgctcggcgtgctcgccggcgccgcccccatccgtggcgacctgcgtcgtgtggtggaggtcgagggcgagccgaggtcggtggtgtgggcggtgcagctgtccgacctccacctcagcgccttccacccggaacgcgcggccgacttccgccgccatgtgggcggcgccctcgccatggtcaacccctccctcgtcctcatcaccggggatctcaccgatgcaaaaagtaaagatttgttatcatcaagacaagagaagtctgaatggttggagtatgaagagttgattgacgaagttgttggcttaagtgggctgaacaaggaaatattttatgatttaagaggtaatcatgattcatatggtgttcctgaggttggtgggatgtttgatttctacgaaaagcacagtattaatgcaagattaggacggacaggtaatgtccaaagcataacattacagaatagtggttggaagcatctatttgttggattcgacagtgcagcaagtattggtctacgaagccctgcaaatgtattcgggcaaccaacagatcagttacttgttgaattagatgcagccctttcacagtgggataattactcttcaacttctgcagtaacaaaggttacctttggacattttcctatgtccttttcatcatcaacaacttcaggtggaagcctcagagatgtatttctaaagcatgcattgtcagcttacttatgtgggcatcttcatactaactttggaagaaacttgaagcgtcatcatagatctgacagaaatcatctttctgcaaaacaatattaccaaactaatatgcatgaaggcacatcaacatccataggcagtaacaactgttccacgacaacagaatctgttgcagaattctgggagtgggaaatgggtgattggagaagtgcccggagcatgaggatcctagcaattgattctggccatgtctcatatactgacatagatttcagatttggctctatggatgtgatcatagtacccacctttccattggattctcgatttatgcaaagactttctacacctcatgatttgaactgccaagcaaatagcaccagtcattttgggatggtaagaacactagtcttctcaaaatataagattatagctgtctcagtaaaaatatacgattcattttctggtagccatcatctagtattggaaaaagacatggaaatgactagtggtgagggagcaagaggtgctatgtatacagtcccatggaactggaaagcatatgtagatgaatcgccagatcggtactggctccagatagaagcaaaggatttgaccgggaagatatattatagccaactgaggccattttctgtgaatggtttaactgcaaaagttaggtggacttggaaggagttccgtgtgatgggttgtcagtggggtcagctatatcaaccaattatgtggtctacgcttgcatttctttgtttgctgattcttattcctcgcacattgctcatgttatatgagaaccacatgttgaaatgccgtagttcgaagacggctgcaggtagttcaggacgccatctgctgatcagttttgaatattttgctgctgagctgtcaaagatgtattctgtatggtctgggatgttgatatatttgttatatctggtcttcttcccatggtttgctggcaacgctgttacagaaaatcacaataaaatgtatctttattacaaaggttggagcactagtaatctagccaatctgagtacagcagcgccatatattggtctgcctgatgtgatggttattgttcttcctcatcttctatttgtggttttgcctgcgtttctcattatagcagccatagcagcaaatagggcagcatatttggtccacatctcccacaaggcaaagaaggatgatgatcactatgaggaaagaaaatgcatacatcatgtttggatattccgttgctttagaaggtttcttatacttctttgtctgccaattgcatggagacattggaagcattgtagggctatcgttagggcatacgaggctaatccattcatggatgcacctatctactgcttcggtgttccactacttgtatgcttagctatctacagggcctcagctatatgagtatctttttgggccttaatatcttggagttcactgcagtagtacgtatagaatgttgtttttctcgaatacacaggagatctgcggacatattaagaagagagatattttacggtatttgcattccaaaaagggtaaagatccaacgctcatcaatcacaggactgaggtattttatggctgcactgaagtcactcggactacatcttgagcctaccctatgctgcacaaatgctatcttttatcacacatggcaaggatttaaagtataaattgtactgtactatgttactcatatactatggcatatagtgaggggatgaaactgatgtactggaaatggatgtctattggctggggtattttgcttacttagtgacatcagatgaaatgaatgcaagctaaagaatgtagaagccaactgttatgctaaagcttttgagccatataaagaaacagtcaatatggctggtcttggaccttatgctgatctagttaggcaattggatgatggaagcttctcctttgagatggagatggtaaaaaaggctaaaaccaactacgcccacgagcatgcagccattaatcatgactatagggtatctgtgaaccgtgctaagaacaagatgcatgaagaagctttaaaaaacaccatacggctaatgaatatctttgctacagtttgcaataaccgatcgacaagactaggcaaacaaatgggaactaccatgtatggtgctacctctaccacatcaattgccatccacagcacctagccccagcaacaatgtgatgacttctattcttgcagacacccatatcacaagtgcagaaactcctaagaaggtagctctaacaaaggggacagcaaggaagcacgtttcacgacgatgttagaatactcctaaggtccttttggttgtatatgtgccaatgttggaatgtaagtaggctaatagtacagaatgctatgcgttgaactaatattagggttagcctgttgttgaacctatgaccttttgttgtaaaaaggctgttgttgatg

SEQ ID NO: 18437 - DNA, 1879 bp, Oryza sativa
  ref <308>: DATABASE ACCESSION NUMBER: AK068833
  ref <309>: DATABASE ENTRY DATE: 2001-12-06
gactccatccggcccccttttctagctagcggcacgcgaggttagtgtgtttctgtgtggagagatgttcttgtgctgttccgcgcgcgaattccgaaggcttttgatgacaaatttctctgattttttctcttctttttttttatctggcatgttcagaaaccaaaactactacgagtcctgctgcttgaagggaaaaaaaatgaacgctagttgttgtgttgaatcttttatacttgttcctgatgagaagaaagcacaaagtagctcttgatttgttggtgtaccattgaggtgcctttccttattgagcaatgaacagaatcatatttctcctataaaggaattgtcatgctagatcagatttagttattttttccttcagctaaagcattatgctaacgtttctctgtcgaggaaggatgcttttggtgattcacacgtcctgtagaatacccctgtttcgttactttttgttccatggagtgataacaagaacaagtttctctagctattctccttagaagcaagtcatggaaatttccaattgtttgtctaatgaaatctcaacatttttctgtctgtttaaagtacatccctgagatcgaccaggcatgacaaacagtgtagaacaatacaattaattaagcatgtcatatttaatcttccttgtttgctgtactataagttcaaatgtgcatttctttgaagtgttacgctgttaatcttgggatatttaactttttgccacctttaagatgtggcaattgtcactcactgtctatgacacgtgggccctcatgtgtttatgacatatgaatttagtgacaaattctttatcaccgctcgtaagagtggcaaacagttaattattccgttaatgttttacagaaactatccaaaaagggtttgttcactttattaccaaaatcaaccttaccaacatttggcacaaccaactttggtagcgttggatgtgtttagtttgtgatttttttaaaattttagtagtgactttatgagagggaacttctggaactttcaaattttggtgaattagagagggtaagaatatgtttagtttgttaccttacaatttttttttgataacaccgaaaattggtagagttgaaaatgataataaagtgaacagcccaatatctttactgttgaatgttgagcagatctacgtcttgactcttgaatatatttctcctctgacaacagcattgaagccaatatggccgcgctgccattagccaccgccgaagtgtgcgacgcaaactcaaatccaatcatcgccggcgagctccgcgccctccctcccatcttcaaaatctacgggaggcggcaggttttcgccggcccagtcgcgacggtgaaggtgttcgaggacaacgtgctggtccgcgagctcctccaggagaagggacatggccgggtgctcgtcgtcgacggcggtggtagcgtgcgctgcgccctcttgggcggcaacctcgcgcagctggcgcagatcaatggatgggtcggcatcgtcgtcaatggctgcatcagggatgtggatgagatcaatggctgtgacgttggtgtccgtgctctcaattcgcaccctatgaagtcggggaagaagggcgccggtgagaagcgtgtgcctgtgaccattgaagggaccaggatttgcgacggcgagtggctctacgctgatgctgatggcattctcatctcgaggactgaattgactgtgtgaagttcctgaatgtgtcgatctgtacgtacgagtagttggtgcataaaaggggtgatgattaattgattatgccctcctccttgtgttgtatctaaaaataaatgtaatgctgcagccaggttccttttgccc

SEQ ID NO: 18438 - DNA, 1834 bp, Oryza sativa
  ref <308>: DATABASE ACCESSION NUMBER: AK068834
  ref <309>: DATABASE ENTRY DATE: 2001-12-06
ggcgcgcccgatccttcccttcccccaactccctctcgcatttcccagctcggatcctcttctgacttctctctctctctccgtctgtctctctcctctttcgaggtcttcagtcttcagtgttcttgacgaccttgctgcttcttgcctctgtttcgcctcctacttgccgtcttcttcttcttcttgctgctgctgctgctgctgctgaatttttcttcggtcagttagtcggtcaggccggtgccggtctgggagcgattccgccggacgcacgcatcaacagtggagggaggggaggggaggagcttcccctttttgatctagcaagtcgtcgtctccaaaaatacacttttttttgttgggtctttggaacaaaagggtctcctccttttgatctttctgtctcatcactaaattagcaaagctttgtgcttcgcggcgatctcttttcagctaattcagtctctgttgatagcttcgttgcccaagagagatcccccatgtcagaggcgagcggatgacaccgcaattcgggtccggttcttccgcctgagctgcagaattttaagcttcctccgtggtgccgccatggatgcccttcctgacgccgccgacgcggcgcagttggcggcggcggcggcgccgccgcagaagcgcgacgagtggagcgagagcggcattgtgcggctgctggaggcgtacgaggccaagtggctgctgcggaaccgcgccaagctcaagtggagcgactgggtcgacattgcccacgaggtgtccgcccactgcgccatggagaacgccgccgccacggggaagcccgggagcagcacggccaagacgcccaaccagtgcaagaacaagatcgagtccatgaagaagcggtacagggcggagtccgccgcggcggcgcgcgccggccccgccgccgccggtgctggcccgtcgtggcggttcttcgcccgcatggacggcttgctcaaaggccccgccggctccggccagccgcaggcggagttgagcaacagcatagacctgcgagctcctcctcctgcaaaggttgaggtcgatgtcgatgcagatttcgtcagtcagttagctgatgcagggccgggtgcactttctgaattggtgagtgcatatgcaaacggctcgattcaagagaaattggacaaggttgagaacagtgggcatgttgaggggagagctgcagagagtgatgtcaatgtgagctctccgaggatcaaggaggcgaacgaggatgccgaggaggtggacaaggtatgggacatgtccaagaagaggaagaacacggagtttgatatcgcgaagagcatcgagttgctggcaagctcattcttgaagattgagcgcgcaagaatggacctgtacagggaaacagagaggatgagggttgaggctgagattaagaagggtgagatggagctcaagaggacagagattatggcaaagacgcacttgcagatcgctaagcttttcgcaaagagattgaaggagtgcagcagcaagactggtggtagctcatctgtaacagctgaagtggacaaccgtgccaagaaaggagaaaatggttcagggtgattgaaacaccaaccgatcgtccagaatccagaaagcaggcttgtagtttttggtgttcttgtgcaccaaatgtatgtctttgattgatccgacttcaccatgtacgaagagatagttagctgtaaaagtaaaatgcaataaatgatatgattgtccccattcagtgggggattatagaagcagttttagaatcagtaactagcctgaagaaagttgttgagttccttttgtt

SEQ ID NO: 18439 - DNA, 2716 bp, Oryza sativa
  ref <308>: DATABASE ACCESSION NUMBER: AK068835
  ref <309>: DATABASE ENTRY DATE: 2001-12-06
gtgtcttcatttgctgcgtcgccgtacgtcgtctcgctcgctcctccacatggccgaggagtctcgggaagaaggcggcggcggcggcgtcgtggaggacggcgacgaagccggtggacggccggggaaggacggcggcagcggcggcgccggcagggggagagatgggaacaatggcatcagcacgtgggagatcgaggagatggaggatgaggcagggccggcgtcgctggctcctcctgccgccgccgccgccgccgacgtgtacgtggcggtggggaagggcgggtcaagcatggaggcgctgtcgtgggcgctgcggcggctggcctcgccgcggagcttcgtctacctcgtgcacgtcttccccgtcgtcatcagcatccccaccggatttggtaagatcacaattgggtcccagcaatctttggttggagattggcctgcagcattgttgaaatcaaggtcaagttcttggactagcttagggggtgatttgtctttgactgaatttttcaaagctggcattgtcacaagctgtagttccattctagctttgttggcatcctgccgtcctacgttaggcatattttgccccatcgcaaaccttgcagcaaaaaagctctagagctgatgttgactgcatggagaattggagatagaaacaataccacccatgtggtgtttggtttaggtgtccatgctaattctagagtgatcaactttccaaaaattctagaatgatcaccaaccaaggcatgtatgaataggaagagatatatatatcatgtccacaaaagtttcacgttaacagatgttacaaaaaattctaggaaaaaaattgaacatgtacttccaatagtattgcacgtatatataaagtatcaacttcaaattcattactccctccgttttataatattataagtcgcttagaatttttctttctaatacgaaatatatttaaaatataacaacattctaataaaaataagcatattatcaaaatatattcaatgttatatttaatgaaaatgatttggagttatatatattgctaaatttttctataaacttagtcaaacataaaaaggtttgactaaaaaatcaaagcgacttataatatgaaatagagagagtatattttagccataatagaaaaggaaaaatattatatatttaagagtataaatgtgtcagaaatttgtccttttttctctctctctaagtataatgaatttgaagttaggtgtgatactattggaagtgcatgtacatttttttttagaattttcggtgatatttattagttagtgtgcacgggacacttgtgtgtaccatgttcggatagacagaataaccctttttcagaacaagggtagtggaagcgagcctacaattctagttgattcagaggagttacacctagttccttctctatatgggtaattttaccatccataagaaaataccgggaggtaatatattttctagtataaaacccgttaccttcagctattagatattttagtatgaaatttagtacctatggctactttctcatcaaggaccgtaaaatttctctagataatgtaagggcttgttctttatgggtgatgtatagaattaagtgtatggaaattattcgagaatataaatgaatgaattaaatattaaaatattgaattgttggttttcaaaaagttttctaagaaatgcccataattaaagtttttacaaataaagtatggttttgaagcttacgaagtgtgccgtatcatctacaatctgtaagctggaaagaacacgacccttatgcgagaaagaactatatttgtttttgtcgatgcatctacagttaagggataatggcccatcagtggtatatttctaaaacccacgtttaatttttcgatttgacaaaaccaattataatttgctcggtcaggtacaaaagtacatcccatcacgaattttgcttcatgtgattccgcattaattttattctctgttctcaactccatatacgtggagtatattggatggcaaacagtagagtagactagtagttcgagtgttataggtctctgagatgccggcgtgagcagggcgagtactttgttacacttccactgaaatgtgaacagaccagtacagtgagattccgttctcgtagcttttttttttttctttgacactcgcacagcaattcatcgttgattgctgaatgatgcagacaggccattctttggcatggccagataggggagctgagaaggacgactgcctagagcttaggaaaacccagggctttctggtatatgcagagatatatactgttgtataactctcattttaggctagctgagcaatatagataactcaccatacagtaaaaaatgttaagagcaaatcatcagtacataactctgaagaaaccgttcggtttttctggagggatagggcgcgcaggatctatatttaaagtcttttcatttggacatcatagtcacggttgagtctaggatttatgtttccttctagcttgagtcgttgttaaatattaggctgcgtttaaatccaggggtgaaaagttttggcgtgtcacatcagatatacagacacacatttgaagtattaaacgtagactaataacaaaacaaattacagataaactgcgagatgaattattaagcctaattattccatcattagc

SEQ ID NO: 18440 - DNA, 2255 bp, Oryza sativa
  ref <308>: DATABASE ACCESSION NUMBER: AK068836
  ref <309>: DATABASE ENTRY DATE: 2001-12-06
gagcttaaattaaaatattgcgtttaattttcttttcttccatgtctaatcatgaatatattaaccttgacatggaaaaaatgtaattttggttggtcttggccaagtcttacccccttggttaccttcttgactttccaatttcttcacttaaaaatattcccatgaaaaagaatatcatctttggtgttttttctttcaccttgtaagaacaaatttcctctccatgttgttacaaccaatcattaacactaaaaaattagtttagaagttgacaaactgtttataacctgacaagctattccaattttacttcttgggaagagaggtggtgaaggaaaactgtcaaaaggtcaagggggttaatcagacaacttgagatcatgaacagtgattagtagtacagctaggttgtgctaatctactactacagtagcaatagctgttagatgtgatctgccaaaggacagttttgcacttaaaaaaaagtgtaatcactttagacttttcctgctcaatgattgaacctcatgtgtcccaatctctaggcacacacaccatgatgttcccaaatcttctccagaaagtttgcctttttttaacaaacaccactaatctcacctacctatactaccatcttaatttgttaacagcagcatcatcatcaatctcgagatgttctccatcaggagaatatctgaaaaacttgcaagttttttagtagagtttttgggtgatcaaacatcacatgcaatgcaaagatgcaatgtggtctggattctgaagctgatgagtgtttcttgggttcgtcagggattcggcatggaggacggcgtgttctgcggcgtgttcgacggccatggccggtgcgggcaattcatcagcaagctggtgcgggactacctcccgttcatgatcctgagccaccggaacgcgctgctcctggccgacgccgccgccgacgacgacgacgacgccgcgttcagcgacgacgcggcggcgtcgtcgtccgcggacagcagcggcaactcgtcgccgcagccgtcggcgtcggcgtcggcgcagatgctggaggagtggaggcaggcgtgcgccagcgcgttcgccgccatggacggcgagctcaagctccagccgaacctcgactgcgcgttcagcggcacgacggcggtgtgcgccatcaagcagggcagggacctcatcatcgccaacctcggcgactcgagggcggtgctcgccaccatgtcggacaccggctacctccaggcggtgcagctgacggtggaccacagccgagcgtgccggaggaggcggcgaggatcaagcggagcggggggagggtgttcgggctgaaggacgagccgggggtgatgcgggtgtggctccccggcgagaactcgccggggctcgccatggcgaggtcgctgggcgacatgaggctgaagcggcacggcgtgatcccggcgccggaggtgacgtcgcggcgcgtgacgggcgccgacctgttcatggtgctcgccacggacggggtgtgggacgtgctgagcaacgaggaggtggtgtccatcgtgtgcgcgacgccgcggaagcagcacgcgtcgaaggcggtggtggaggccgccgtgcagcggtggcgggccaagttcccgacgtccagggtggacgactgctccgccgtctgcctcttcctccacgaccacaccctcggcacggccgccgccgcctccgccgcagccgccgcggccgccagaaaggcgcgcagggcctccaccgccacgccgccggcgagctgaggacacaaagaagctctcgctccggcgagctcgatattgtccgtgtttttgcagtttttgttgatcttgatgtgctgcaaatacctacaacctccgtcccataaaaaaccaaatcctagcaatggacctggatatatgtgtgtccagattcatcgctggaatttgactctttttttttttggacagagagagtatgaattagtagataaatatagtctattgtaacatagtttagagaagatgggaaaaaaagagaggcaattgcgaaaatgcaaatgttgccaagaaaagagagggaaaaaagaagctgtttttacttttgatgatcatagtgagggggagatattgtaatggctgaagaatggcaatcagccaatctgatgttgtttgtgagataccaattgcttgttggcaatttggaactttggaatgacattgtaaatacctcgcataaaaaattgt

SEQ ID NO: 18441 - DNA, 1054 bp, Oryza sativa
  ref <308>: DATABASE ACCESSION NUMBER: AK068837
  ref <309>: DATABASE ENTRY DATE: 2001-12-06
ggagcgagcgaccgatccccaattcgccgcgcgcgcgcacggcggcggcggcgagccggcgacctccccctccgccgccatggacggccgccgcaacggcgagcaccagccgacccggtggccgccgggtgcgggggtggaggagagggacaacgcctcctcctcccccgcctccatcctcctcttcgccctcatcggcgccaccgccaccaccgccgcgtttggtcagctgcgcaggacgatgagctggttctacacgcagcttagtaggtcggagccttatgtgtactgggaagacataccacgtcgaccgaatcggcgtggtgaagcctggggccagtattaccagaggatgcgcgagaagagtgaggatcagagggagagagtggaacgcataaggcacatgcaagatatgttcaagaaggagagaagtgaatgtcgggattaccgaactcgggatggccataatccaagctactatcagaatagtcgaagagaggagtggtactgggatgcagagtcattttatgctaaccaaagaacaaatttcagatcgatgcccagggaagccatgggttacactatgtcacagcactactctatcttgggtcttgacaggtcaagattggagccattctcagatgctgaaattaagaatgcatttaggagaaaagcgatggagtatcatccagatcaaaaccaacataacaaagagtttgctgaggcaaaattcaaagaggtcatggattcctatgaagcaataaaattagaaaggcaaaatggaagtttatgaatgcgctcacaatggagggctgttgtatataaggcgtttgacacaagataaaacatgtcttaaccttgattgctgttttgcttcttttttcactatttatgtaagcaacaacaaatagttatctgttgtgggtgctgaaccgcagattgttgccaagatatctagctgtcagaccagctgttgtaggacatgctgtccttgataaaaatcctcgtgtagaagttttgctctcacaaacaaaaggcagaattttgacttttc

SEQ ID NO: 18442 - DNA, 2809 bp, Oryza sativa
  ref <308>: DATABASE ACCESSION NUMBER: AK068838
  ref <309>: DATABASE ENTRY DATE: 2001-12-06
gcgacggcggcgacgatgacggcgaggcgaggccggaggagaggtttggtgccttcagagacagcacgtcggagtgcagcgacgcgtcgacctccggcgaattcgtcgaggagttgccgtggatcaggtaccaggggtatgaggatgatagcttggatggtgaattttcagacgaacacgggatcagagacgaggagatcactagagcagttgtttctgaatttcaagaagatcaagaagaagagggcacatcaggtagattgggagatgggtgcgaagatgaggctgctcaacaacaggaagaaaatgatgagcaaaacatctcagattttgcctgtgaatcggagatcgcgtcggagcatgaaggtgttgatttcagagttgaggcttgtgaggagcaggagagagtcagtgaagacaacatcctggatgcggcacatcaaaccgaggtttgtagagaacaagagatgcaagaagagaaaaactttgctgctgtctgcaaattggggattcctgagcaggaactagcagagacggcggataatatccctgatgagtgctgcaaagaggagacttcaatggagcaggacgaaggcggcgatgggaccaacatggagtctgaaagcatttcagaggttgccgagcatccgaatgtggaagatgaagagaacacgcaggatgatggtggatctgaaatggagatatctgaggagatcatctctggttttgggtgcgaagaggatttctccgaggaagtcacttcaaaatatgtctccgaaggtgaaatttctgactccggtgcgattgtttccctacatgttgaaatgcaaaaacaaccagtggagaaccatgcctttgagcaagatgacagcagcactgcagacaatgcatttcatcaagatgacagcacagcagacagagcatttgatcaagatgacatccgtgcagatggctatgatgactctcagaaggaattggatattggaatgagagaattcagagttgcctccgaagaagttggtattcaagaagctaatagtgatgatcctgtggactgcacagaagatgctaacatggaactgggtgtattcttgtgcgacttgcaagatgcttctgaaggttctggtatcgctcaagaaagcagccaagaaggtaactcggcatgctttaatgatggagctcaaatggtaccagatattaccacacaaacaacagaagatgcttctgaagaatctgataccgctcaagaaaccactcttgatgataactctacaccactcgctgctggtgcccaaatggaattggggattggcacaagtgagttgattgaaggctcttctgatgtcactgaacagtctggtattgctgaagaaacctgtcaagatgataatgctggatatttcagtgatgatgattctcaaaaggcaaccgtgataaccacatgccaattgcaagttgattatgaagaaaatgttattgctcaagaagctgatgataactctacaggtgtcagagatgatgctcaaaatgaacctgagcaaacatgtgaattggcaacatctgaagaatgtcattttacccaaaaaactattcaaaatcatggtgctctagaggaatccgtggttatcgcaagtgcatcagaagatgctcatgaagaatcagatcctactcaagatggtcatgaagaagactattctgtaggtatcaattctggtgctcagaaggaaggagagcttgacacaagtgaatctggaggtgcttctgaaggaactactgtgcatcaagaggatgatggacacgttaacaccacagatctgaatggcagtgctcaaaaagagattactgtctctatattagatgactctgaagaactttgcagtagtgaggaaaataatcaatcatccaatatgctaataccagagttcagcgataacttcagtgctgaagagccccagaaccaagattctgttgcaaaagaatcgtcccttgatgacatatgcaacgcattcagcgggatgcacctcaaaggagatgcatatcttgatcctactgagtccatgacttgtccggggaatagattgatcattgctaggaggaggagaacaccggaagaggaggaatatttgagaggttttaacccaagggctccaaattttcttcctcttgaactggacccagaatcagaaaaggtggacctcaagcatcagatgatggatgagcgcaagaatgctgaagaatggatgattgactatgcacttcggcgagctgtgaataatttaggccctgctcgaaagaagaaggtggagcttcttgtccaggcttttgagaccgtcctaccgcacgacgaggaagagaagaaaggcatcacaccaacaaggcctgtccaagcttgcaattgataattgtagagttagtggtcgaactaatcaagatcttgactcgcgagctactaactcagtggtcgctgcagtattatcgccggagacctgcttgaagttgaatgagagaactacttactagtttactggaaatctctagtttgggttgtttttactgaggatctctagttgagtttcttaggagctcaaaactgctccacagggaaagataaccactcactgaatcaaacagattcttatctagttactgagctgcaaggtaacagctcaccagctaagtactgtaacgtgtgtataaatgtctcttgtgctagtgtctgatatttactgatgagtgatgactgagactagcaaaatgtttagggtggttgatgccttagacagagatgaatagaattcttctggagtgc

SEQ ID NO: 18443 - DNA, 1743 bp, Oryza sativa
  ref <308>: DATABASE ACCESSION NUMBER: AK068839
  ref <309>: DATABASE ENTRY DATE: 2001-12-06
gctgtttgttgtattccccttccttacccccaaaatcgaaatccctaattcgacgccatggccgcgactggcggcgccgccggggagaagacggccagcagcctcctgctcggcgtccggggctacacgtccaccctcaagaacgcctccaccgcagctgcaggttgagcgccggccatcccatcgaggtgactttgtgggaggcgtccccgcctgccctctcccacttctccgtccactgccccgatctcccatccttcaatggcaatctgcttggcgcgcctaaagccatcgccgccgccgtcgacgacgccgacggccagctcctcctcctcctccgagtccccatcgatcagcttggtgccccgcatgacaacgactacttggtctaccatccggatcccccgtctccgaaactggatctgctccccaacccgcctccccctaccctcggtgaccaccagcttgccatactcagctgcggcgacgaccgctacgtcgtggccgccctccacgtctggagtgagttcacttccacgctgcgcctgtacagatcttcttgttcgtctgggagttggacatcggaggaggtgtccgtggaggagccggtgagggacaggctgtgcccgatcccggactcagccaagaggcagctgtaccacgtcaccaccaagaccatcacgctcggaggtgcgaagggcaccgtgggctgggttgatctctggcgcggcatcctcctctgcgacgtgctcgacgaaatgtctccaaggaagctccgcgacatgccgctgccgtggccggccaagggcaattggaggatgtacctcaatggagatgtgtccttttgtcgggacatcgccatcagccaacacaaggattccatcaagtatctggagatggagatcgtttcaccaagaacggtgaccaccaccatacccacctccacctctgcagatcctacttcataccttgaatgggttcgccgcagcagagaacctcagccgacgactggcgccgtgactgcactgctgaatcgcgtgaagtccatcttgacaccaacccaagtcaccattacgagttgcttcatagcctcatgctcagcaacagcggtgatgaacacagggaggaggctcaaggtcaaggggcaacctcttccttgtccctaggtcgcctgcgtttgtgttacccggccttgagttgcatcgatgatgatgttgtttacctcttgggcaacgctgctggcaggggtgctaagacgggaggaatgatggtcgctgttgacgtcaggaacaaggagctgcgaggagtggccaagcttgaccccgaaaagaacaccctcaacactaccacagacacaagagttggacgacctgaggaggatgcagaagccgccgagtagaatgtgcgaacccagtgacatatatgcatcatactgcagcctgcctggatgcaaatattatcgtatcagtggtttgttggcttgaatgggggttaaggagttgtgctgttgctgggcatatatagttttgtgacaagaatcttatccaggttgcttactttgggttgatgataaaagtaggagtagacgtgaataacattaatatatgttggcttattttttgaggggatgttggcttatttatgtggcactaattgtctttatgcctttgagttaaacacaaaacaatgatccaactctttgaacctgtttgtttcaagtaatgagttgatgaatttttcacc

SEQ ID NO: 18444 - DNA, 1794 bp, Oryza sativa
  ref <308>: DATABASE ACCESSION NUMBER: AK068840
  ref <309>: DATABASE ENTRY DATE: 2001-12-06
tcaccagagacgcaacgcgacccaccacgacgcgacgatggccagccacgccgtcaccgatgcgctcctcctgccgcgctccgagggcgccgtcgccggggccgtcgacttccgcggccgcccggcctcccgcgcctccaccggccgctggtccgccgcaatgttcgtcctcggggtggagatcgcggagaggttcgcgtaccacggcgtgtcggcgaacctgatcagctacctgacgggaccgctgggggagtcgacggcgggggcggcggcggcgatcaacctgtggagcggcgtcgcgacgatgctgccgctgctgttcgcctgcgtcgccgacgcctggctcggccgctaccgcaccatcgtgctcgcctccctcctcttcgtcgtgagcatggggatgttaaccctctcgtcggcgctcccggcgttccacggcgacggcggcggctgcagctacacctccaagtcgctgtcctgcgctccctccaccgcgcaggtggccatcttctacgtgtcgctgtacctggtggcgctcgccgaggccgggcacaagccgtgcgcgcaggcgttcggcgccgaccagttcgaccagaacgacgccaaggagtccgtctccaggagctccttcttcaactggtggtacttcggcatgtgctccggcaccgccatgaccaccatggtgtcctcctacatccaggacaacatcggctggggcctcggcttcggcatcccctgcctcgtcatggcgttcgccctcgccatgttcttgctcgggacaaggaactaccgctactacgtctccacccagtccagccccttcgctcgcctcgccagagcgttcgtcgcgctcatcagaggatccaaagacgacgctcttgccgtcgtggacgatgacgacggcggcgaccaccgagaggagctgagaggcgtgctgcggctgttcccgatatgggcgacgtgcatcatctacgcggtgatcttctcccagtcgtcgacgttcttcacgaagcaggcggcgacgctggaccggcggatcggcgagagcttcagggtgccgccggcggcgctgcagacgttcatcagcgtcaccatcatcgccttcatcccggtgtacgaccgggcgttcgtgcccgtggcgcggcggttcacgcgcgcgtcctcggggatcaccatgctgcagcggatcggcacgggcctcgtgctggcgctcgccgccatggtcgtcgcggcgctggtggaggcgaggcggctcggcgtcgccagggacgccggcatggtggacgaccccaaggcggcgctgccgatgagcctgtggtggatggtgccgcagtacgtgctgttcgggctctccgacgtgttcgccatgatcggcctccaggagttcttctacgaccaggtccccgacgcgctgcacagcctggggctcgccttcttcctcagcatattcggggtgggtcacttcttcagcagcttcatcatctccgccattgacggcgccaccaagaagagcggggcgagctggttcgccaacaacctcaaccgcgcccacctcgactacttctactggctcctcgccggcctctgcgccgtcgagctcgtcgcgttcgtgttcgtgtcgcgcgtttacgtgtataagaagagggttcctcacaacggttgtgatgtcatgtagaagtagaggttagctagctaattcttgtgcatgttcttgtgaaatctgaaaatgtttgtacaggtgattaaatcctagaaagtgaataaaaccttgatacttaagctctgattcctgcg

SEQ ID NO: 18445 - DNA, 2667 bp, Oryza sativa
  ref <308>: DATABASE ACCESSION NUMBER: AK068841
  ref <309>: DATABASE ENTRY DATE: 2001-12-06
gactggtcactgcccacccagattcctccgccggcgccggcgccggcagcggcagcggcggcggcagcggcggcggggtacaaagacgctccaacctgacgagcggtcgccttcctcccaaccccaccaagcccgcacgggagggagggagggagggagccctctctcaagcaagtccaggccggccatgtcgtcacgccgtgtccgcgtcaccggccttgggcgacccgacgccggcgtctcgcgcacaaagaagcagcagcagaatcagggtcttcctcggcaacatcaacagcaacaggaagctggtggtggtggacgagctggtagggagcacgctcaccacctgttcgacgaattgcttcgccgagacaccacctccatcttcgacctgaacagcgccctctccgccgtcgcccgtgaaagccccgccgtcgctctctccctcttcaaccgcatgccccgagccgacttatgcacgtacagcatcgtcattggctgctgcagccgcgccggccacttggacctcgctttcgccgccctcggccgtgtcattaggactggatggacggcgcaagcaatcaccttcagtcctctgctcaagggcctctgccatgacaagaggaccagcaatgcaatggacattgcgctgcgacgaatgcctgccctgggttgcacgccgaatgcattctcctacaacatccttctcaagggcctctgcgatgaaaacaggagtcaacaagctctccacctactccatacgatgatggctgatgatactagaggaggatgcccacccgacgtggtttcatacaccacagtcatcaacggcttgcttagagagggtcagctggacaaagcttattgcctgtttgatgaaatgttggatcaggggatgtcgcctaattgcatcacgtataattgtcttttgcatggatattgctcatcaggaaagcccaaagaggccattgggattttcagaaagatgtgcagagatggtgttgaaccggatgtcgtcacttataacacgctcatggtctatctctgcaagaatggaagatccatggaagctagaaaagtttttgattctatggtcaagaagggccacaagcctgacagttctatatacggtactctgcttcatgggtatgctactgaaggatatcttgttcagatgcaccaactcttggatgtgatggtacgaaacggtacgcaacctgatcactacatctttaacatattaataggcgcatacgctaaacatggaatggtagatgaggccatgcttgcatttagcaaaatgaggcagcaaggattgcaccctaatatagtcacctatggaacagtaatggacgcgctttgcagggtaggcaaagtggatgatgctatgtcccaattcgacaggctcatctctgaaggactaactcctaatggtgttgtttttagaaccttaattcatggcctctgtgcctgtgataaatgggacaaggctgaggagttggctgttgaaatgatcggtcgaggcatctgtcccaacaccattttcttcaacacattgttgaaccacctatgcaaagaaggaatggttacaagagccaaaaacatctttgatttgatggtacgcgtagatgtgcagtgtgatgtcattacatacaccacactcatagatggatattgcttagatggtaaggtggatgaagcaacaaagttacttgaaggtatggtgttagatggggtgaaacctaatgaagttacctataataccattattaatggttactgtaagaacggtaggatagaggatgcatgttctcttttcagacagatggcaagcaagggtgttaatcctggcattgttatctatagcacaatcctccacgggctgtttcagactagaagaattgcagccgcaaaagaactctatctctggatgattaaatgtgggattaagcttcctattggaacgtacaacataatccttcaaggactttgccaaaacaattgcactgatgatgccctccgaatgtttcacaacctatgcttgattgatttccaccttcagaataggacttttaacattatgattgatgcgttacttaaaggtggcaggcatgatgaagctaaggatctgtttgcttctctcttggctagaggtttagtgccgaatgttgtgacctactggttaatgatgaaaagtttgatagaacaagggttgctagaagagttggatgatttatttctttctttggagaagaatggttgtacagctgactcccgaatgctaaatgctttagttggaaagttaccacagaaaggggaggtacgcaaggctggggtttatctctccaaaattgatgaaaataacttctcccttgaagcttccacggctgagtcgctggtttttctggtttcaagtggcaaatacgaccaacatataaattctatccctgaaaagtatcgtcctactgcgaaatccagggctgtttttagtcaaaaaaaaaatccagggctgtttgatgctgccggtagctatggagttgtaactagactttattcttcttcttatatcgaattagttgtgtaaagatgacattctggagctacatgatgggagatttctctctctctctctctagcatgagtttttcagaagctcttttgcttgcg

SEQ ID NO: 18446 - DNA, 3754 bp, Oryza sativa
  ref <308>: DATABASE ACCESSION NUMBER: AK068842
  ref <309>: DATABASE ENTRY DATE: 2001-12-06
gacaagaccaccccagcacaaaaattcccacggaaaaacaaaaaaaaaaaagagagaaggagaaaacaaacggagagacaaatcccgtccagaaatcgtcgccccaattccagatttccagtcctctcttgtgccctccctgaaaccctcccgaaatcccacgaatcctcgcgattttttctccacccccaatccaccaccgcgttggccgccgccgccgccctccgcagatttcccattagggcgccgccggagtggtcgtcgccggccgaggggggcctcgaccccgcccctcccctgctccccccactgcgggggccgcgtcccgcttgatcaatcgcgtcgcggtggattgatacgggggttgggggattcgagaggggggcggagcggttttcccccaccccaactcgtcgtgttcgtgttttttttcttccaatctgcgcgcgttcgtgcgtgcgtgagggaggtcgtggtggtggtggtggtggaagttagggtttgagggtttggttccggagggtagggtctggtggtggccgtggctgcccccggccgggggtggtgggtggctggggggtgggggggattcgccgtgcaactgttgcgcgccgtggtggtgtggggatcgtgttgtggcggcggattggatcagtggccgctgtcgcgcctccgcccgctgctggtgctggtggaagtttagggggggtgagggtgcaggcccggcatggaccgaggtgagccctcgctgaagccagaatggctggtgcgggggcatggcgcagtggctgccacgagcctctggactggaacttcttcgccgcgcgctgatgatcaaggtaggagcatttcatcaagaaaccaatcatcaggtcgtgaccgtgaacggagctcacaacagtccatctcacggaggagttctggctcaattggacctagacggcatgaccgggatggtacagcaaagtcaagaggctatgccagttttggaaggagcaaccgggacagggggggtgagaaggactctgaatcccgtaattgggagagtaggttgggtccacctgatgatcccttgtatgatggcttcaagccattcagctcatgcagacctgaaagggacaggcttaatcatactcgtttgaaggtagatacattgaatcaggcggtaggagaaagtttagacaatggtgttcgtagtgtatcaagaaaggtttctggtggtgtctcctttgagcgagaatttccacaccttggttctgacgacaagaatggaaagcaagatgtaggtagagttccatctcctggaattagcaccccgattcagagtatgcctttgggcactgcacttgatgggcggagttcagtgctagcagaagttcctgtacttagtggaccaaccaactgccctgttccatcttctttgttacgcactggttccagtaagcagatggaagtgccaaactgcgggactgcattaagtatggctgaaacagtgatgcaagctccgttaaaaatctcgacaacaccccagttatcgatcgatactcataagattgaagaaagaactatgaagcagtgcatcctaagacctcggacaccttcttcgaacaaaatttctgtatcaagttcttcagataagttaaaatccaaaggtgcaagagctggagattctaatggccctgtcaagggtacaatgcaactgccattacagctttctggcagctttattcgcgctccagtaaaacatgagcttgtaaagccaactcaatcaggaagctttcaagtccttagccgtgagcagaatggtactgtaaatactgccaaagaaagtactagcaatcctgcgagccctgttctaggccgatcatattcagtagaaccactgagaaagcctattgtaaaccaaaagctaaagggtgttgctaatggtctccctttacaactgcaaggatcatttggtgagagaaaatcaagtgcgaaagataagcataaattctttgagttgctgcgcagcaaatcattgaatggttcgtgcacttctactgtgtcttcatctacattgcttgatgagcaaaacaactcttgtcttgaattgtttgattctggagtcaaatgtatggaacatggaagtagttcttgtgaggaagcaaattcttgtgagggatctcagcagcacctttctgacaatgaggaaatcaatccaccatgggaaccacatgatgtttttgatgaaggaatgcaagaggttctgtctgacaacagggattttaactcttcatcagaaattgctgacacacaagatgtatatatgaagccccatacaaataatgctggttcctctccgtccatcatacctgcagaaatttatgatggctccatggggtccaactgtagtgatgatgaaactgttatgttgtttgaacccattggaacaggggaagaggaatcctatcctgctcaagacagacctagtccagaggagatggctttcttggtttctcttggctggaaagaggatgaaatagttccacctctgaaacaggaagaaattgctgattgtgtaagtgtttcttatgttttgctaatttcagcaataattttttattctcttcccatacacaatttacatgtttaggggcttaactttttaaaaacattttcactaatattcatagttgacccagcacttaaattgaccccattcattcagcttcataaaaaaaatctagttgaagattcccattctggtattcactttgtagtcttacatgggtggtctaatgggatggcttgccatgtcagcaaaatggattgatagtgtggcctgctaagcaagtgttgggcaccatcatcattgtactgcagatgaggcttgctaaatcaccaaaacatagggtttagttaatgctgaaatggaaatccagtgagcgctgacaaaatagctacactggaaaccctgttgaagtttctggaccaatggtcctctcttacaaccatacttatacatcacatttggtagtgcatacctcttttgagagtctaaaaaccaaaaggagctaaaatgactcctaccgatgtttaaataccttagaaacaagatatgtaatgcaggagagatgtgatgtttaatgatggcaaacaatgaaatggtcattcatgtgcaagtcccctatattatgcaacaagatcaaaaaaaaatgtagaccttataaaaagaaacaaagggggcattattttagtataccttcaatctctgttatgcacactggtaaatttcatgcttgtcaatcattttctcatgacataatgtcccactgttttgtagttacgtcacaatgtgaggctgcagcagaagcttgaggagtgtaggggttaatgcagtaacgccagaattttaccgagcaacatgacgggggatctcatcgtgctgataacctgtggatgtgaagctgtatcttgatggttttcggcaaccacttcagccgtcagtatgactgtctagcttaacaaattgagtttttttgttgatgtttcagcgatgtggggatgtttcatgagtagaaaattttccctgctgaaaagaggttttaaggttttctccctcattttcccagaaggaatactaaatgaaattctgtctggtgttggaggcacataggtgtgcggtgctctgaaagaataggttttctttttactactcatgcttgtccttgtttcagaaatcagaaatgaaaggaaaagaatactgggtctt

SEQ ID NO: 18447 - DNA, 3477 bp, Oryza sativa
  ref <308>: DATABASE ACCESSION NUMBER: AK068843
  ref <309>: DATABASE ENTRY DATE: 2001-12-06
gttgtccgtacggtcgccgcccgcggccgcgctgcctccgcctccgccccccgcgccgccgcccgcacgctcggcgcgccgccgccgcccaaaccctagctccatctcccgcttcccccagccgccgctctgctccccgcgagctcctcgccggaccaagccgccgcgggcgccactcccccccaccgctagcctctctctctctctctcgtcgtccgctcgccccgtcgccgcgcgtcggtcgcagtcgcggttgctccgcaggaaattataaactttcctgttggcttaactctgttgagcatatatgccttagagagcttctgcaatggaagggtctgattctagtcgaagtcgtgacaagagagatgctgatgacgatgttgatgctaggagcagttggaaggaagatgacgaacatgaggatgtcgaagacagaaaaaatcgttctggcaagtcaacaaggtacatctatgatgatgaaggtgatgaggatgattacgatgtaagaagggaatcacgggtgtccaaggtcccaaggagaagcccagaagagagaagtgagaggagattgtccgacgggtacaaggacagagatggggatagcagcaggaggagaagagaggacaataatgattgggattcttcaagaagatctggctccagaacttccggtcatgatgtctctcgtagtaaaagcaggtcctctgatcggaccagttctgatagagctgatacaagagatagtaggtcctctgctgatcaaagtaagaacaggagcgcaagagaggctcatgattacaggaatgaattgagtgaaagatgggaagacactgagaggagaaagggttcagccagaactgataagaatgatcaagatagacgatcaattgatccaaggtacgactcacctccagctagagatgataggatagttgattctgttgataatactagacaaaatacattgcattacaatgcaaagtctgaagagagcgatgagaaatgcatggatcaagtggaaggtacaaatagaataagtgataatgtggaaacaaaggatatgctgccttatgtagacaaggatgggcatgcattgtcaagggatggaagaaacaaagaagctagacatcatagagaaaaggatgatggcgaccaaggtcattcggactcagataatgaaagaaacataagcatgaaagaaaaaataagagtggatgctcatggagattataagtcctatagagggagggacagaaatagagagttggaaggatctaaagaacattgggggagtcgtcaaaggcatgattcgaaggagcctaacgactatgatgttggtgcagaatggaggcatggacaagaaaggttagatgggggaaattttcatggaaggtctgggtacaggaaagattccaggggcagatatgagagcagcaaaggtccttcatcatatggaaatcgatatgacagttctgattcaatagaaattcggcctaataggaaccttgattttggaagggagagctctgtttctggaagaagaatcaacatgggatcccttcaggatttaacacctggaacaagtgatccatctgaggagaacaaaagaaattatggaaatggtgaggatgcacaggagagatactatgatgatgtccaaaacatggatggtaaaattccttccgattctcatactgggagaggaggagcaatagcatcaaataattcaggagccggtccaagtggcagtgggagtataatttctccaactcctcagcaagggccaaaaggtagtaggccctctagaggtttacgaggaagaccaaatgtgagggaccctcaaagaatgggacttccagtgccgctgatgccacctccaccatttggacctcttggtctgccaccaggtcctatgcaaccaattggaccaaacatgtcccattctcccggtcctcttggacctggtgttttcattccaccatttcccgggcatcttgtttggcctggggcgcggggtattgatgtgaatatgctttctgttccaaccaaccttcctatccctccagtagcgggacctagtttcacttccagtgtagcagctggccccaatcatagcattcacttaaatcaaacaggcagtgggttgggatctccagcgaatgcaccaggaactggttttaatccattgtctacaccaaatcatgaaatactgcaagataaaccacctgcgggttggacaccgcagcgggggcctgctggaaaagctccttcacggggtgaacaaaatgattactcacagaactttgtggatactggcatgcgacctcaaaattttatcagagaactggagcttacaagtgtagtggaggactatcctaagcttagagaactcatacagaggaaagatgatattgtttctaactcagcttcagcaccaatgtactacaagtgtgacctgaaagatcatatgctttccccagaatttttcggcacaaaatttgatgttattcttatagatcctccatgggaggaatatgttcatcgtgctcctggtatcactgatcatatagagtattggactcctgatgagattatgaatttgaaaattgaggccatagctgatacaccctcatttatcttcctctgggttggtgatggtgttggtcttgaacaaggccgccaatgcttgaagaagtggggatttcgtaggtgtgaggatatatgttggattaaaaccaacaagaaaaatgcaacaccaggtctgcgccatgactctaatacattattccagcattcaaaggagcattgcttgatgggcataaaaggaactgtccggcgcagcactgatgggcatattatccatgcaaatattgatactgatataataatagctgaggaacctactgatggttcaacaaaaaagccagaagacatgtataggatcatcgagcattttgctcttggaaggaggcgcctcgaactctttggtgaggaccataatatccgtccgggctggctaactcttgggaaaggcttatcttcatcaaacttccataaagaggcatacatcaagaacttcatggacagggatggaaaaatatggcagggaggcggcgggcggaatccacctccagatgctcctcaccttgtcgttacaactccagagatcgagagcctccgtcccaagtcacccccgcaaaagagccagcagcagcaatccatgcctccaatgggatctagcagttctacaaacaggcggtctgtcatgaactcctcgcagatcgtcgtgacggttgttggctctgaaacaatgatgccatctccatggtcttccaacccaatgtcaggttttggtatgcctgaatagttttgttccaaggaaaccattcatttattcctatacgattttcattattgatgtgtacattcacttttacacgacagatgcgttaataattatctgtatcatcaatc

SEQ ID NO: 18448 - DNA, 1666 bp, Oryza sativa
  ref <308>: DATABASE ACCESSION NUMBER: AK068844
  ref <309>: DATABASE ENTRY DATE: 2001-12-06
taaatcaaaaaccctcccgtcccatcccctccttgtgtagttgtgttgtttgcggcgaaaccctaggattgtctccggcggcggcggcggaaggatcatggagcgggcggcaggcggcgtgtcgtaccagcggttcccgcgggtgcggatccgcgagctgaaggacgactacgccaagttcgagctccgcgacaccgacgccagcatggccaacgccctccgccgcgtcatgatcgccgaggtccccaccgtcgccatcgacctcgtcgagatcgaggtcaactcctccgtcctcaacgacgagttcatcgcccaccgcctcggcctcatccccctcacctccgccgccgccatggccatgcgcttctcccgcgactgcgacgcctgcgacggcgacggctcctgcgagtactgctccgtcgagttccacctcgccgcccgcgccaccgactccgaccagaccctcgaggtcacctccaacgacctccgctccaccgaccccaaggtctgccccgtcgaccaggctagggcctaccagcacgccctcggcggaactgaacccttcgacaccgccgctgctgctgaccagaggggcatactaattgtaaagctgcgtcggggccaagagctcaggctccgagcaattgctaggaagggaattggcaaggaccatgccaagtggtcccccgccgctactgtgactttcatgtatgagcctgaaatacgtatcaatgaagaactcatggaaacattgacactcgaggaaaaacgaaatttggtggagagtagccctacaaaagtgttcaacattgatcccaacactcaacaggtggtagttgaggatgcagaggcatatacatatgatgatgaggtcatcaagaaagcagatgccatgggaaagcccggattgatagagatcaatgccaaggaggacagctttatcttcactgttgaaacaactggcgctatcacagcttatgagctgatcatgaacgctatcacggtcttgaggcaaaagttagatgctgttcgtctacaagatgacgatgctgaccttggcgagcttggtgcccaccttgttggaggctaagcgcagagctgcttgtcttgtgttacccacaaagtaggtttctctaactatcgtgctagaggcaaaacatgatggtttcttcgtttggatcaatctagtacatgtaatctccctgatctgtgccattaaatctgtgctggaactttgtgtggacgcaccagactactgttcaatttgatggcaaatcgacacaccagccagctcatctctgggacaaatgtggagctgctagtaatactgaatgctgttcacctgtgatgtgtctttgggacttgcagcccgtcgttttgattggcctacggtatatgctacggcttgctgtgttgaatgctgggttttgtgcaggtctccccagattcatatgctcaatgcaatgtggcgtttaatgctgtacatctccaggttaattgctgaatagtggtggtactagatggtttgatggattcgctgagcgagatgcgtggagttaagcgcgcgtgcatgtggatcagtactacgatcttgatggatgtaccaaatgatttggtaatgtactgatattttggacctaaatgttggatctttcctgcttcttgc

SEQ ID NO: 18449 - DNA, 2990 bp, Oryza sativa
  ref <308>: DATABASE ACCESSION NUMBER: AK068845
  ref <309>: DATABASE ENTRY DATE: 2001-12-06
ggtacgcgcgcgcctactcgcggcctcagcttctcctctctctctctcctcgtacgcgccaacaagcagcagcaactacactagtacgtaggtacgtagtaggcttgcatactctggctccatggcggccgcggcggcggcggcggccccgcggcaccaccaccaccacgtcgtcgtcgggagcagccgctctgcgcccgtgtcggtgtcggtgtgcgtgcggcggtggtgcgggggcgcgtcgtcgtcggcgttgctgcgggtggggatgatcgggggcgcctccgcgtcgtcggcggaggggagggggaggaggaggtggtggcggcggggtaggagggcgctccgggtgcgcgcggcggcggggatggacatcgcgagcgcggtggaggtgatcaacgacctggggttcgacacgctcaccttcctcggcgtcaccgtgctggtcgtcccggccttccgcgtcgtcaaggccagcccaattcttggcttcttctgcgccggcgtcgtgctcaaccagttcggcctcatcaggaacctcaccgatgtcaagctcctctccgagtgggggattctcttcctgttgtttgagatggggctggagctctcactgtctcgccttaaggctcttgccagatacgcctttgggatgggtttgcctcaggttcttttgtcaacccttgctttcacggcgttcgagcttcctcctaatggtgctattggaaccaagattttgcagttcctctttgattcaagacctgatctggtgaatatcaggagcgttgatgaagcaatagtaattggggctgccctctcactatcctcatctgcttttgtccttcagcttcttgctgagaaaggtgaactcccaacaagatttggctcagctacactgggaatcctcctcctgcaggatattgctgttgttcctctcttggtcatactccctgtgctagagagtcagaatgtggtggagcaaagtgtgtggccaatgttattagctgaaagtctaaaagcactcggtggacttggcctactttcccttggagggaaatacctcatcagacgcatcttcgagtttgttgcagagtcaaggagctcagaagcatttgttgcactctgtcttcttacggtttcaggaacatcccttctcacgcaatggttgggatttagtgatacattaggtgcatttctggctggggccattcttgcagagacaaatttccgtacccaaattgaagctgacataaggccattcagaggtttgctgcttgggttgttctttgtgactacaggaacttctattgacatggagcttctcatccgggagtggcctaatgttctgtcactgttgggaggccttattgcaatcaagacattgataattactgcaataggcccaagagttgggctaactcttcaagaaagcgtaaggataggattgctgctttctcaaggaggagaatttggttttgtggtgttttcgttggcaaacaggcttggtgtcctaccacttgagttgaataaactgctcatcattgttgttgtactgtctatggcgctaactccattactcaatgaaattggaagaagggcagcagggatcatcgatgagaaatcagaaacaaaagaaaaaccagctgagatggtgaattatgatgccactgaacctattgtgattcttggttttggagaaatgggaaaggtccttgcaaagtttttgtctgcaccattatcttttgggcttgacaaagatgcggaaggttggccatatgttgcatttgatctaaatcctgctgtcgtaaagtcagctagaaaatcaggctttccagtgctatatggagatggttcacgccctcttgttctgcaatctgccggcgtatcttctccgaaagctgtcatggtcatgtatactggaaaggaaaagacaattgaggctgtcaacagattgcggcaagcttttcctggcgttccaatgtatgcaagggctcaagacatgtcacatttgttagatctaaagaaagcaggtgcaacagaagttgttctggaaaacgctgagactagcttgcaactaggctcgatgcttttgagaggactgggtgtcatgtctgatgatgtatccttctttagtaagcttgtgagagactcaatggagttacaagctcaggaagcactcaacaacatcgaaaatcgagaaattgatatcatgaagccacttgagataagaatatcagacttggttgagcgcaatgggaatggttcaagaatgatagcccaggaggattcactaaggctaagtagtcgcccaaacataccactaattgaagcaactctagaggaccgaatacccgaaactacaggggaaaatgaccagactggatatgacttcaacaacatagattctgaagatggtgtcaaatattgtctcttggaagctagtgatgacgaaagcgaagcctccaattcaagcaaggaaatgatcgaccaatctgtatagcgccactagtaaagaaccaagatactaaacttccacttctaggatcaagcccatagaatggtagccaggcagagcagaagttcagacctggcacttctcttgcaattggacatatgcctatagcttacatgcagcatatatttctgaggactggattgatggttatcagtgaagggcatatgatcactggattatatgtcactcaatcctaaatcatgctgcagatagagaaaaatttcagctgacaaacctgatactcatatacctactgatgcagctcagagtgccagactgaaggatcaccatccagaattcagaatagcatttttactttttacaggacccttaatttgttcagttaggacgacacctatatgcatatatagatgcacattccttacacaattgtgctgtatttgtagcgtatatcggaccgaacattaattcctgtaccaattcaggtacgcacagagaattacagaaatagtattgc

SEQ ID NO: 18450 - DNA, 1696 bp, Oryza sativa
  ref <308>: DATABASE ACCESSION NUMBER: AK068846
  ref <309>: DATABASE ENTRY DATE: 2001-12-06
gggtggagaagattcgcgcggccgctcgccatgtcgtcgccgtcgccggcgttgtgcgccgccgcctcctgctccaccccgcttcgcgttgcgtcgcctgtcgttcggttccgccgccccggcgcgcccgcgcccgtcgtatccgcggcgcgcgcgtcgtcggcggcggtcccggccgtctccgacgacctcgtcctccgcatcgcggagcagctggaggactcggtcgcggcctcctcgccgctcctcgacccgctccgctccgcctccgcgctctccctcctctccacgcgctggccaacccgccgctccaacgaggcctaccgcttcaccgacatctcctacctccgctccctccccatctccctcccctcccgggacgcccccgccgtcgcgccgcccgcctccccctacgcctcccacgtccacttctccgatggcgtcctcacctcctcctcgggcgcccacgtctccgccctcgcggacctcccgcctggccacgtccgggaccgtgcggccgccgctctcgccgcctccgcgggattcgccgacaaggacctcttcttcgacttcaacgccgttggcgcgaaggatgtcgtggtcgtgcacgtgccggagggggtaagtatggccgacgacccggtgcacatcatgttcagttacagtggctgcggcgatggtagtatgatgatgtcgaacccgagggttctcgttgtggcggagaagggggcggaggtggccatcattgaggagcactttggtcaggaggacggtgggtgttattgggctaatccggtgatggagatcatcgtggaggaggatgcgaaggtggtgcattcctatgtgcagcagcagtcgtttgcggctgcgcataccaagtggaccgtcgtccagcagaatacatctagcaactatgagtttgttgaggtaagcattggagcaagattgaacaggcacaatctccacgtccagcagttgggccctgagaccaacacacaattgtcaacgttccacttctcagcgcagaataaacagatacatgatcttcatagcaagcttatacttgatcacccaagaggtcgttcacaacagatacatagattgattgcttctggtacagggaatggcatatttgatggaaatatcaaagtgaacagatatgcacaacaaactgacgcagggcaagaaaccaagtgtcttctcctgtcatcgaaggcacttgttaatgtgaagccaaaccttcagatcattgctgatgatgtcaaatgtacacatggagctgccatcagtggtgaacatgatccaaatgcgatctacttcttgcaagcaagaggcatcgatgctaaaacagcggcggatgccctaaatttcgcctttggagcccatgtgataaaccaaataccattcaagcccatagagaaaaagacattagctcatttcaaagcgttgttggcttcctcaagacaaaacgacgaatgaggccctcattattgttatggagccagttcaacatttttcttttatcaaaatgagaaatatagaaagaacattagaagatttttggtgaaacacgacgagaaacagataactgttttgcaatgtcaagagtgatgttattctagcatgtaaagtcagttaatttgtgaaccacttgttcattacatgttgaatcaagcatgcatgatgcttgtgaggc

SEQ ID NO: 18451 - DNA, 2093 bp, Oryza sativa
  ref <308>: DATABASE ACCESSION NUMBER: AK068847
  ref <309>: DATABASE ENTRY DATE: 2001-12-06
ggtcgtcgccactgtcccccgtgcccgatggccgcgcccgcgcccacagcttcgccgccgccgccgcccgccatgtccggcctcctctccttcgcctcgtcccgcccctaccctcccctccccgcgcccagacccgccgccgccgcccccaggccgcgcctccgcatagcgggttccgccgccgcggcccccaacgccgtgtcccaccgggcatcctcctccttctcctccggagaccgcctccgctcgctcgtccgccgcggggagctcgacgaggcgctccgcctcgtcgggtccgcgcggaggcccgacgcgggcacctgcgccgcgctcatcaagaagctcagcgcgtcggggcgcaccgcggaggcccgccgcgtgctggccgcgtgcggccccgacgtcatggcgtacaacgccatggtggccgggtactgcggcgcggggcagctcgacgccgcgcggcggctcgtcgcggagatgcccgtggagcccgacgcctacacctacaacacgctcatccgaggcctctgcggacgcggccggaccgcgaacgcgctggcggtgctcgacgaaatgctccgccggcgatgtgtgccggacgtggtcacctacaccatcctcctcgaggccacgtgcaagaggagcgggtacaagcaggccatgaagcttctcgacgagatgcgagataaggggtgcaccccggacattgtcacctacaacgtcgttgtcaatggaatctgccaagaaggacgggttgacgatgccattgagttcttgaagaacctcccgtcatatggctgtgaaccaaacacagttagctataacattgtgttgaagggcctgtgtaccgcggagcgatgggaggatgccgaggagctcatgggcgagatgggccagaagggttgccctccaaatgtggtaacttttaacatgctcatcagtttcttatgccggaaaggattggttgagccagcactggaagtccttgagcagatccccaagtacggttgcacacctaattcgttgagttacaacccgcttctccacgcattctgcaagcaaaaaaagatggataaagcgatggcgtttttggatttgatggtgtccagaggctgttatccagacatcgtttcatacaacactctacttactgcactctgccgcagtggtgaggttgacgtcgctgttgaattgcttcatcaactcaaggacaagggctgcgctcctgtcttgataagttataacacggtcattgatgggcttacgaaggctgggaagacaaaggaagcactagagctgctcaatgagatggtcagcaaagggctccaaccagatattatcacatactcgacaatagctgctggtctttgtagagaagatagaattgaagatgcaattagggcatttggtaaagtgcaagatatgggcataaggcccaacactgtgttgtacaatgcgataattcttgggctttgcaaaaggcgtgaaacacacagtgccattgatcttttcgcttacatgatagggaatggctgcatgccgaatgaatcaacttacaccatattgattgaaggcttggcttatgagggattgatcaaggaggcacgggatttgctggatgaattatgttcgagaggtgttgtaaggaagagcttgataaataagggagccattagactgcttgattgaactatgaatacatataagaggatcaactgagtatcgagggtctgagaatgagattttgtgcatcttcgctcttcagcaggagaggagattttactggatgttcacctaattgatgttgctttcttgacaacatgtgagtcctttcatccacttcccaccttacaggcttacagcccacttcagtcttcgagttgcttggaatttctgcataactcttgtcttatttaacatactttaccttattgttgaacatggtctcatgtttcacattcttgtccttacatgatatatcatactagtgtgagatacatattagacctgttttgattgggcatttcttgcttcaatatgctttagcacttcatatgaactagcggaatgaagggatatgctaagtgatg

SEQ ID NO: 18452 - DNA, 1650 bp, Oryza sativa
  ref <308>: DATABASE ACCESSION NUMBER: AK068848
  ref <309>: DATABASE ENTRY DATE: 2001-12-06
gaagcaaaatccccatttccttctcctctccaaaccctagcaaaggctatctctctcttcgccgccatggaggatgacgacgcggggggcggaggcggaggcggcgaggcgtccccgccgcacgcgggctccgccgcggcgatggcgggggcggggagggacatcgcggcgtcgccgacgagctcgcggtcggtgacgcagacggtgaacgggtcgcacaggttcgtgatccaggggtactcgctggcgaaggggatgggggtggggaagcacatcgcgagcgagacgttcacggtgggagggtaccagtgggcgatctacttctaccccgacgggaagaaccccgaggacaactccgcctacgtctccgtcttcatcgcgctcgcctccgagggcaccgacgtccgcgccctcttcgagctcaccctcctcgaccagagcggcaaggccaagcacaaggtgcactcccacttcgaccgctccctcgagtccggcccctacaccctcaagtatcgcggctccatgtggggttataaaaggttctttcggcggactgctcttgagacatcggattttcttaaagacgattgcttaaagataaattgtactgtgggtgttgtggtatctactatggattactcaaagccacattcgatacatgttccagaatctgacataggctaccattttgggacactgttggacaatcaggagggtgtggatgttatatgtaatgtggcaggagaaaagtttcatgcccatcagttggtcttggctgcccgatcttcctttttcagatctgaactttttgagcatgaatcagatgaagagaagaatgaagttgatactagcaatgaaatcaaagagattgtcattgatgacatggagccaaaagtgttcaaggctgtgcttcattttatgtacagggacaatcttgttggtgatgatgagttgtctgcatcaagctcggactgctctatctttgatactttagctgggaaattattggctgctgctgacagatatgagttgccaagactacggttattgtgtgaatcttacttgtgcaagcatatttctgtaaactctgtggcaactaccctagcattggctgaccgacatcatgctatggagcttaaatctgtttgcctaaaatttgctgctgaaaatctttcagctgtaatccggaccgacgggtttgattacctcaaagacaactgccccgcgctgcaatcggagatactgaggacggtcgccgggtgtgaggaggaatgcagcagcggagggaagagccagagcgtgtgggggcagctctcggatggcggcgataccagcgggcgcagggtgaggccaagggtctgaacacccagccactgctatgccaaaagcggcttgttttaaagtgtaactgtgtaagcgaattgctgctgtacaaatgggacggctaattggtttgtggcgacatttaaaataatagcatcagtctgttatactacccctacattcgttcaaatttcaatagctggtttgggcagtagctccgcagatggaagggattatgtttagttatctgagacagtgatgtgtagtcagtagtcagctattctagtttcgatttgcaatttataaacttcagtttttagcctgccg

SEQ ID NO: 18453 - DNA, 3416 bp, Oryza sativa
  ref <308>: DATABASE ACCESSION NUMBER: AK068849
  ref <309>: DATABASE ENTRY DATE: 2001-12-06
ggtcgtcgctagatcgtacccgagttcgtccaccgccatcgccattggtgccgtccgcccatccccatgctcggccgtcatccccaactgccacaagctctattagtgaagcaattctattggtcatccacaagctcagcctcactgagagctcgtccgacatagcgcactagtcgcgtggtccacacggtggcggcgatcctgcgcggcgatagctgagttcctccgacatgtgcaccaggaaccgtcccctcttatgtggcaggaccacgggtgtgcgacgaggttggctgaccggagctggaggtgacgacgaggaatggcgagggacggaggacgcggcaactgatggatagacggtgctgcttcggatggacggagtggcgtgaaatgaagaaattagctcttgtgatggtggattctgaaagacatgcgaattggatggttaatcctgaacgtgctacgaatcggatggaatattctgaaatttctcgtctgcatgtccccaaccctaggtcgccgtttccacacacgagatcgagcggctcgccatctctgccgccgcctcgctcgctcgctcgccgtcctccgccgctgccttgctcgtcgtcctccgccgccgcggcgccggcacgcctcgtctatcccctctctcggctcagtactttggttttctcccatgtcgacatcattagctgaagttccgcaaggaggacatatcaaagaggtcattgcagagggctcttcgggaggcctatcatcgtcaacacagttattggctacaaaacgaaagttagcagcatcgaatcctccaacagcaaagcgaagacgatcacctattgcattgccaatagtcaggtctccaggagtgcgacaaattatttcccaaaatgaagtcatcatggagagatcacaagttgctggtcagatgtccccaagtgcagagtctccaagagctagatctatgtctccagtggcaaggttcgtatcaagtccgtctgctatcccaattgagctggatgttgaaactcagccaagggagtcaactcaatcaacacctcatgttgtgactcatcgttctgggaaaagaacactcaaatctttaatctggaaagaatttaaaccattttattcttctactggaaaggtgctctatgggaaatgcattcattgcagtaaggtaattaaagctaaccgtggttcggggacaagtcaatgccatagacatttacttaagtgtccactgagaattagagtgcaacaattggttgaaagtttgcattccagtctatctcctaatgcatctgttctaaaggactggaaatttgatcctgatgtagcacgtgcagaacttttaaggatgcttgttttgcaagaacttcctttcagttttgttgaacaccctggttttagaagattttgtgcaagcttgaacccgtactttagggtgctttccagaattactataaagggtgattgcttggctgcctatcaagaacaaaagttagctttgtttgaggtactgaggaaaacaaattctcgggtttcactggcggctgacatgtggtcatctaatcaaaacctaggttacatgtgtataacttgtcacttcattgacaatgaatggaatattcaaaagaggatcataagattcactcaagtgcgtacccacatgatagtatagctctcttcaatgaaattctaaagtgtattcaggattggcagatagaaagtaagttgttcagtattacagtagacaatgcatctgttaatgattctatggttgtggaattgaaaggaaatctcttgggtaagcttgccatgccttgcaaaggggagctatttcatttccggtgcgcagctcacatccttaatcttattgttcaagatggattgagtactatcagtggtgccatatctaggataagggaaagtgtaaagtatataaaagcatcagaagcatgtgagcaaaaatttgaagaaatcattgcacaagtcggaattgttgaagagaagcgtccttcacttgatgtgtccactcgttggaattccacctatttgatgctttcctcatccttattattcaggagggcttttgattcattggatcggtttgatccaaactttcaagatgctccactattttttgattgggacaatgcagaagttctttgcaaacatctcaagatcttctatgatgcaactgttgtggtttccgggacatcatatcccactgtttctcgctactttcatgaattttggaaagtgaaggtgatgcttctaaatgagtccaacagtgaggatgttcttgtcgctagcatggtttctaaaatggatacaaaatttcagaaatattgggatctgcagttcctgcagatttgtgttcctgttattttttatcccagatttaagttgaaattccttgagtttaggctgaaagcaggttttggagataaggcaactggtccaaatggatatctgtctagaattaagaggatagtccgcagttggtttgttgaatattcttcacaaattggtggtccaagcgcaatcaattctcaagaagcatcaactagtggagtgaatgttggtggcagccaatttgctgactggaggcaatatcttcatgatcaaagcaagagtaaagaaagactgagttaactagctatctcgaagatattcctcaagaaaatgatttccctgatgatgattttgacatactccagtggtggagggtaaactcatgcaaatatccaatattatcacgcatggcgcttgatttgcttgctgtccctgcatcttcagttgcatcagattctgcattttctactggatctagaatcattagtgactataggagtaggctggctaatggaactgtggtggcattggtttgccttcaagattagatgcgagcagatggttttggtgatccctattcaattctaactgatacggttgaggacgatgatgttaatatgcaactattaggaagtaatgcaggagcgtgctctggtggtgggggcaaaactcaatgaaattttcctttctggaatgttatattctaactgcaagggatgagatggccttcagcagctgcgaatgctgctaccactagttttgttccctgtagtttttatttcagtaacttagttcgtttagatgcactagccgttgtcatttttgtgcatgtccagagcctgctgaaaatagtatgatgtattggaaattcagttgagcctgggatttctggactttttgttctgccgttttgctgctgctgctaccgttctggcctcctgctgctgggctagtgctgctgctggttgaaatcctcactgtgagaaggacatcaatttttggttgtattttgcagtgttgatatgaattgttcagatacaagccttgcaaaaagc

SEQ ID NO: 18454 - DNA, 3543 bp, Oryza sativa
  ref <308>: DATABASE ACCESSION NUMBER: AK068850
  ref <309>: DATABASE ENTRY DATE: 2001-12-06
gacactccacccaaccaccggtcgccgccggcgagatgctgccctaccacggcgatcgccaccggggctcgcccccgccgtaccccgcggcagcggcgcactcctcgctctccccctcggccgctcccttcaccgtggactgcccccgccccgcggcggatcccagggtccgcaaccccaacccccccgggctcgatctccccaccgcgccttccctctacaccaccgccgccgccggagactgggggagctcgtcgtggatggaaccccccgccagctacatggccccctcccccgccgctgccacccccccgccgccggcgtataaaggtgaagctcctgaaactgcaccatatggtatattccctgggacttgtcaaattggtaactttatggttacacgtccattgagatcagagagctcacaactaacaagtgcaaaaggtcctggaacttggctaggaagttcagaggttctgcccagtggtgttgggccatcagtttttagtccgcagcagaatacctttgtgcataaatcagaagatgcagaaccttatcctacacagcgaggtttattacagtatcctcctcagtatcctgcatatgacaaatacatgacacagctttcatcatgttcaacaaatgtgccacctcctgtcatgtggacgccacctgccaattcttctgaagtggtcgaacaaatgtttccagtgatgaataaaaatactggggaaagttcttcatccttttcttcatatatgaatccttgtagaatcaaccttgattattttgattgcatgtggaatgaacaaaaagatcttgggcatcagactactgataaacaccatggaaaatggagcagctctgctagcaatgcgggagaccatttgctcaattctcttggagcagatcaccgtgctgcaaggtgttttggaaatgggagacctatacaggaatcttcagagatgaaatatgaccggggtagctttaattccaaagtttctccatctgaggttggatatgttcagtctcgtgaattttcatccgagttgcctgaggttaataaccccactgttgattcaccttgttggaagggtgcacctattgcatatcctccttcatttggtattatgaaaaataccgacaattcccactctgtaaatggggtaggtggttatcaaatcgagcaatcacccgaatggagtttaaagtattcagagctattctccaaacatcaggaagtatcagcttctgaaagtgtcaaaagtgatgctttgaagacattcaagttgcccgagacacgtaaaaacactgaagataataaagaagtacttccggtctgtattggggttcataatggtattggtaacaatgcaagttattttcctgaagaacaaaattccagaagacagaaatgctatgattctacaggagattgtaagaacatgatagctgcgaatcaacaggaaaacctttcagtcagcaaagccaaactcttaggtgaggatagttccaaccatattgggagcataactgaagaatcaattaacaaagggcctagtcctcttggcagtgctcctagggctcttgttgagaatctgagtgaaagcctacatgttaatgtttgttctcaagcagctggggcagaggaatgcacacaggctcaaatatgtgcaaaaggaggtcagcagcctcgctattattcagattctggggggagcatgttgaagacgtcttctgaatcaagatcgaagtctcgggcagaacttctgaaacaaatgcatgatttatcggcaatgcttctgtccacttgcaatagcgttccattacagggatatgaagaggaacttctgcaattagtgattcaaaatcttagagatgctagttcctgtataagcaaggttcaaaatatgagttgttcaaggaataacttatggatggcaatgcctgaacactcattagtagagaacgattcagaattgaagacctctatttcacaggctgttgctaagctcccagaggataagacgcttgatgatattgatgtctcgcaattgtcgatctacaaaaatttgtgggttgaagcagaagcatcagcatgtaagctcaaatatgagcttcaacttacccgtgtgaagcttgcagcaatggaaaatcacaataacacacaagttcctgttgacttatcaaaaggcaataaaatctttatctcaaccatacccaatagtaaaccacaaaacagcactgcctatcctgcgaacttgcaatgtcagggagcagatagttgtgacgggcaacttcctgcagtaaataggagcatcattgatggtgttgatgctgaggtgattgagcgattgaaatttttacagtccaatttgaaggattgtcgtgctttttgccaaaacaactgtgaagagcaggaagaagcaagcaaaaaaccatgtgcaattgaagatgctgttatggccaggctaagggttttgaattcgtgtcctgataatatagcctctctaaaacaggaaaacaacaaccaccaccagctagatacaagcacaaacagagcagataatattgatgatgctgttatgtctaggctgagaattttgaagtcccgtcctgataatgtaaacccactgggtcaggaaagcagcaagcatgagccagatgcagctacaggcacaaataattttattgacaatgctgttatgtctaggctgagaattttgaagtcccgtcctgataatgcaaactcattgggtcaggaaagcagcaagcatgagccagatgcaagcacaggcacaaatgatttaattgataatgctgttatgtctagactgagaattttgaagtgccgtgacgataatataaattcattggacgatgccatcaagcagcatgtagaagcatgtactgatcaaccaaattgggatgaagatggtgttgtggccaaaatacaagctccaaatggcgacactgtgagcactgctgacgggttccaaaatattctgcattctaataattttgtgaggcactcggaaggaaaagattctgtcagtggtctagactctcctggtgatgcaacctgtagtgatgaagataatggtcgcaaggcaccttctgatgaagtcaatgacaaaactgcagtccaaagcgaaggtagttttcccatgaacattggttggccgctaagtacaatggactctcatatttgtacagcagggtctcaagagacgcccctaatctcctcttcagttcacaggtatgatatatttccgccgaagtgggagcatatgctgaaggagaacttcttccatccaggcaaataggctaccgaactgaaagctatcaaggagatcaagcaactatgtttgctcatgttctaacatgcttattgtacatatgctatcgtaataacgaaacctgaaagatccatcggtccttttcctctatctgtgaccagtatatcatgatacacaactggtcagcatataaacatctcataccgtacgatgtatctataataattgtgcatattttggagtt

SEQ ID NO: 18455 - DNA, 1518 bp, Oryza sativa
  ref <308>: DATABASE ACCESSION NUMBER: AK068851
  ref <309>: DATABASE ENTRY DATE: 2001-12-06
gggtaaccctaaacccccttcctctcttccggcgcctgggcgctcttcccccctcttccccgccgcaatgaggcgcttggtgacgcacctccaccgcctctcccaccgcgccatcccttccccgcctccatctcgacccccaaccaccactagcctccccttcctcctctcccgccgcctcctctccgacgacgccgcgcctccgcccgccgccgacgtcccaaacaaagagctgaagcggcggttggaaacttactatggggtggacgatgaggcagaactaccatctgtcacagaggctgttcttgagcggaagcttgcggatgtgcacagcgagacggacgatgaacttatcgaggagctgcgcagcaaaccactccctgaggttcgtgacagggattttgagtccgactttgaggagatgcacgatactgatgaggagctggacaacttgtacaacgccagacagtatgtggagaaaaagatcaagagtgacgagttctttaatatggatgacgacaagtggaataagatgatcaagaaggctgtggataatggccacctcggtaatatgaacgaatgtgagaatattttggaggacatgctccactgggacaaactattacctgatgaaattaaaaagaaggtggaggccaaatttaatgagttgggggacatgtgtgagaagggagagcttgaacctgagcaggcttatgaattattcaaagagtttgaggataagatggtttcagagtgcacagaactaatggaagctgagaacccaactgacgtggatgaattttctaaaatggaaaataagagtgttaagttggacgatccacctggtgagggacctgttctaaggtgggagtcacgtattgtctttgctcctggaggtgatgcatggcatcccaaaaacaggaaagttaaactcagtgtgactgtcaaagagctgggactttcacgacatgccttccgacgtttacgtgaggttgttgggaataggtacaattctggaaaagatgaactcacaataactagtgaaaggtttgagcatcgggaagagaacaggaaagattgcttgaggacattgtatgctgtagtagaagatgcaaacaaggccaataagttggctgatgatgctagaaatgcatatgttaaaaacagacttaaggccaatgctcaattcatggaaaggttgaaggtgaagacacagaaattgagggtagctgcataaggggctcctggagctacacgctctggaacaattcctctttcatgatatcagtacggtcattttgcaacaaaggatgcggcagtgagacgtagaacgggagcaaaaatgttttgttgtaatttacatgtgttgccttgtttggacggcctgttaggtttatctttagctgaagctacactttttgaatttaccgtgaccgagcaggcctgtttacatgatcgcatagtgaactggctgtatcctgatcttctctacaaataacaaattgcttctgaaaactc

SEQ ID NO: 18456 - DNA, 2533 bp, Oryza sativa
  ref <308>: DATABASE ACCESSION NUMBER: AK068852
  ref <309>: DATABASE ENTRY DATE: 2001-12-06
tgcgttcaattcgccgctgcttggtctcgtttggttccatccgctatggcagggggccgggatttgcacggcgtggatcgctgcttccatggttcttgaacctgttcatcagcacagcaaaggtcttccgcggcggcagctcgcgtgcggacccccctatctttccttcgctttctgggtcgactcgttcgtgtcttctctgtctcgtcctcctctcgtacttgcttcgtccttgttgtcccacggcgttcgcgggcctcttcgtccgaggctcactatagcgtatatccttatttctcagcttctgtatggagacatcagcaagcagatcaagacgcggctctctaggctatgggatttccacgatatcaatgatgaagaaaaaatatatcacactgaacttgtcttgctggatgaaacgggcgccagtatacatgtgcaaatctatccatccctaagaaataagttcaaggatctcttacagcaagggaaggtctactacatcgactctttctctgtcagatatgccaatagaacatataggcctgttgcgaatcctttgatgatttcatttactaaatggactaccttggaagaatgcattgagatccctgacaatttccctagcatcacgttttcgctgacaccgttccaagatgttccatctcttgtggaaaagaatcatttctatgttggtgcgtctcctttcgatcacatttgtcatctatgtttgtttccagttgcggccctatatttatcaaactaattttcaatgtgggcagatgttatgggtatcataactgaggttggtgcaacagccaccatccgccctaaatcaagcaacaccgacaacctgaaaagaaccatgcaaatttcagatgcaaggtaagtaatagcacctatttttcttctttcattatgcactatgtttggctcacgacacgtgcactaaccaccctaacaagctactaatatccaacaccaaataaaccatgcacaatttacaaaaaacagcggctgcacactgcctgtcacactctgggggaaaacaacaactgcctttgaagtacaggcgatattcaatgttggacagattgagcctcaagttgttgtctttgttggaacacttgtacgaaactacaaagggataggcctgactttgactggaagctcaccgtgcaaatggtatgtcaaccttgatatgcccgaagttgctgccctgaaacagagctttacagcaaagttttagcccatcaagtgggttgacgatggtggcgcagctttcgggcaagatattccacagaaaaaactatactgcagatccttagtctcaatccacacaagcataaggcttgttccgctatatttgcctgctgatctctttttctttgccatctgacattagcgatcaaaccgcatgtggttgcagcgggaccgttttgtcgtcaatatcaccataaccagcatagcacagcacacttcgtggtgttacaactcctgcaaactttgctcaagaacctctaggccatttgatttcacctacagatacacccattgttcctacataggcatcgcagtaccaaggtacaaggttgttctaaccgctgctgacagcactggcgaggctacatttattctctttggaaaaacagcgcagcgtatcatacgcaaaccagctgagacactcattgagcaaaatccacctgacagggaatatatccagatgaaattacagctcttatcaaccagacctttgtttggaatgttagcttcacagaggataccctcatgaaaaaccaggaaacattacaggtcaatagcatcatttcatctagcggtacagcacaacccctattgtcttcctcatcagatacagcagtgcagccattggctattatgccatcggcctcagtgagttgtcttcagtcagcaccagcagcaagtgaaaccagcattgagtcaaggatggacacagctacaggaaaaagcacatctgcagagcaggctccgatgacgccaacaacataccccataaagcccccatcggattagacaccaactagtgcatacagcgcgcaatcaacaagcaaaaagagctatgttctacccatatctacacccattcaggcaaaacctgtgccagatgttacaggggtagctgcacagcctccaccatctgtcaacctgtccaccaaaaaaatcaccgaaaaaagggccatgcctacagcctcagccccacctgctaagaaattgttcaaggatgatagccccagcaagggcgacaacaagtgaatcaaagaaaaagtatgctgctacttttgtttccccctacaatatcgtttgcaccagcggatgtactcctctgctagccaggccttttgttcaagacctcttccttatcaatttgcataagtagtctttgtttcctgcagtcgtttttctgttcgtctatatctatctttggaccttgaaaatccactgttactccagaacatggcactcttgtgtaatatgcaatgttcccctaccactc

SEQ ID NO: 18457 - DNA, 2831 bp, Oryza sativa
  ref <308>: DATABASE ACCESSION NUMBER: AK068853
  ref <309>: DATABASE ENTRY DATE: 2001-12-06
gggcagctagatagtttatcagaacggagagagattattatatgtctaccggagtactcgcttgtgaaccttgtttattagctagctgcccggttaaattatttgtgctatcagagagagatgggtgacgatgtgctgggcagagggagccgacgagatcaggagatcgtcctcgtcgacatcgtcgacgatgacgatcacgacgacgtgccggcggtgcggcggcaggactccctgtacgtcgacgcgacgagagccggcggagcaaaccaccgtggaggccaggaggagagctgggcgaggacgttgaagctagcgttccagtgcgtgggaatactgtacggggacatcgggacatcgccgctgttcgtgtactcgagcacgttcaaggacggcgtccgccacccggatgacctgctcggcgccctctccctcatcatctacagcttcgccctcttcaccatcgtcaagtacgtcttcatcgccctccgcgccaacgacgacggcgacggtggaacgtttgcactgtacacgctgatttctcggcatgcgaaggtgagcttgatcccgaaccagcaggcggaagacgagctcatttccaagtacaacaccgggaagccgcaggcaacgctgaggagagctcggtggatgaaggagcttctcgagaccaacagagccgtcaagatttggctcttccttctcaccatcctagccaccgccatggtcatcagcgatgccgtccttacaccggccatttcagttctgtctgcggttggtgggctgaaagagaaagcaccgaacctgacaacagatgaaatcgtgtggatcacagtggcgactttggtagtcctgtttgcaatccaacggttcggcacagataaaattggctacctgtttgcgccgatcatactcctgtggttgctcctcattgggtgtgttgggatctacaacaccattaagtttgacaccggcgtgttgagggcgttcaacctgaaatacattatcgactacttccgaaggaacaagaaggatggatggatctctcttagtggcatactcctctgcttcacaggtacagaagctctgttttcagatctaggatatttcagcattagatcaatacagctaagcttcagctttggtctagtcccttcagtgttgcttgcttacattgggcaagcagcatacttgagagaacatccagagcatatagccaacactttctacagatcaactccaaacgtgatgttctggcccacgttcatcctggcagttgctgcatccattattggaagccaagccatgatatcctgcgcatttgcaaccatttcgcatttgcagacactcaactgcttccccagagttaagatactccacacatcaaggcaatattcaggacaactgtacattccagaagtgaacttcttgctttgtgtgggtgcttgccttgtaacaattggtttcaagacaaccgtgattattggagaagctcacgcaatatgtgtggtctttgtgatgatcatcacaaccctcctattgacaatagtgatgctcctagtatggaaggtcagcatctggtacgttgcactattcttcatcgtcttcatgtcatcggagtcgatctacttatcggcggtcctataccaatttgtgcatggcgagtatgtacctgtggccatgtcagttttcctgatgattgtgatgactgtctggcactatgttcatgtcaagagatatgaatttgagcttgagcacactgtgccccgtgacaaggtgaaggagctcttggagcgccgtgacatacagagggttcccggggtagggctcttctacaccgatcttgtgcaaggcatacccccggtgttccctcacctcattgagaagatcccttccatccactctgtgctcatctttgtctctatcaagcacttgccgattccgtcggtcgataggtccgagcgattcatctttcgacatgtcgacaaagaagagtacaaggtgttccaatgcgtggcgcggtacggttatcgagaccccatggaggaggccaaggactttgttgatgcacttactgagaacctccagtactacataagggatgttaacttctacactacaggcggtgatcaacatatattcaggagtaccagctatgccagttccattgctgaaagttttgccagctatgagaaacactctgggcatgcagtctatgcagaggagatgcttacaccagccgaatccttctctgagcatacaaagcaacttagtggcagaagcaagcattttaaacaatttcaggtagagaatatgaacatgcaaaagatggagaaggtacaacaggagcagcaggctatcctcagagagatggagaatggtgttgtgtacatacttggagagagtgacatagtggcaagccctcactcctcgcttcttaacaagatcattgtcaattacatctattctttccttagaaaaaactgtagaaatggcgagaagatgttgtctattcctcgcagccaagtactaaaggttggaatcgcatatgagatataagcatatgggtaattttatcattcttgagaaagtatttagagttaccatatttttcagtgtaaaatttagtactccaggtactaggtacctcgaggtaccaattttaatgtaaatttggtacctctaggtactttctggagaactgtaaaatttctgtaagcacatgtataagacacagatggtagttgatatttctcacataataattttctaatggatgttttaatgttcatgtgaatagaggagaatgattgattgtagttttattaaacgcc

SEQ ID NO: 18458 - DNA, 1328 bp, Oryza sativa
  ref <308>: DATABASE ACCESSION NUMBER: AK068854
  ref <309>: DATABASE ENTRY DATE: 2001-12-06
agagagctgaaaaattcatccactattagccacttttacgcatgtacaattataccacttaccaccggtgaaaaagagagatccagtgcgctcacggaaagcggccgaggcgtgttcgtctgctcatcggcttggcggcgtcggcggcgagctcgccggcgtgcggtgacgccacctcggacgtgtccgggctggacgcggcggcggcggcgtgcggccggctggtggcggtgacgccgccgaccacctcgccggccgtgtcgtcgtcgtcgccgccgctgctcgagctgatggatgggttcaccccgtactcgctcgtcgcctcgctcaggtagccgctgtcggtgacggcgccggtgccggtggcggtgacgccgctgcccggtgggaacgcgaccctcctgagccgccgccgcaccagctccgtcatgtcgccggagtgctcctgcgagcgcagcgagctctgccccggtgcgacgccggcgttcaggtcatctattgacagctccccctccaagtatctcacaatctgctcgtccattgcaagaacagaaaaaaagaactcaggtttttgggcaaaaagtcaataagagaaacttgtttctttggtcgtttcgcaagttgcattgcacagcagggagataattctaataattaaatatccatatccacctttttattatatatcaactaaataattatataaaaataattaaagaaaatgataaaatagattggcatgagatatatcaatccaattcgacttcacaagttattgtttttattacaacttgtagaagtcaaaattttaatttatatattgatgaagtaatatatcatatatcaattctatctaattatttttttaaaaaaaaataataaccattttagttgatatgtaacaccatgacattttattcttctccaagggaggctcacctgggtcatgcgagggcgggagcgtgccgtgtgccgcaccgcggcggcagcgcaggagatcagccgatgcatgtcgtgggcgtcgtacaaggcgtcaagccttggatcgatcagatcgtcgtagacatgctgctctagagcttttgtcagctgaggccttgcctgcatcgtccaaaacataaaagaagaacaaatttagtagtccttacagttacagaataatcagccattagttaacgagatgtaacgcgatgctgtcactgaatccacaatatatatatattttttaaaaaatgaagtcagaagtcagaattggattgtactatgacactgtactagtctgttgaaaatctgatagcaagaagtggacctgcaggggttaagtttcg

SEQ ID NO: 18459 - DNA, 1672 bp, Oryza sativa
  ref <308>: DATABASE ACCESSION NUMBER: AK068855
  ref <309>: DATABASE ENTRY DATE: 2001-12-06
gtgggtcaaaaacatcgcgttatccttccctcctctcgcctcggtggtgtgcgtcttccccacccacccccagtctccaatagccacctcccacctcctcgccgccgcctcctccaccgccgcctcctccgccaccttccgccctcccctcctcagcctccgctccccgccgccctcttctctccgcctcaaccgcaggcgccacttccaggtggtccgcgcggccgagaccgacaaagagacgaaggccaatgcgcccgagaaagctcccgcgggaggctccagcttcaaccagctgctcggcatcaagggcgccaagcaagagaacgacatatggaagattcgccttcaacttactaagccagtgacatggcctccgcttgtatggggagtgctttgtggagcagctgcctctggaaatttccactggacagttgaagatgttgcaaaatctattgtctgcatgataatgtctggtccatgtcttacaggatacacacagacaattaacgactggtatgatcgagatatagatgcgataaatgaaccttaccgtcctattccttcaggcgctatatcagaaaatgaggtcattactcaaatttgggcactgttgttagcagggcttggcctgggtgctctgttagatgtatgggcaggacatgattttcctattattttttatcttgctgttggtgggtccttgctttcttacatatattcagctccacctctgaagctcaagcagaatggatggattggaaactttgctcttggtgcgagctacattggcttgccctggtgggctggccaggcattatttggaacccttactcctgatattgttgtcctgacttctttgtatagcatagctgggctagggattgctattgtaaatgactttaagagtgttgagggagatagagctctggggcttcagtcactcccggttgcttttggtatggaaactgcaaagtggatatgtgtaggagcgattgacataactcaattatccgttgcaggctaccttttcagttccggcaagccttattatgccctggcactgctaggactcacaattcctcaggtggtctttcagttccaatacttcctcaaggaccctgtgaagtatgacgtcaaataccaggcaagcgcgcaaccgttcttcgtcttgggccttctggtgaccgcccttgcaaccagccactgatgaaagcagcaatcgccctggactgtgattctgtgacagcgaagttttgggtggaagatgcagattgatggttctctgcaactgttggtggagctaggttcagcagctatgttcgcgagtgtattagcgctcttttggcggtgctgggtagtagaatgtagaatcgtttcttgttgattccctgaactgatccagatcaaacatcttctaaaggttctgcgatgcaatgctagctgcagacgggagatggtacagggggtcgttttgctactttgccgccgatgttgtagggtgtgtagacagactgtagatgaataatgtcagtaacacctgtggggggttcagtgctagtgggctgcaaaacttgagcactgcttcgatcaaattgtgtctttgattatgaaattatggaatccagcacaggcaggtaataatttcgtaatagagcataaacaatttgtg

SEQ ID NO: 18460 - DNA, 1331 bp, Oryza sativa
  ref <308>: DATABASE ACCESSION NUMBER: AK068856
  ref <309>: DATABASE ENTRY DATE: 2001-12-06
ggcttgccattcccggccattccaatccactcccaccaccaagcgcgagctcgattatttttttaatcgattttctccgatttaatccgtagaaaattccccactcctcctcctcctccaccgccgccgccgacgccgcactcctcactccgcagaagcaacaccaacgccgcactccaacgccaaccgcctccgcgcgcggcccgtcgccatcgtcgagcaccttcacgcttcctcctcccccgcacggaacggagacccctagcgccgctataagagggagagaggtgggcgggactcatggcgcccgcggcagcgtcgctcacggcccccaacgcactcgcggcgacgtcgttgcccttcttgcacggaaggaagagcggcggcggcggcgtgtccgtgcacgccggggcgccttcgccttcgcgggcggtggcggtggtggcgcggaggttgtgggggagcgctagcagtagcaggaggatggtggtggcggcggcgacggcggcggagatggcgcccgcggcgagcggggaggaagggaagccgttcgtggaggagatgagggcggtggccatgcggctgcacaccaaggaccaggccaaggaaggggagaaggagccgcaggcgccgccggtggccaggtgggagccctccgtggacggctacctccgcttcctcgtcgacagcaagctcgtcttcgagacgctcgagaccatcgtcgaccgcgccgccgtcccctggtatgctgagttcaggaatactgggttggagagatcagaacaactgaagaaggatctggaatggttcaaggaacagggtcacacaattccagaaccatctgctcccggcactacatatgcttcctatctggaagagctggctgaaaaggactcccaagcttttatctgccatttctataatgtgtattttgctcatacggctggaggccgaatgattgggaagaaggtctctgagaatattctgaacaagaaggagctggagttctacaaatgggagggcaatctgtcccagctgctgcagaatgtccgcaacaagcttaacgaagtcgcctctagctggacccgggaggagaaggaccattgcctggatgaaacggagaagtcgttctcgtattctggagatctcctccgtcacatattcacctaagcttaattgatcacggtgtctgctatctagtcttgataaacgctgtaaatactaaagttcacgtcagtcagacagactgttactggacactgggcagaggtcatttacttactcaaccagttggccttgcctcccatcaaattgccaaattctaataatcc

SEQ ID NO: 18461 - DNA, 2172 bp, Oryza sativa
  ref <308>: DATABASE ACCESSION NUMBER: AK068857
  ref <309>: DATABASE ENTRY DATE: 2001-12-06
gtcaggggtggtggaggttatgggaagaagtggcaccaagatggtgcacgtacaaaaaagatgaattctatatatgattttatctcttgtggtgagtttcttcttgagaagggtatcataaaagaaaataaacttgctggatggggatatagtgctggaggacttctggtggcttcagcaattaatactcggcccgatttgtttcgtgctgtcgttttgaaggtccctttcttggatgtttgcaatactcttctccaccctattctacctcttacagctattgattacgaagagtttggatttcctgtggaccatgaagagttcctttcaatcaggaagtattctccttatgataacatccagaaggatgttccttacccagcagtgtttgtgacatcatcatttaatacaaggtttggtgtatgggaagcagctaaatgggtcgcaaaagtccgagaagttactcgctatgatccagagcggcctgtaattctcaacttgacaacagatgttgtagaagagagcaagtatttgcaaaccaaggaattagcattggagactgctttcctaattaaaatgattcatgatacatgaacatcttgtttatctctttgaatttaaactcattgcccaaagatggggagcacatgttacaatgtcaggcctctcttttcagcaatagtctggaatcaactgattggagattatctgaggtaccacacttctatttcgtacttttttttttctcagaatgtcctgggggaaaatcatatgtgcatatccctacagtttatgagatagttgcacgctcacaattcatcagtctcagttatatggtctgatgatttggaagccaaaattcctgtctactggagatcgtctgactctgatcaagtctgtcctgtttgccttgccggtgcactacctctcggtgcttgagctgccacagtgttcgatcaaagagattaatagaaagtgtcgggggttcctgtggaaggggcaggaggaggtgagtggcggacattgtttggtggcttggaaagcggtttgtatgccgtttgaaaagggagggttgggtataaaaagcctggacttctttggcaaagcgcttcggctcaagtgattggctaagaagggtgagcagcaagaccggccttggacaacagttgcgactgtggagccgaaagatctgagagacctctactactcagcatcacggcaagaggtaggagatggaaaaaacacgaagtttcggcttgcggactggttgccaatgggaagcataaaatcgaggttccagttgattttcagccatgtggaacgcaccggcttgactgtggctcaggggttgaggaaccacaggtgggtgtgtgacatcaaaggtgcgccatctaatcgagccatcggggagtattttcagatttgggatgcagtccaggaggtgcaggtgcaagggggagaggaggatgtgactgtttggaagagggctgcaaatgggaagttcacccctgcttcggcttacgaactgttcttcatggcaaatacagaagcgagatgtggcagtctgatttggcacactagagaaccttccaaagtgaaattttttatgtggttggccgagagggaggtgtctcacggccgacaatctcaccaagcgaggatggccacaccaacaatcctgccccctctgcatgagcaatgacgaagattgcgagcacctctttgtctcctgtccttacacttcaaatgtctggagaaagatcaagggttggatcggtgccgggttccagctgccggcagagctcggattggaccttggagattggtggttggagtggtggcaggtctttcaaaccagccagaggagcgcatttgacactttagtgctgctggtctgttggatgatttggaaggaaagaaacgctcagagccgaacagcggggttcctgtttggcgcaattaaagatgaagcggcaatctagaaagaagctggggttttcaatgttttaggagagtaacaaccttctgtaacttgtttttcttttaggaagttgctgcgatggcaacatcctttcacttcgacagcctcttgtcgaagtctgaaacttgtatatgtgtaaataccccttttcttaagtaaatttggtccgcctatcttaggccggcctggct

SEQ ID NO: 18462 - DNA, 3104 bp, Oryza sativa
  ref <308>: DATABASE ACCESSION NUMBER: AK068858
  ref <309>: DATABASE ENTRY DATE: 2001-12-06
ggcgcgccaaacttgctccaaatcgaagtattattttctctcgcgatttctccgatttttttttctagcgataaattaattaatgctcctctcgccgcgccgggaaagcatttaaatctccccctcctccgcgcggttctcccaacccaaaccctaccacgattcctccccactcccaatccaatcgccgcggcggaggcggcgggcgcgcgtgcacaccaggtgttcgacggaaggcctcgccgggtggggggcgaagatgtacgtggtgaagcgggacgggcggcaggagacggtgcacttcgacaagatcacggcgcggctgaagaagctcagctacggcctcagccaggagcactgcgacccggtgctcgtcgcgcagaaggtatgcgcgggtgtgtacaagggcgtcaccaccagccagctcgacgagctcgctgccgagactgccgccgccatgaccgcgtcccaccccgactacgcctcgctcgcggcgaggattgcggtttccaacctgcacaagaacaccaagaagtccttctcggagacgattaaggacatgtatggacatttcaacgagagatctgggctgaatgctcctttggttgcccacgatgtatatgaagtcatcatgaagaatgcttctcgcttggacagcgagataatttatgatagggacttcgattatgattattttggtttcaagactctggagaggtcttacctcctgaaacttggcgggaaggttgttgaaaggccgcaacacatgttaatgagagtttcagtaggtatacacaaggatgacattgagtctgctatcaagacctaccatctgatgtctcagcgctggtttactcatgcttcaccgacccttttcaatgctggcactacaaggccccaattaagcagctgtttccttatctgcatgaaagatgacagcattgagggaatctatgatactttgaaggaatgtgctgtcataagcaaatctgctggaggaattggtgtatcagttcacaatattcgagctactgggagctatatccgtggaacaaatggaacctccaatgggattgttcctatgctacgtgttttcaatgatactgcccgttatgttgatcaaggtggaggcaagagaaagggtgcatttgctgtgtacttggagccttggcatgcggatatttttgagttccttgatctgagaaagaatcatgggaaggaggagcatcgtgcaagggatcttttctatgcactctgggttcctgatctattcatgcaaagagtccaaaataaccaagaatggtcattgttttgtcccaatgaagctccagggttagctgattgctggggtgatgagtttgagaaactgtacacaaaatatgagagagagggcaaggcaaagaaaattgtcccagctcagaccctctggtttgacattttaaaggcacagatagaaactggtacaccatatatgctttacaaggatacatgcaataggaaaagtaaccagcagaatttgggcacaattaaatcttcaaacttatgcactgagataattgagtacacaagccctactgaaactgctgtctgcaatctggcatctattgctttaccacgttttgtaagggaaaagggtgtccccatagagtcccatccatctaaacttgtcgggagcagtgattctaaaaatagatattttgactttgacaagcttgctgaggttacttcaactgtcacatacaatctcaacaaaataattgatattaattattaccctgttgaaaccgcaaaaagatcaaatatgcggcacaggccaattggcattggtgttcaagggttggcagatactttcatattacttggcatgccatttgattcaccagaggctcagcaattgaataaggatatcttcgaaactatttactttcattctctgaaagcttccgctgagcttgctggtaaagaaggtccctatgaaacatatgaagggagccctgtcagcaagggcattctccaacctgatatgtggaatgtagttccatctgacagatggaactggccatctctacggagtactatttctaaagttggattaagaaactctcttcttgttgctccaatgcctactgcttccactagtcagattcttggcaacaatgaatgctttgaaccttatacatctaacatatacagccggcgggttctaagtggggagtttgttgtggttaacaagcatcttctccatgatttgactgaaatgggtgtttggactccagctctgaaaaataagataatttatgaagatggttctgttcaaaagatgacagtgatcccagatgatctaaaagcaatttacaaaacggtttgggagataaagcagaaaacgcttgttgacatggctgttgatcgtggatgctacattgatcagagccagagtcttaatgttcacatggaacaaccaaactttgggaagctgacttctctgcatttccatgcttggtccaagggcctgaaaactgggatgtattatctacgaacacgagcagctgctgacgcaatcaagttcacagttgatactgcccttttgaaggccaatggagaaaacggcaccaaggctgcagaggaagaggacgtggaagctaaaatggctcaaatggtttgttccttgaacaaccgggaggagtgcttggcgtgtggaagttagatgcttcactacacagttaaaatctatttttaaccaagacgacaccattatacaactggctgatcatttggtctcaataactgaaaagggagcccttcgtgtagtttgtatgagctgatttccatactggggggtagtggggctcccctgtctgctgaatttcatctttggcttgtactgtaacatcaaaattcttgggttactgcaaatgtacatatgtgttactgttaacgttattgacgtgtggtgttgccatgttggcaatggtactttgggtttgggagtctcatggttttgtatttgcttttgcgttatcattttttgatgtggtacgagtggcacatctttggctgtgtgatattttcaatttgttactgtaatggaatttatcaggagctgc

SEQ ID NO: 18463 - DNA, 1012 bp, Oryza sativa
  ref <308>: DATABASE ACCESSION NUMBER: AK068859
  ref <309>: DATABASE ENTRY DATE: 2001-12-06
gaaagaaaccaacggcaggaggagggagacacctcgaggaaaccacagcacccaaagaacaagaaaggcgataccccttctcccaccaccaccgtttccgtccatctccatcctcaccgccggcgacgctcacctccgacgaccgatcggcgacctgcttcagccatggcaatggcttacaagatggcgacggaggggatgaacgtgaaggaggagtgccagaggtggttcatggagatgaagtggaagaaggtgcaccggttcgtggtgtacaagatcgacgagcggtcgcgcgccgtgctggtggacaaggtgggcggccccggcgaagggtacgaggagctcgtcgccgcgctgcccaccgacgactgccgctacgccgtcttcgacttcgacttcgtcaccgtcgacaactgccagaagagcaagatcttcttcatcgcctggtcaccgaccgcatcgaggataagagccaagattctgtacgcgacgtcgaagcaagggctgaggcgggtgcttgacggggtccactacgaggtgcaagccacggactcctccgagatgggctacgacgtcatccgaggccgcgctcagtgagctgagctcctccggcgccggcgcgccgccgcgacgcgacgagtcgcgggcgggcttgcggcgctgtacttagcacgtactcacccccagtgtgtgtggtataatcggacggatgctaattggctctctcgttctcgtagtagggcggctgatgatgcgatctgacgagggtttgtgaatttggtttagagtttggcgtggcgtggcgtgctgtttcgtttggagagttggaggggtgtgtgtagcgtggcgtgttgctgagggagtggcagcggattagtgaaacgtcccatgtcggtgacgtagaaattccactgatgatgctccacttggttgattaattgttccaggaaacatgatcggggtgcttcaaaattttgttcgcctgctggaataaaaggacacttgacactcc

SEQ ID NO: 18464 - DNA, 3772 bp, Oryza sativa
  ref <308>: DATABASE ACCESSION NUMBER: AK068860
  ref <309>: DATABASE ENTRY DATE: 2001-12-06
gaggataaaccgctaatccccgtcgtcctccctctccgccgccgccgccgccgccgcccctctgctggcttccaacctactctccgccggcctgaggctgcggctcccctgcctgcgcgccaccgtcaggaaaatgtcgtcaaatcctgatggaggcagaagttttgctcggagagatcaattactcaatatccaatcagatgttcacaagttatgggaggagggcaaggtttttgaggctgaacctgggagtaagccaccaggccctggggaaaaattctttggcaattttccatacccttacatgaacggcttgctacatttgggccatgccttctcattgtccaagcttgagtttggtgctgcataccatagactccgtggctcaaatgtccttttgccttttgctttccattgtacgggaatgcccatcaaggcctcagcagataaactgtcaagggaggctcaacaatatggatatcctcctgtgtttcctgaattagactcaagtattgaagttgctgatgatagccagcctgaccagggggtttctgttgccccagataaatttaagagcaagaaatctaaggctgcttcaaaggttggcttacagaagtttcagtgggagatcatgagggggtttggattgtcagatgaagaaattgctaaattccgggacccttaccactggttatcttacttccctccattggcaaaggaggacctcaaggcctttggcctgggttgtgattggaggaggtcgttcataactactgacatgaacccattctatgatgcttttgtccggtggcagatgagaaagctgaagaaaatgggcaaggttgtcaaagatatgaggtacacaatctactctccattggatggccaaccttgtgctgaccatgatcgagcttcaggtgaaggtgtacagcctcaggagtatgtgttaattaaaatggaggtggttccacctttcccacccaacttgaagaccttggaaggaaggaaagtttatttggcagcagctaccttaagacccgagacgatgtatgggcagacaaactgttgggtattacctgatggaaaatatggtgcttttgagatcaatgacaccgatgtcttcgttctgacatcaagggccgcccttaatcttgcataccagggtctatctaaggtcccagagaagccaacttgcttagctgagctatctggcaatgatctgattggtttgcccttaaagtcccctctttcttttcatgacgttatatacgcacttcccatgctcactatcttgacagacaaaggcactggcattgtgactagtgtgccaagtgattctccagatgatttcatggcactacaagatttagtatcaaagccagctttgagacaaaagtttggagtcaaagatgagtgggttcttccatttaagattataccaataatcaatattcctgaatttggagataagtcagctgagaaggtgtgccttgatctcaagattaaaagccagaatgacaaggagaaacttgcggaagctaaaaggatgacatatctcaaaggttttactgatggaacaatgattgtaggggagttcaatgggagaaaggttcaagaagcaaagccactgataaagaagcagcttttggaagaaggcacagcggtgctgtatagcgagcctgagaagaaagtcatgtcaagatctggtgatgagtgtgttgttgctctcacagatcagtggtacattacttatggtgggactgaatggaagcagaaggcagtcaaatgtttggagaagatgaatacattctcggcagaaacccgtaatggttttgaacacacattaggctggctgaatcagtgggcttgctctcggtcttttggcctaggtactcgcattccatgggatgagcagttcctcgtggaatctctttctgattccaccctctatatggcatattacacaattgctcatcttttgcaaaatggtaacatgtatggtaaggaaatattttctattagaccagaacaaatgacagatgaagtttgggactatgtgttctgtgatggtctggcacctactactgacatacctccagctctcttgagtaaaatgaagcaagaattcgagtattggtatccctttgatattcgggtgtctggcaaggatcttatccaaaaccatctgacattcagcatttacaaccatacagcacttcttccggagcatcattggccccgtggcttccgttgcaatgggcatcttatgcttaattctgagaagatgtccaagtccacagggaatttccgtactcttcggcaggccattgaagaattctcttctgatgccactaggtttgcccttgctgatgctggtgatggtatggatgatgccaattttgtctttgaaacagcaaatgctgctattttgaggcttaccaaagaaattgcatggatggaagaggttatagctgctgaatcttcccttagaactggacctccctctacttatgctgaccatgtgtttgctaatgagattaacattgcggtgatcgaaactgagaagagctacaatgccttcatgttcagagatgcccttaagttggggttctatgacttacaattggctagagacgagtacagactttcttgtggagcagcaggcatgaatcgtgatttgttgtggcggtttatggaagttcagactaggcttatcacccccatttgcccacactatgctgagcatgtgtggcaaaagatcctgaggaaggaaggctttgcaataaaagcaggctggccagttgcaggaagcccagatcctactctaagaattgcaaacaaatatttacaggactctatagttaaattcaggaagctgctccagaagcaagaatccggttccaagaagcccaagaagggagctgctgcacctcctccatctgaggaaaacaagctgactgttggtctgatctatgttaatgaacactattatggatggaaagagcaatgtctgagggtgctccagtctaaatttgacagccaagctcggtcctttgcccctgatgaggagattactgaagcactgaagaattgctccatcgggcaggaaactaatttcaaacaagtccagaagctctgcatgcctttcatcaagtcgaaaaaggatgaggccaagagtgttgggccccatgctttaaatctgaagcttccatttggtgaaatgaatgttctcgaggagaatttggagttgatcaagaggcaggtaggccttgaccatgtagaggtcttgtcagcttctgatgaagcaactcgtgctaaggctggtgctcatgtttcaatgttggacaagaccccgccttctcctggtgaaccagtagcaatcttcatcagcaagcaggagtttgaagcccagcactgagcttaagtcgcagaatgaattgtttacaggaactctcgtgatatttttgtcattttcatggacatattaaactgttatattagcttgcggcttctgcaatactgcagtatttgcggaaaatgaacaaatttgttcttccctgtaacagagtgatgatcttgcaatactcccattttgtagaatgtttaagctacttattgtgtcacttatttgcagtgcactcgtttttagttaatagctagtaacttatttgcatgaattttttggtcacaaattttagcctcttcattgtaaacattctggagacttccatgtttatatgtgaactaatacttattatcagggctccatccc

SEQ ID NO: 18465 - DNA, 852 bp, Oryza sativa
  ref <308>: DATABASE ACCESSION NUMBER: AK068861
  ref <309>: DATABASE ENTRY DATE: 2001-12-06
gatccatcgatctccccccaaccaaaaatctctctctcaatccatcgatccattaattcacaagcttatcgaatcggggatgaagcacccgaggcaggaggaggaggtgtcgctggcgctggcgctgagcacggactgctcgtcgacggcgtcggactcgtcggcggcggcggcgggcggcgcggcgaggaggaagagggcgcggcggaggagcgtggtggcgacgtcgggggaaggggagttcgtgtgcaagacttgcagccgcgcgttcccgaccttccaggcgctcgggggccaccggaccagccacctccgcggccggagcaacgggctcgacctcggcgccatcggcgacaaggcgatcaggctgcacagggcggccgacaaggagcacagggacaagcacgagtgccacatctgcggcctcggcttcgagatgggccaggcgctcggcggacacatgcggcgccaccgcgaggagatggccgccgccggcggtggatcctccgccgacgactgggtctggcgctgcgacgcgcggccggaggggatcgccgccgagccaccggtgttgctggagttgttcgcctagttaccgctggtctccattagtttcgtccaagttttgaactgacgcagtgtgtgtcaccattaattagttcatgtacatgtctagaaaaaaaaagtcaggttcatcgatcttgtaactatgataggggtttaatttttttttcattagcgtttgggttgttcggttttgaatcggtcagtttttgaaccgtttggtggagatttgttgagttcagatgtatatacacacacagatgtaatataattctttcattcatagcc

SEQ ID NO: 18466 - DNA, 1289 bp, Oryza sativa
  ref <308>: DATABASE ACCESSION NUMBER: AK068862
  ref <309>: DATABASE ENTRY DATE: 2001-12-06
gtgctcaggcagcagcagaaagcaacgccaatacgccattgccgtgctccttgacctgcatgcacctctgttcttggcgttgagatacatagaggcttggggtgggtgtttaagaactaagaccggagttaattagcacccctgtggctaccatcgatctgtctaaagagtgattagatcgagatgaccatcaccattgagcagcctcaccttgatgctatcgccgaccggaaggtcgccggcggcggcggcggcgacaacgcggcggagctcgtgctcgacggcggcttcgtcgtgccggactccaacgccttcggcaacgccttcaggaattatgaggccgagtctgagaggaaggagacggtggaggagttctaccgggtcaaccacatcaaccagacatatgatttcgtgaggcggatgcgggaggagtacggtagggtggacaagacggagatggggatctgggagtgcatcgagctgctcaacgagttcatcgacgacagcgacccggacctcgacatgccgcagatcgagcacctcctccagaccgccgaggccatccgcaaggatttccccgacgaggactggctccacctcactggcctcatccacgatctgggcaaggtgctgctgcatcccagctttggggagctcccacagtggtcagtcgtcggtgacaccttccccgtcggctgcgcattcgacgaatgcaacgtccacttcaagtacttcaaggagaaccctgactacctgaacccaaagctcaacaccaagtttggggcctactccgagggctgtggccttgacaatgttctcatgtcctggggccatgacgactacatgtacctggttgccaaggagaacaagaccactcttccttctgcaggcttgttcatcatcagatatcattcattctaccccctgcacaagcatggagcctacatgcatctgatgaacgatgaggacaaggagaacctcaaatggctgcgtgtgttcaacaaatacgacctgtacagcaagagcaatgagaggatagacgttgagaaggtgaagccctactacatgtcactcatcgaaaagtatttcccggccaagttgagatggtgaagaagagggagagaacataaaaaaaattggtcgaaattatcctgtaatatgatgtaattgcaggagttcagttggctgtacaagtatgtagtagtacgtgtacacattttgtatgttaagagcagaatttgttgggagccatgcacgtggaataaaagttgccggtgattgttctttgc

SEQ ID NO: 18467 - DNA, 915 bp, Oryza sativa
  ref <308>: DATABASE ACCESSION NUMBER: AK099073
  ref <309>: DATABASE ENTRY DATE: 2002-08-28
gagagtgcgctcgtctcgtcgtctccgatcgaccaaaccagcgaaaccaccatccgccggcaatggcagccttgctccaccagacaccactccagccacctcaaaccaccacgagaccgcacccgtggacgcacacctccacaaccaacctctcgccgcctcacgtggcactcccccagcgacggcgagccccactccggcggctacaagccgccggcagcggcggcgccatcggctcctccgccgtcacggacaccgagagcaccaccacagccaaatcgccttccaagaagaagagccgcaaggagaagcagcggatgcggcggcaggagaaggagcaggagcagcggcagatggtgctggaagcgctggacgtcaagagcggcggcgaggtggacgaggacgacgacgagctgccgcagacggtgttcgaccgcatcctccgccggatcatgttcatggtcggcgtcccgatggcgtccggcgtcgggctgctcaacctgtacggcgcgctggagcgcggccggggcgtcgccgtgccgtcgtggctgccgctgctgaccatcctcgtcaccttcggcacgtcggcgctggggatcgccttcgggacgctgtcggcgagctgggacccggagaaggaagggtcgctgctcgggctggaagaggcccgagccaactggcccgtgctgtgggaggaagaaatcgagaaggccaagaagaagaaatgactgtacattgatgctaaattgctactagtagaaagtacagtagagcactgaaaatatgtgtaccttgccagttcagtgtggtatatactacatttcgtaatgaggggattgattagttcttggttaatccgcaattgcatgtagatatgctataaattttcacagcaagtaacactagttgtctttg

SEQ ID NO: 18468 - DNA, 1929 bp, Oryza sativa
  ref <308>: DATABASE ACCESSION NUMBER: AK068863
  ref <309>: DATABASE ENTRY DATE: 2001-12-06
gtttcgagacggagacgccgcctgcctaatctcctcgactcgatctttccttcccaggaggcggaggagggaggaggaagaggagctatcgcctctctcgctgacgcccgcaccacgacacggcgatagagacagaggtgggagatcggagatgaggaagctggtcccctcgccgtccctgccgacggcgacggcgctcgcgggtacgccggagatggctgccgtggcgctggcgctggcgctgcggggttggtgggaggaggtgaacgggtcgccggcgtggcaggacggcgccttcttctccctctccgccgcctacgcgctcgtctccgccgtcgcgctggttcaattgatcagaattcagttgcgagtgcctgaatttggttggactacccagaaggttttccatctgatgaactttgttgtaaacggagttcgtgctgtcgtgtttggatttcatgctcaagtgttcctttttcaaacaaaagtgtatactttggtgttattggatcttcctggtcttctatttttctcgacatacacgctacttgtgctgttctgggcagaaatataccatcaggctaagaatcttcccactgacaagctaaggattatatacatggcagttaatggtgttatatatgtaatccaggtttgtatttggatataccttgggacaaatgatagtcctctgctagagcctgtgagcaaaatttttatatcagttgtctcattcttagctcttttgggattcttaatttatggtggaaggctatttttcatgctgaggcgttttccgattgaatcaaagggccgcagaaagaagctctatgaggttgggactgtgacagcaatttgcttcacatgtttcttgataagatgcattgtggtgagtgtatttgatcccttttggcatgcaaatatttattgttaatagtacatcagacatacagtcacaaaagttatcactctatttaatgtccacatatcttatcttacccccacatttctttgatattttattttgtgttatgtatataattttatatttgtattaatgcaaagtaatgtcaaatttaacgaattaaattgttattaatgatgattaaatttgattatatcagaaatttcagacatgccaaaagtatacataataaaattatctcagtttttttttcttgtagttcagtttgattatgcacatgtctgattcccaaatgcaataaattgtcatctgattggttcagttcgattatgtcatctgattgcctttttttttactcgaaaacagcaggagaggctcctactgtattttctatttaaaagatccatacctttagcctttaagcctttagcagttgcagttcaatatgaggcacctttagcctttagcatccatagttcaaagatcctgcacaaaggggtgctgtcatattcccatttatcattatttttcccataaattcataactatacatcgcattaatacggtgataggtggcgatgtcatcatttgatcctgatctatctcttgaggttttggatcatccaatactggatttcttttactatatgttaacggagatactgccctctgctcttgtcctattcatcctccgtaagcttccaccgaaacgagtatcagcacagtaccaccctattcgttagaagggctggttttgtcgtcacaagcattccaaaaacttgtttcagagcgagaattgtgatatttgagctgagcttcaagtagttttgatgggtcatctatgtcatgcttctgatgtggaagaggtttttttgtcctctcctgacccatttttctgggctttatatttcttgagaccagaatattatcagatgatttatactttgttctgcctaacaaaacttaccgttgggagttaattacatcagtaacttataaatttg

SEQ ID NO: 18469 - DNA, 1393 bp, Oryza sativa
  ref <308>: DATABASE ACCESSION NUMBER: AK068864
  ref <309>: DATABASE ENTRY DATE: 2001-12-06
gaactgtccacacacatgcccgtcctgccatggctcgcggcggcggcgacgacgcccgtgcgccggtcgccgccgctccccgctactccgcgtgccctgctccgactgccggcctcttccttccctccctggagcaactgcgcgaagagcgggctcccgccgcgggggccattcgccaccgccgctgacacccccctcgggggttcgctccctgagcccgaggaggagcgcgacacgctcctcgacggcgcgctccgggccgcacgattccgcgacgaggagtcccgccgcccagatcctctttttattgacccatatgcagctgttctactttcacttgatgtggcaagtgaagataaagatcttctagctttacatttaatgccaagtgcagaacattataggctagtgaccagatatattgatgacaaattgcaacatttcataagcaattcagatgatcttagacagattgttctgttgacagatggaatggacactcgtccttacaggctaagctggccaaggttgtctgttgtgtatgatgtatcacctagaagagtcttcattactgcatcacagcaactcagaggagccggagcaaaaatatcacggaactgtgttgtacttcatacttcttcagagtctcctgacttgcaagcgggcttgaataaaaatggcttcaatgggaataggccgagcttgtgggtactgcagggtttacctttgttcacttttaaaagcttggaggaccttttgcttgtcattggcaatttagcaatgaaagggagtatctttataggggaggtgccacgttttacgcagtggggagcagcaacagacatggcctcagagcaagacaggctggaaaacctttcctttactcagggttttcgtgtcagctttgttcactatgaagaagtggcaaaggatgttggcttaggtctagactctccaccggaaatacatggtagagctatttttattgcagaacagctgcgtttctcagatgctcagatggagagcttccggatgcattttgaaagaatagaggatgatgccgatgaagacggattcgaggaactttagtccaatctatgatgcttgatggctcttgaaaaatgatgctcgatgtacttgaaacttgagaatgtttttgacttgtgtgggattgggaatataccctggaaagagagagcctgtaaatgtatgcattagattgtattcttcaaaacagatgtatgcattagattcttgcgagcagaaagtttccgtatggaaacatgtaataatcggcatgtttttctgtcaccatttatatggctatatgtttactgggatgtctcagatatctgtgattgccacatatttatgaatcaaatttcttacaaag

SEQ ID NO: 18470 - DNA, 2432 bp, Oryza sativa
  ref <308>: DATABASE ACCESSION NUMBER: AK068865
  ref <309>: DATABASE ENTRY DATE: 2001-12-06
gatcgcaaacactaccccaaaagcccccaaggacctcgctcgctcgctcgctctccacatcgagcaagagctagcaggaggagctttgatcgccaggcgccatggacgcgtcgatcggcgatccgaggctgacgtcggtggaggcggcgttcgagaagaacccgctgccgggcttcagctggctggtgacgccgcgggccatggccgtcgcggtgctactcgggatcgtcttctgcttcgtcggcatgaggatccagatgatgaccgggttcgtgccggcgctcaacatgcccgtcaccgtcctcagcttcttcctcctcaaggtgctcgccaggcagctgcagaagtggcgattgaccgtggtgcccttcacgcgccaggagaacatgttcctcatcacttgcgtcatcacctgccttaacctagccatcactggtggtttcgcaaccgctctcactggaatgggtactatagtggccaaaacacttgctgatgatctagatccaagagatattatcgactatataccaacaggaaaattgattatatactttttccttattggtatggcaggggtattgtctaatattccattaaaccagatcatgattatcgactaccaattactattcccaacaggatcggtcataggacaccctattaatagctttcacactcctgaaggtgcttatatagcaaaaatgcaggttatgactattttcaaagtattttttggtagtttttcttggtctatattccaatggttctattcttcaggcagtggttgtggattttcaagctttccaacgtttggactggaactatataaacgcagattctacattgatttctctgcaacatatattggtgtaggaatgatgtgcccacatatagtcaattttgggttacttttcggggccatcatctcttggggatttctatatccttaccttgaaactaaacatggggagtggtatcaaactgatagcccttcaaacttagacggactcaatggatacaaggtgttcatcagcgtgacactgatcgtcactgacggcctgataaactttctgatactcgtgacttcagctgcaattaacttctaccatataaggcaacagcaacagcagacgtcagggctggccagctacatcagcaagaaccctagcatgaactacgacgaacgcaaaaggatcgagatgttcttgtccagcaagatcccaatgttcgtgccggtggcggcctacgtcgcatggacggccatcagcatggtcgcgatgccggccatgttcgaccagatcaagtactaccacgtcggcgtgctctacctcgccatacccgtggtcggcttctgcaacacctacgcgacggggctcaccgactggtcggtgtcgaacacctacgccaagttctcccccttcatcttcgcggcgtggatcgccaggccgggcgccatcgtcgccagcctcctcgtcagcgggatcaccatggcgtcgctgcacgtctcgtcgcaggcgatgcaggacctcaagtcggcgcacatgacgctgacgtcgccgcgcgccatgatcgccgggcaggtgttcggcgtggcgctcagctccgtggtcagcccctgcatcttccgcgcgttcgagaaggcggcgaagcccggggcgccgctggggtccaaggactccgtctacccgtgcccctacgccgggctgtaccgcgccatctgcatcatcggcatgggaggggtgaagggcctcccaaagtactgcgtcgagctctgcgtcatcgccgtcctggtgaccatcgccatcgacgccctggtgctggtctcgcagctcaaggggtggaggctccacctctacatcccgagcatgacggtgatcgcgctgccgttcttcgccgggtcgtacttcaccctcgacatgtgcctgggcggcctgctgctgctcctctggaagaagatcgacaccatgagcgccgagatcctgtcggccgccgtcgcagcgggcttgatctgcggcgaggggctcttcacgctgccatcggcgttgctcaacatgttcaaggtgctaccgccgatgtgcatgaagttcttgcccagtggacaagaggttgaggtggtggactcattcctgaacagctcgggaggaacagtacccaagacatgaccgatcgatgttgagatcaagttaatatatgcactcatcaaattaagattgactgttagtactccttaattggttaccacatctcggtggaaattaagtggtctatgaatcattattgatcattgtaaataatgatgcacgtatcgtattttacatatatatatgtcatgtaattgacataagtagacatgtgagccagctttggttgcaacatgtaagagatgcttgttatagttaagtgccacagaataaagttgtagttgaaatatg

SEQ ID NO: 18471 - DNA, 1922 bp, Oryza sativa
  ref <308>: DATABASE ACCESSION NUMBER: AK068866
  ref <309>: DATABASE ENTRY DATE: 2001-12-06
ttgggacgcaacaaaagggaagcgcggcgaggaggaggaggcggaggcggaggcgggagggggcgatggtgaggcagggcgtcgtcgtcggcggcggcggcgagattacgcaggccggcagcggcagcggcagcattgccgggtcggcgaccgcgccggcggcgagcccccaccaggtggcagttgaaatagatgagcaaatttactccccagcatttggcaatattgttgtccctgatagtcgtggttgctgcagtggtttcacatccagtgtcacaagagtggtgtttatcttacacctccttgctttcattgccctcacaatcttccttggtgtccaggcctcttcccgacagaatcctacctacaagcctttcgccaactttgttcctcttgcctcctctgtcatagtatccataattgcaggttgcttttgggtcatccttgcagtcattaaccctccaaaagccatcaagacctcactctgggcagcccctgttcttgcactggcctgcgatgtagtcatactccttgttggcaatggggctgcacttggtattggagtgctcatagttgtagttgccattgccgtggcactatacagttgttgggccagtggtccacgtcttcagcatgccactgcagtgctttccacctctcttaatgcagcacatttgcctcctactgcttcctgcctagttgtctttgtcattcttgctgcatttggctatatgtctttctggacagtcgctatcagctgcattgctgctgcagaagggtacttcatgaactttaagatggcttatgtggttgcacttttggtgagcatggcatggaccatgcaggtacttcgctactttgtctatgtggctgtggcaaaactggcacatacacggcttgtctatggagtccgtatgccaggtggcaccgttgaagcattctgtggcacaatgatggggccatccttcggcgatatatgcatgggagctgtggctgtccctgttattgcagcagtgaggggctttgctcgagcaatcaatgctgtgactaagggcaatgatgagttctgccagggctgctgcttggctatatcagataaactgatgggacgggtcaaccggtggggttttgtacacgtaggagtgcgtggcaaggcattctgtgtggcttcgcgggatgtgtggtctcttttcgttctccgtgggatatcaaagctggttgattcagacctcactggttcattctgcttcctttctgctgtcacaggaggtgcattggcctcactagttgctggctcatgggcactagccatggataaagaacataaggagcttgctctgccagtagccatttattcatttctcatcggttattacatgtgccgaatgataattgcgtggccacaggcttgtgttgcaacatatcatgttgcatatgcagagaacccacagaaccctcacctggggacacttataccagaccatctgcgtgagctccaagcactagcaacggactgatctcgtaaaaatattcgccagcgtgacccttgcagagttgcgcattcttcccattatattgatggttcttcaattccttcagccattttttcagattcctgcatcagtgcagatatttctatactctgctgctgttgttgccgcttatgagtactgcatatgtacagcaaatttttgcgtgctcagttgtgtagatattgcattaaccaaaagaaagatattagatgatctgagacaccaagacatatagctgtagaggaaatagcacagtgaacacataaatagaatggatatattcattttcgtggataattgttgcttgccagttgcaggtgcatttgcagatgcggttgttgatgcttttgccgttaggctgtgcagaattaaagcatttatttgtcattg

SEQ ID NO: 18472 - DNA, 2472 bp, Oryza sativa
  ref <308>: DATABASE ACCESSION NUMBER: AK068867
  ref <309>: DATABASE ENTRY DATE: 2001-12-06
ggtttgcgtttcctccgcctcctcactccaattccattcgccttccgccaccaccacccttggctcctcccctccccgcggggcgcgcgacaaaccctagaaccttctagaggctagagcggtagagccatccgcgagggccccgggcgggctaggggcgccgcctacccgaccccgcacgcggcggcgatgccgctcttcatgtcggaggaggagctgcggctcttgggcggtgacgtggccgccgtcgccgagcgggccgacgccgccatccgcgagctccggcagcaggtggacaccgtccgtgccgaggccgacgcggcggccatcgcggcggagcagacgtgcgccctcctcgagcagcgctacgacactctctccgccgaggccgatcgcttccgggccgagctagccgagctcgcggctgcctccgagcgccgcgccgccgatctcgcctcttcccagtccgagatacaccagctccgcatccaagccattgcgaaggatggcgagattgaacggctgaaagtagaaatctcggaggtgcacaagtccaagtcgcagtcactggaactaattgagcagagggatgcagagataagggagaaggatggcatcatccagaactacctcgataaaatagtaaatctggcagactcttctgctagtaaaggggcaaggatacaagaagttgaagctaagtttactcatctgcaggccacatgtaaccgaattacgcaggagaaagatctgcttgaaaagcataatctctggcttgacgaggaacttaaagaaaaagtgaagaacttagctgaactaaggaaatcaaacatggatgaggaggctaggatgtcagcaaaggttgccgagcttgaaagagagacttctgaatcatccagttccttgaggcgaagcaaagaacgggtttctgaattggagcaaagggtatcatatatggaaaaggagttgtgctcaacaaaggatgctgcagctgctaatgaacaacgcctggctgcagagctttcaactgtcatgaaacttgctgaacttcacaaagaaagttctgaggaatggtcaaaaaaagcgggggaacttgaaggtgttattaaagcattggagacacatttgacccaggttgaagatgaatacaaggaaaagcttgagaaggagacttcagccaagagggaccttgaaatggaagctacctacttaaagcaaaagcttgaaaagtgtgaatctgatctggagaatacaaggaaatctagtgaattgagcttcactccattggttgcagcagacccttgtgatctagcaggctcaccgatgaaagaaatggcattttctgatccagcaaatcagaatgatctaatgattgtaccaaaagtacctactggtgtttctggaactgcattagctgcttctcttcttcgtgatggttggagtctcgctaagatctatgagaaataccaagaagctactgatgctttgcgccatgagaggtttggacgaaggcacgcggaagcagttctggagagggtcttgcatgaaattgaagagaaagctgagcttatcttggatgaacgagctgagcataggaggatggttgaagcttatgctctaatggatcagaagttgcaacaagcattgctggagcatgacaattttgaaaataccattaggaatctaaagagttaaaaaggcgggaacgtgatcatagtattgctcagaaagaaatagatgatctgcaaaaacaaatagctgtccttttaaaggagtgccaagatatacagcttcgttgtggttctagccttccaaatgtaggagatggtgctctttctacaagcacaagcactggagtgcctgaagttgaaaacaatatccatgagcatatgacattcaatgatatcaatgggttagtacagcaaaatgtgcaactccggaatcaagttcatttgctctctgctgatcttgataaaagggacatggaactcagggagagcttccaaattgagttgaagaagattacagatgatgctgcgtccagggttgagaaagtgatgaaaaaatccgaagaacaagcaataatgattgaatcccttcacagatctgtagcgatgtataggaagctgtgtgaagaacaacagaagtcacgttccaatgttgaacacatacccaaaaatttggaagatgatggcagaaaagacctgatggttctatttgaaggatcacaggaggtttcaaggaaagcttatgagcaagtttcagagcgtggcaaaagccttgatgaagagctgactaagttgaggactgagcttctatctttgcgttctgagcgtgataaggcggttcttgaagcagaatttgctcgagaacgacttaatggatttacagcagagcttgaacaccagaggaaggaagctaattctatttcgctaagaaatgcggaattgatgcatttagtagttgattacg

SEQ ID NO: 18473 - DNA, 1616 bp, Oryza sativa
  ref <308>: DATABASE ACCESSION NUMBER: AK099074
  ref <309>: DATABASE ENTRY DATE: 2002-08-28
ggtggtgacacgagccgtggccacctgaaaaacacactccgcccgcgccgcacctcctcgttgatggatttcagcgtccgagctcgcatccagagcccgcaccggtcggccgcccacttcgtcgccggcgaggggggacgccgccgcccggcaacgtccagggtatccttccgctccatggcgtcggccgcttccgtggaggagcctgccgctgctgcggcggcggcggctgagacgaagaggggaccgagcggcgcctccttcatccgggaacacctcaggagtctcgccccgtaccagcccatcctgcccttcgaggtgttgtccgctcggcttgggcgtaaaccagaggatataatcaagttggatgcaaatgaaaatccatatggtccacctccggaggtagctaaagcattaggaaatttgaagtttccctatgtgtaccctgatcctgaaagccgtcagttgcgtgctgctcttgctgaagattctggtcttgaatctgagtacatacttgctggatgtggtgcagatgaattaattgatttaataatgagatgtgtactcgaaccaggtgacaaaattgttgattgccctccaacttttacgatgtatgagtttgatgcgtcagtcaatggtgcacttgtgatcaaggtaccgagacttcctgatttttctctagacgttgcacagattgtcaaagtggttgaacaggaaaagccaaaatccatatttctgacatctccgaacaacccagatggcagcataatcaatgatgaggatcttttaaagatccttgatcttccaatacttgtagtgctggatgaagcatatattgagttttcgagtcttcaaacaaggatgtcatgggttaagaagcatgataatttgattgttcttcggacatttagcaaacgagcaggtttagctggacttcgtgtgggttacggagcatttcctctaagcataatcgagtatttatggagggctaagcagccctataatgtttctgtagcagcagaagtttcagcctgtgctgccttgcagaacccgacttatttagaggaagtgaaaaatctgctactacaagagagggacaggctgtacgatcttctcaaagaaataccattcctaaagccatttcccagccactctaactttattctctgcgaggtcacatcaggcaaagatgcaaagaaaataaaggaagaccttgcgaagatgggagtaatgatccgccactatgacaagaaggaactaaagggatatattcgtatttcagtgggcaagccagagcataccgatgcactaatgaaaggcctgaaagcacttcaactgtgatcatcccatctgtttgacggaagcactgaagcacttgcccgtggtagtgcactagatgcagtctctcaatggaggttgcatcaatctaacacaaataaggtgcatcctctagggtcgattatgtctcaataatacactcttctgttttgaccagtggcgttttgtccagcatttttgtgttggtcgacttgggtttcttctcaaggtgattgttcgaagcaagaatttgtactgccgtgccctgattggaataaatatgagcgtaaaagtatggc

SEQ ID NO: 18474 - DNA, 2066 bp, Oryza sativa
  ref <308>: DATABASE ACCESSION NUMBER: AK068868
  ref <309>: DATABASE ENTRY DATE: 2001-12-06
gtgagacaagagagagaaccagaggcggcttctcccctcccgcatctccctgatctcctcgcgtcgcgccctcccctcgaatggcgatacctcctccaccctcgcgccccaatccctaaccctagatccctcctcccacgctctctcgcgcacgaccaatctccctcttccttcctgtctctctccttctcgcactgctcaatctcccaattcattatggaggcgggggcggggagtagcagcgccaagctggtggcggcatgcgtcatcggcgggatcgtgctgggggcgtccgtggtcgcgctccacctcgccgggcccgtcgccattcccgccctgccgcccgtcgacgcgctccgccgcaggttccgccgcggacgccgacgtcccgtgcgcgtctacatggatggctgcttcgacatgatgcactacggccactgcaacgcgctgcgccaggcgcacgccctcggggacgagctcatcgtcggcgttgccagcgacgacgagatcaccgccaacaagggcccgcccgtcacgccgctccacgagaggttgataatggtccgtgctgtaaaatgggtgcacgatgtcattccagatgcaccttacgccataactgaagattttatgaataaattattcaatgagtataatatagattatatcattcatggcgatgatccttgtctgctcccagatggtactgatgcatatgctcttgccaaaaaggttggtcgatataagcagattaaaagaaccgaaggagtgtcaacgacagacattgttggaagaatgcttctttgtgttagagagagatcagcttctgatagtcacaaccactcttcactacaaaggcagttcagtcacgggcatggccagaaaattgatgatagtggatctggaagtggaactaggatatctcattttcttcctacatctcggagaatagttcagttctcaaatagcaggggtccaggtccagattctcggatagtgtacatagatggtgcatttgatctattccatgctggacatgttgagatattgcgcctcgctcgagagcttggagatttcctgcttgtgggtattcacacagaccagactataagttcaacaagaggaccacatcgcccaatcatgaacctccatgagagaagtttgagtgttttggcttgccgttatgttgatgaagtgatcattggtgctccatgggatgtttcgaaagatatgattaccacatttaatatttcgttggttgttcatgggacaattgctgagaatatggactttatgaaggatgatttaaatccatatgctgttccaagggctatgggcatctaccgtaggctggagagccctttagacatcactactagtactatcataaggaggatagttgctaaccatgaagcctaccagaaacggaacgagaagaaagaagccagtgagaagaagtactacgacagtaaaagctttgtcaatggagagtaacttaggaacaggtcttgcattaatgctattgcccagaagtttagttcacaaccttctggcacaaatgcagcggttagatgatccacaattttacagtcttgtggtaactattctcatgttgctgatatagctcaggaaacttcagatgctgatgatggtgctgacttgggtgatgctggagaccctattttcctgtatatggggctttgtggctgccaataccagctgtgttattttgagatgggtagttttttttttgttcaggattgttgtagagtatgaatgttaagcttgattaactattcctgatgctttatttcggagttgccaagtatatgtggcatcatcttatgagagtctgtcatgtggggaatgcactacgtccgcagggcgcaaggatcagcgacaacagcaaaacggcaaacagtagatatgcaggatttgttttcgtttgtttcagagtctgttaaagtttgttagtttgatctttatctctaagagtttgttagatggcattgtaatctttacttaaagggccagtatggcgcatggaataaacaagcaatcagaaaacc

SEQ ID NO: 18475 - DNA, 1301 bp, Oryza sativa
  ref <308>: DATABASE ACCESSION NUMBER: AK068869
  ref <309>: DATABASE ENTRY DATE: 2001-12-06
gtgtgcgtgttgctgttcagtgcaaggttgcctctgatctgcccaagcttgttgagggtttgaagcgtctggcgaagtctgatcctatggtgctctgtactattgaggagtctggtgagcatatcattgctggtgctggagagcttcaccttgaaatttgcttgaaggatctgcaggaagatttcatgggtggtgctgaaatcattgtttccccacctgttgtttctttccgtgagactgtccttgagaagtcgtgccgtactgttatgagcaagtccccgaacaagcacaaccgtctctacatggaagctcgccccttggaggagggattggctgaggccattgatgacggtcgtattggcccacgtgatgatcccaaggtgcgctccaagatcctgtctgaggagttcggctgggacaaggatcttgcaaagaagatttggtgttttggacctgagacaactggccccaacatggtggttgatatgtgtaagggagttcagtatctgaatgaaatcaaggattccgttgtggctggtttccagtgggcatcaaaggagggtgctctggctgaggagaacatgcgtggtatctgctttgaggtgtgcgatgttgttctccatgctgatgctattcacagaggtggtggccaggtcattcccacggccaggagggtcatctatgcttctcagctcacagcaaagcccaggcttcttgagcccgtctacctggtggagatccaggcccctgagaatgcccttggtggtatctatggtgttctgaaccagaagagaggacatgtgttcgaggagatgcagaggcctggtacccctctgtacaacatcaaggcttacctccctgtcatcgagtcctttgggttctcaagccagcttagggctgcgacatctggccaggccttcccccagtgtgtgttcgaccattgggacatgatgacctctgatcctcttgaagctggctcgcaggcttcaaccctggtgcaggatatccgcaagaggaagggtctcaaggagcagatgactcccctctccgatttcgaggacaagctctaaatttttggccgccgcatgtgttgtgccgttacccttacatgttctagttggtctactgctaagagaactgctttcgttgtcgtatttcatttcccttttgtcgaatgcatgtgtttcacatcaacaatcctatgttcgcgtgctactgagaaactatttttactctgtcgtgatgtaacggatgtggaacctggatcatctttttgctgtctaagttatagtgttcacact

SEQ ID NO: 18476 - DNA, 1284 bp, Oryza sativa
  ref <308>: DATABASE ACCESSION NUMBER: AK068870
  ref <309>: DATABASE ENTRY DATE: 2001-12-06
gagatgaagtatagcaagctatcctacagccagccacgctgcaccgaaccctccaatccttggaacttgaaccccttcaaatcacacccagtaggctactagtagtacttctctgcaccaattccatcgccaatagcagccactacaagtcttacatctctcctttcctcctctctctgccattgctaggagcttgcatttcttggtagcttcatcagctagctgctttctccctccccaatctctcattcttcaggccaggatatgaagattttcagctgggtagccaacaagatcagtgggaagcaagaagcaaatcggtttcccgcaaattcttctgcgccttaccgtgctaacgtgtcagattgtcgagaggatgaattcagtgattggccccaatcattgcttgctattgggacatttggaaataagcagattgaggaggtagctcaggtggagaattcatccgacaatgtgcagtcagtgcaagataccgtcaaatttacagaggaagaagtagacaagatacggaaagaattcgaaacgctactagcaatcaaagatcaagcagaagctcaacgctcgcatgatgatgaccaagtaggtttacaaaagcgtgccgatggggaagacaatgagaagcatattagacagttgatcaacaaaaggatcattgtaagtaaatcaaagaattcgttaggaaagaaaggaaatacactcaagccgagatcagtcgcttcgttgctcaagttattcatgtgtaagggtggctttacctccgtagttccagaaccaaggaacacatttcctcaatcaagaatggagaagttgctcaaggcaatattgcagaagaaaatacacccgcaaaattcttccacgctagttgctaagaggcatttggactggaagccagatgagacagaaatcaatgagtgcctggaggatgcactgcgtgatctagacgatgatggtgcaaaatgggtcaaaactgattcagagtatattgtgcttgaaatgtaaagttgggtgaatatgttagttcgttcatgccaggttccaaaggtcctggcaagcttggggtttatggtgttactacgtaatgatataaatatgggatatagttagcaatgaagctctatgatcatgtaatgctcctccattatttctgacatgaaccatctgtaatttgaatcatgataaggaggttctgggacaaaggcctattccatgtgtctactctcttctgccctgaaactgtaaagaacgcattcaattttttcaacg

SEQ ID NO: 18477 - DNA, 2148 bp, Oryza sativa
  ref <308>: DATABASE ACCESSION NUMBER: AK068871
  ref <309>: DATABASE ENTRY DATE: 2001-12-06
ggtgttctcgctactcagccgtgcgctctgcgccgcctcctcctcgccggcggcgccgcgggggagatctcttctcgccgcgctgctctccccgtcggctagccctctcgacccatgccggggccctgctgcgccggagccaccgaggcggcgggcgttccatggctcgccgagccccctggggttcaggtccacaccggcgtcgtggtccagcccggaggcgggggcggccgtcggtggggacgacgggctggaggtcgcgagcctggggatctcgccgtggatcgtggagaggctcgccgcacggggcatcaccaggctcttccccatccagagggctgtccttgatccagcaatgcaaggcaaagatatgattggacgtgcaagaactggaactgggaaaacgttggcttttggtattcctatcatggacaggattcttcgtcacaatgagaagaatgggagtggtagaaatcctttagccataattctcgcacctactagagaacttgctagacaagttgagaaggaatttaaggaatctgctcctttggactctctttgtgtctatggaggtgttcccatcagtcatcaaatgagagctcttaattatggtgttgatgttgtggttggaacaccaggtcgaattattgatcttttaagaagaggtgttttaaacctttctgagatccaattcgtggttctggatgaagctgaccagatgttggctgtgggttttgatgaagatgttgaggtgatcatggagaatttgccacagaaccgtcaaagtatgttgttctctgcaacaatgcccagttggattagaaaaatcacaagcaagtacttgaaagatccaatcattattgacctagttggtgatgaggaccagaaattacctgaaggaatctctctttattcaattgcctctgagcactatgggaagccatcaattcttggtccattgatcaaagtgagcactcttctgaatgtatgatgtgttttatagtttgcaccgttaacgactcttttctctacacttccacaggagcatgctaatggtggaaaatgtattgtgtttactcaaactaaacgagaggcagatagattagcatatgctatgggcaggagctatgcatgtcaggcgcttcatggggatatttcacagaatcagagagaaaggacactatcaggatttcgagatggccgctttaatatcctagtagcaaccgatgttgctgctcgtggattagacatacccaatgttgatcttgttatacattacgaactcccaaacacctcggagttatttgttcacagatctggacgaactgcacgagcagggaagaaaggaagtgcaattttaatatacacaaatgatcaagctagagctgtaaggatcattgagcaagatataggatgcaaattcacagagcttccaaagattgaagttgcagatgaggcctcagacatgtttaatgttgtgagagacaatcgctctagattagctggaagcccaagaaccggtggctcctctttcggacgaggaggctatggtggttttggagaaggccgttcccggagctttggtgattttgatggctttggcagttcccctaatcgtggtgggagatcacgcgatgctggttcaagatatggcagtgggtttggagattttagacgaccctccaatgcctttggcaggtctagttccaagcagcctgatggattcggatttggtgactttggagaaggcaatttcagtagaaatggcaacagacgctctaggagttttgatgattcaggttcgacacggtacagcagacgccctaatggttttggaacatcagatttcggcagatcaggcgggttcgatgattccaactgatcacaggactccggtttgtatagttttgtggtttttgaccttcaatcttcttttctatgtcatgaatgagatcaccaatcgctttttctggcgcttggcctaagtagtctgttgttgtagccaaataagtagccttgcttgtgtattaggtttgttccaaaacatgtaatgtatatactctagcctgtaccttttggttatgcactctctcaacaaagtgtaagaaaattctgaaaatgaggaacctttcattatttatgtcc

SEQ ID NO: 18478 - DNA, 1186 bp, Oryza sativa
  ref <308>: DATABASE ACCESSION NUMBER: AK068872
  ref <309>: DATABASE ENTRY DATE: 2001-12-06
gacggcaggacggcgagaagccgagaacctcacagcgccggccggaaacgcgggcttggctcgccgtcggcggcggtcggcggcgagaggcgagagcgagggcggtttgccgattcccgcgccgcagttcctcgaatcccgaattatcccttctcggcttctcccagctccaccaccggatccctctactctccacgggcggagagcgcgccgcgggagattcccgacgaggggatggccggtccggccgcgagcgcggtgcctctccacgcaggctcgactccgcttccgaggcgcaacccggctgcagtccgcggcctgatgagacctccgcttctgatggtggccaaggcgcagccttgcgttcttcgccggtttactccggccagccgtcggaaatgtgtggctgcgagaggccatgggcgtcaggagctccgcgccggccaataccagcttgatgacgatgagccgctgtggctggcagtggtcagagatatcacttggggtctgaggagcttcctggccttcttggctgagcagccgaggcagctaaagcacctggagtggccgggttttcgcaacacgttgaggacagcaacacttactcttatacttgtagccgtattcattgttgcgctgtcttctgtggatgctgccctttgctacatcctatcctgactgcttcggaaatcagcatagtttatgtcagggaatatttgcttattgttggagtctgattgactgattgggaaggataaaagcagcagtccagcagtaattttcaagctctatttgttgattgttcatgggctgaccctgcaaagttactatggaggagtaaatgatttttttgcgggctggagctagtgtcctaatgtagatggttattgtcccagagtaccttgtcatcctgagagggtcgaaagaaatttaagaaatgctgtgcagctgatattaatttatgtagttgcttactatagcaagttaatgcaaatcattttggttaaggaaagaagatgcagtgggtttcccagtcacttattttctttttgttatataaacagcgggtcagcggtatttggttgtcatgactcatgattaaacagaaacaaactcatcttcagtggtttgtaaattactatgggcaagcaaattgccaaataattttatttcgagcttgctgtgc

SEQ ID NO: 18479 - DNA, 2059 bp, Oryza sativa
  ref <308>: DATABASE ACCESSION NUMBER: AK068873
  ref <309>: DATABASE ENTRY DATE: 2001-12-06
gatctcctctactactcccccctcggctcggcgtcggctcccgtctcgcctcctcgcgagctcgcccgccgcctgcgccaatctctctccaccccgcgaccagggggcgccgccgcgccgtcgttcgcctcccgccgcccccgcatcgccatccccggtgagcatccaccctgtatccgttgccacggggggcgtcctctcctctctcgatggggttccctgcttctgttgccaacctggggaccaacgggaggcccgcggcgagctcatcgcatttggcttcgaggatcaggtttgctggtctgggcagtatccggcggtggcagtatgcgcctgggaggctgtgtagatgcatggttgtgaccaatttgatcgatgaagagaagggggttcagttctcgtcgagagggagtgtgagtgtgaagcctagtgatgatagcgatcttcttttgaagccaccgcagaagccaatccgggcgaatgggccaccggagagcgtaaatgcggcatcaccatctccgtcgaggccgacgttggaggatagggataaggttagggagtcattggatgaggtgttggagaaggctgagaagctcaaggcatcaacctctggaaatggaattggaaatggtgacttgaggcagaatggcgcgtcgaagcctgatagttcggcaacgccagcagcggagggtgcgaattcgaggaagacaaaaacacttaagagcgtatggcgaaagggaaaccctgtgtcaactgtacataaggtggtcagagatcatccacgctctgaaagtaggaatcagtctagttctacagcaaaaccttctatgccagctccaacaaaaccagtacctcctctactaacaaaaccttcagtagtagcaccaccacctcgtcggcctgtcaaggctgatacatcaaaggagaaaaagggacccatcctgattgataaatttgcttccaataaaccaatagtggatccagttgtagctgcagcactgatagaacctgtaaagccagtacgaggcccaccagcaaaagtcaaggatgatcgtcgtaaaaaaacaagcacaccagctggtcctcgccgacgaatgccaaaaaatgatggtttagttgatgaggatactgcagtgcgcaaggggaggagatggagcaaggcaaaacgcagagctgcaagacttcagcttgaggcttcacaagttgaagagccagttagagtcgagatccttgaagttggtgaagaaggaatggtaattgaggaattggcatatcaattggcaattgacgaatcagaaattctgcgatttttatctgtgagaggagctatgcttgacaatgttcagacacttgataaagatctggttaagatggtttgtatggaatatgatgtagaagtactggaaagtggtccagtgaaagtggaagagatggcaaagaagaaggaatttcttgacgaggaagatttggacaagttggaagacagaccccctattgtaactatcatgggccatgtcgatcatggaaagactaccctgttggattatatacgcaagagcaaggtggtggcatctgaggctggcggaataacacaagggattggtgcctatcaggttattgtacaggttgatggaaaccctcatgcttgtgtttttcttgatactccagggcacgaggcatccatcatacaacaactgcaggggaatcggagccaaatttatcatggcaagaaagaaagaaagacggggtgcattattgatcacattgctgttgttagcgaagaacaacaaactggttactcgatcgtaaatacgacgaacttatgcaagccatagtacagtagtcaccaaacctgagcttagccgtctcttatagcctgcatcagctgatgctgtattttgatgtacataacaagagaggagacagctgttacctttttttagtttgccactaacaggtagataagcagtgttgtctaattttacaccacctgatttttgacacaggatgtaattactctgtaatggtgacaccatcattattcaatcatcattcatgc

SEQ ID NO: 18480 - DNA, 2258 bp, Oryza sativa
  ref <308>: DATABASE ACCESSION NUMBER: AK068874
  ref <309>: DATABASE ENTRY DATE: 2001-12-06
gacacttcacacgccccactcagctcagctgcatgctgctgagtggctgggtggggtagtgaaaaaaatcatcgcgcgcgcgacgaagcagcagcgacgtctcggtgagtgacggtgagctcgatccatccattcaagaacgtacgtaggtgcggcggcggaggcggcggagctgatgaattccggcggccggagcctcctctcgtccccgctcttcgccagctcttccccggccttccgcggcggcgcccgccgccgcctcctgctcctcgtcttcctccccgtcctcctcctcccgcgccactgtggtgcccatggtgcacgacaccggcggcgggcgagcgtcgtcgacggcgtgccactactcgccgtcgctggtggcggcggagccggaggagcacgtccacggccgctccaaggacgacgacgacgacgccgccgtgtcgctcatgggcgagaaggccttgctggagctgctcctcgacatggctttggaacaacacgcaccagggaagaagctaccagctgaagagagggaagagagtgagttcgacatctatctgagagatgataaaagccatgtcctttaccatccagaattcagctctacatctgtgagttcttcaccattgtccgtaaaatctagcgaaagatcggatcttggtacagcttcagcggttctgacgaaggacgtggcattattagcagaagaaacagacattttagcaacccaactgaaagcatcgcaactttacagtgtggattcgagcaagtcaaatgaagaactgcagagcaagggtcaggtgttcgttagatcgacgaggttactcgagaggagatccaagcggcgttatgctcctcgagcatcgatcgctgatgtttcctgcagcgctgacaattcgaagaagaaagagaaatcaaagaagtatggcagagttcttgaaccagatgagcctttcaagctgttcctaagagatcgggagacgacggaattcctgacagcaaaagaggagagacatttgttcagtaaaatacagattcttatgaaaatagaggaggctcaccggaaactagaagttcaatgcggccgtgagccgacattggcagagtgggctgaggctgtagggatgagcagcaaggagctgcagtcctctattcgcaccggaagacggtgccgggagaagatggctcgatcgaacttcaggcttgtgattcatgtagctaggaagtatgaaggatatggtcttgacatccaggaccttgttcaggatggatgcagtgggttgatgaagacctttgagaagttcaatcccagcaaggggtgtcgattcccgacctacgcatattggtggatacgccaatcaattaagaagtcaatcttcaagaactcaagactaatccggttaccggagagtgtgtatgcgcttctgagaaaggtgggcaaggcaaggatggaatgcatcatggaaggggagcaacccaccaacgcgaacgtagcgaggcgcgccggcatcaccatcgagaagcttgcgaagctccgagcgaaaacccggaaaccccggtcgatgcaggatcatgtctggtcagatgagggtgtcaccttccaggagatcacagaagacccaaatgtggagccacctgacctgagtgtggacaggatgatgatgaggcagcaggtgagggacttcctggggatcctgagccccagggagaaggagatcatcgagcaccggttcgggatccacgatggcgagccgaagacgctacatgtcatcggggacatgtttgggctgtccaaggagaggatcaggcagctgcagaaccgggcgctggagaagctcaagaggagtgcatccttgcaggggtttgatgtctactttgatttgctaacctgaagaagaaaggccaagcagctcatttggtttcagaaactttcagtcaagttgtccatacaaaacagcagaaacacatacacactgtagctttctagacctattatacatatatactacacacccagtgacacgtactgtacaagtatagtgctagatctgcagaaagaaatgtggtacacggattcagagtttcagatggcatccttttttgcttatgtaagtaaatttcccagcaagctgctgttggtgcttatactgatactgcaagtctgcaatgcaaagcaaccctcattgtaattaaggataatcatgtacatttttttacccttaatttgagctgatcaggcgctgtaattataacgg

SEQ ID NO: 18481 - DNA, 1738 bp, Oryza sativa
  ref <308>: DATABASE ACCESSION NUMBER: AK068875
  ref <309>: DATABASE ENTRY DATE: 2001-12-06
gtgagagagagagaagagaagagaagcgcgcagtgtccagacgcaaccgatcagtctcgcttctcgcctcgtctggtctccttcctccgacgcgcggaaccttctagaagcttctccctccggtcgggggatgccgcgctgaccccctaccgtggttatgctggcgtcaaagctctggtcgaggctcgcgtcgccgtcttcccccgcctcgccgcgcgccctttcttcttcttcatcggcggcggcggcggcgaggtacctactgccgagctctgggatgccggcccaagaaaggtcgccgggtcaccccagtggcggcgacgcgcggcccggtgcggggctcgggctcgccgagactgggtgtggcgcggccggtgcgccgcgaccgctgccgctgccgtgctcttcttcgtcggacaatcccgcggaagagaatccttgcacaagacagatataccaaagacagctaatgccgcatcggttcaagttatttttgggggagaaacgtcattttacatatgcaaatggtgcttcactgaatccgcagaactacagatatttttcatcttcttctggccaacagagtataggaattggtaacaagattatacatgaccttccaagaagtgtgaaaattgtggaagttgggccacgagatgggctacagaatgagaagaacatagttccaacacatgtaaagattgaactcatacagagactggcaacctctggattatcggttgttgaggcaactagttttgtctctccaaaatgggtaccacagctagctgatgctaaggatgtgatggatgtagtccggaatattgaaggtgtaagccttcctgtattgacaccaaaccttaagggatttgaggcagctgttgcagcaggtgcaaaagaagttgcagtatttgcgtcagcttctgaagcattttccaagtcaaacataaactgtaccattaaagagagccttgctcgctataaagatgttgctcttgcagcaaaagagctaaaaatccccatgcgagggtatgtttcttgtgtggttggatgcccagtagaaggatatgtgccaccgtcaaatgtagctcatgtggctaaagagctttatgacatgggctgctacgaggtttcacttggtgatacaataggcgttggtaccccaggcaccgttgttccaatgcttgaggctgttatgttctttgttccaaaggagaagcttgctgtccatttccacgatacctacggccaatcgctttcaaatatcctcatctctctccagatgggtgtgagcgttgtggactcttccgtagcgggcctcggagggtgcccatacgcgaaaggtgcatcgggcaatgtggcgacggagtacgtggtgtacatgctgaacgggctggggatcagcaccaatgtcgacctgggcaaggtgatggccgccggcgagttcatctgcaaccatctggggcgccagtctgggtccaaggcagctatcgctttgggaagcaaggttgctactgccaacgcatccaaactgtgaggttcactaacattcactgatgcagtctttcggaggatgcgtttcagacatacaaatgtatacgataaataaaggcgaaattggttccatgctattcaagtgacctgggatttgtcggtgctagaaaactaaaatcgggatcgttgggtgatgtaagatcaattttgccagaaataaatggactgatgggattgttgattg

SEQ ID NO: 18482 - DNA, 1666 bp, Oryza sativa
  ref <308>: DATABASE ACCESSION NUMBER: AK068876
  ref <309>: DATABASE ENTRY DATE: 2001-12-06
ggctcgatataaacgggccgggtcaggcgcgaacctaaaacttcggaagagaatatctgcagcttgatcagttccaaaactgagatatatctgcagcttgatcagttccaaaactttagctgggcacgcactaccggcagcagttcaaggacaaaccaatttgaaggcggctagcgccagcacaggcatgccgatctcgcatgagctgggcgagcctgacgaaagcttctacaatctatggaaggaagagtgtgaagaactgtgggaggaagaggacgaactgtggggggacgaagatgttgaggaggagctgtcgctgcgtcaccctggattcaacaagtggaccgtccagcagggtgctgcaggcggggaccatattcgcgccaaggacaagaacttttactgctttgaggtccaagttcacttcactggagaactagttgacggtacgcagttcgtgtcaagccgagaaaatgacattccagagaggtttatactggggcaagaggatgtgatgcatggtttcaacttagctgtcagttcgatgcaaccaggggagaaagctatattcactatcccttcagcgttaaccatgacaaaagctggctcccctgctagcatcccgtcaaacatacctcccaaccaaacactacggtttgagattgagctcatcgccatgtttactataattgacattttcaaagatgaaggcatattgaaaaagattgtcaagaacgcagaacccgacagaaaacaatctcactcaagtgattttgtatttgtgaaatacgacgcatgcctgatggatggaacttcagtgtccaaatctgaaggtgttgaattcagccttaccgacggcttcttctgtcctgcatttgcacatgctgtgcatactatgaaagaaggagaggaagcagtactaattgtgaaaccaaaatatgctttcggtgaacaaggaagaccttctcaaggagaggaagctgctgtgcccccagatgcaactctttatgtgcacctcctatttgtgtgctggatacggcgaattggggaagaccaagcaattgccaagaaaactctaaggatagggaactcacagaggatacacacacaaagtcaagctgtggtgaaagtgcggttgctcggcaaacttcaagatggaactgtttttgatcgtagaggttacggcgacgatgaaccgttcgagttcgtggtagatgaaggtcaagttattgatggcctggatgaatctgtaatgacaatggaggagggagaagttgccgagttcactattccaccccagcacgcatttgatgccgttgggtcagatcagcctgcttctactcctagtactgctcccagtactcccaaccctgctacaccacagacgaacgccctcgctactggcactagtggcaccccgagcggcagcgctgctcaaagctcaggaacaatcaacacgaaccgcgggtttctattcagatgcttcgggccatcgcccacgagctgaaggatccatcaagcttatatcgtctcaatcgttgtcgccgccgcagctaattactacttagtaatatcatatcatacttggaattgcagtatgctggtaatgtctacattttcaaatggatccacattaaataaaagttgtgattgattttgtactgcc

SEQ ID NO: 18483 - DNA, 869 bp, Oryza sativa
  ref <308>: DATABASE ACCESSION NUMBER: AK068877
  ref <309>: DATABASE ENTRY DATE: 2001-12-06
ggcggagatccacagccggcgggctcgacctcctcctcgggcgccatccacgcgcgcgcgatgttctccttcggcggcgggtcgtcgctgacgtcggtggtgccggacgcgaccccggccccggcggcgccgccgggcaccgggacgggcgccaacgcgcaggtgctctacgtcttcaaccgcggcggcgtctgcctgctgtaccgcgagtggcaccggccgctccgcacgctcgaccccacccaggaccagaagctcatgttcggcctcctcttctccctccgctccttcaccgccaagatcgatcccaccacagcagaaaaggggaatcttggggtgccactactgccgggccagggttgctcattttacagcttcaagacaaacacatacaaattgaacttcctagagagcccttctggtatcaagcttattctaattacacatccaaggactggtgatcaacgtgacacgctgaagcatatctacaacctatatgtggaatatgttgtaaaaaatcctttgtacgctcctggcacaccaatcaacaggtgcgagcttttcaataagcaccttgatcaatatgtcaaaacattgatatgatacttttagaggttataccgatcctaaatacggttaatgtcatatcttctgggtaactttggtacgcttactggtatcagtgtgctatttgatttattactacattaagaggtctagtgttccttgaggaatatgctaagacttttctatcacaaacattcccttgttcctgttgtacattgaacaatgctgcattacatctgttgaactgcacaaagttgttgatgttgagtgttcgttttgaaaattgagatctacatactctg

SEQ ID NO: 18484 - DNA, 1597 bp, Oryza sativa
  ref <308>: DATABASE ACCESSION NUMBER: AK068878
  ref <309>: DATABASE ENTRY DATE: 2001-12-06
ggtttgtgctgttcccgtcgctgggcgtcggacacctgaaccccatggtggagctggccaagcacctgcaccgccaaggcctcggcgtcgtcgtcgcggtgatcgacccacgcgacgatgatgccacgtcggccgacgcgacggcgcgcctcgccgcggccaacccttccgtcacgttccgcatcctgccggcgccggccacggccagcccggaccccggcccgcaccgtgtcaggcgcagcctcgacacgctccggctcgccaacccggtgctcctggagttcctccgctcgctgccggccgctgtcgacgcgctcctgctcgacatgttctgcgtcgacgcgctcgacgtcgcggccgagctcgccatccccgcatacttcttcttcccctccccggcaagcgccctcgccgtcttcctccacctcccgcattactacgccaacgggacgtcattcagggagatgggacaaggagagcgagacgaccaagatcaggttgtaccagttcaagcggatgatggaagggaagggcgtgctggtgaacagcttcgactggctggagcccaaggccctgaaagcgctcgccgccggtgtctgcgtgcccgacaagcccacgccgagcgtctactgcgtcgggccactggtcgacaccggcaacaaggtagggagcggcgccgagaggcgccatgcgtgcctcgtgtggcttgacgcccagccgcggcggagcgtcgtgttcctctccttcggcagccagggcgcgctcccggcggcgcagctgaaggagatagctcgtgggctcgagagctccggccaccgcttcctgtgggtcgtgaggagcccgccggaggagcaggccacatcaccggagccggacctggagcggctgcttccggcggggttcttggagaggacgaagggcacaggcatggtggccaagaactgggcgccacaggcggaggtggtgcaacacgaggcggtcggcgtgttcgtcacgcactgcgggtggaactcgacgctggaggcgatcatgtcggcgctgccgatgatatgctggccgctgtacgcggagcaggcgatgaacaaggtgatcatggtggaggagatgaagatcgccgtgccgctcgacggctacgaggaaggagggttggtgaaggccgaggaagtggaggcgaaggtgaggctggtgatggagaccgaggaagggaggaagctcagggagaagctggtggagacgagggacatggcgttggatgccgtcaaggaaggtgggtcttctgaagtggcatttgatgagttcatgagagatttggagaagagcagcttggagaatggcgtttgtagctgatcaagcagagttacgctcatgaccgaatagaaatggtgatggtttcttgattccatttttttttttaaggttggcgtaactgaggactctgcataactgtattggtgcatcaatgcgtagctgatgggtgggggctaacagaaaggaaaaatttcaaaaaccaccccaaatatcactctaagtttaagatgcccccctataagaagatttgttgcaaattcccacctcctaattcaccttattttgattt

SEQ ID NO: 18485 - DNA, 1468 bp, Oryza sativa
  ref <308>: DATABASE ACCESSION NUMBER: AK068879
  ref <309>: DATABASE ENTRY DATE: 2001-12-06
gggatgagaggaggcgatgagaatggccgcgccgcagcaagtgcatgtgcgtgccgccccgctcgcgcgcgcgctccgaactcgcgtcgccgccgccgccgcgtctgcgagctctcccgaacgcgcgctcctcggcctctccgaaccggatctccggcagctcgccgtcgacctcggccagcaaagttacagggggaagcagcttcacgacctcctctacaagtccagggccaagcaaatccaagaatttagccacgtaccaaaggtgttccgtgaggccttggtcggcgctggctggaaggttggccgctcgccagtgcaccatgctgtgacggcctccgatggcactaccaagatacttctcaagttggaggataacagattgatcgaaacagtagggatccctgtcgatgatgacaaaggcccgtcaagactcactgcctgcgtttcatcacaggttggctgccccttgcgttgctcattttgtgccactggcaagggagggtttgcaagaaaccttcatgcacatgagattgttgagcaggttttggccatagaggagacgttccaacacagggtgacaaatgtagtgttcatggggatgggtgagcctatgttgaacctgaaatcagttttagaggcacatcgatgcttgaacaaggaactaaaaattgggcaaaggatgataacaatctccacagtaggtgttcccagcactataaaaaagttagcatctcacaagcttcagtcaacacttgcagtcagcctgcacgccccaaatcagaaactacgggaaacaattgttccaagtgcaaagtcatatcccttggaggcactaatggatgactgcaagaattacttcctcgaaactggacgaagggtatccttcgagtacactctgctagctgggattaatgacgcaaaggagcatgctgaagaacttgcagagctactgcatacatgtggcggtggttatcatgtgaacctaattccttataatccgattcaaggttctgaatacaagaggccctacagaaaagtggttcaagcgtttgttgatgcgctagaagctcggaagataaccgtaagcgttcgacaaacccgtgggcttgatgctaatgccgcttgcggacaactaaggaatgagttccagaagaatccactgcttgaatcatcaccttcatcagagcccaacctcgtaccagcttgatgagaagactgagttcatgatggccatgcacaatgattgcagattatcagtccatcacactgaaagctgatattgtactcgtagttgttttcggcatttcctgatgtatttgaattttcaagagttgttataagtagatatatatttagtgccacatacgggtgctatagaatcattatgcacattgcttaggtatgtaatctgcctgacgttgtgaaaaatggctcttcctgaatatcaccagatgcgaaaatttcc

SEQ ID NO: 18486 - DNA, 3643 bp, Oryza sativa
  ref <308>: DATABASE ACCESSION NUMBER: AK068880
  ref <309>: DATABASE ENTRY DATE: 2001-12-06
tgaaccccaccaaaatcatcatcgctttcgacgaaacaagtcggctcgtctcttctcggcggcgaaggaaaaaaaaaaacgcgcgtcgccgccgccgctcgccgcgaagcttctcctcccccggccgccgctcgccgtcggctcgggcctgaccgcccttaacgccgcccgctggtcgtcgcgaggaaccgggaaccctagatcgctccgctctcttccagtccccccccctcaacctctcctcctctctcctctccaatctgtgcagggccggaggtagggtagggctctcgcctgctctcgcgcgcggcgcggcgcgggggcgagcgggcccgtgggcacggtgggggacggcgcacggccgggtctggagggggagcggccgacgcgtccgacctcgttccattcgattccgtctcgattcgggtcggattggagctgaaaccccgtgttaggtctgcccctgcctggaatccctggatgctagctgctgctgctgctgtgctcttgtttgttgatggttcatgtaattctccccttcctcctgtaatgtttggaagggtttagggtaataggaaagaggagtttgtaagatagactcgggaaaagattgaattttacgttgtaaagaaggttaaaagcaagtgaaataataaatttctgagctagctagtaagaggcagcagaattcctgtggggcttattgtagacctgtctctatggcgaagagtaacaatggtaatggctacctcggtgtgactgagccaatctcattgagtggtccaactgagaaggatgttgtccgtacgcaggaggttgagaagtgtcttgctgacgctggcctgtatgaaagccaagaggaagctgtctcacgagaagaggttttaggcaaactggaccagattgtcaaggcttggattaagaaggcaactcgagctagtggttttggcgaccaatttgtgcaagaagcaaacgcaaagatttttacttttggctcataccgactaggggtactctgcacctcatgcatattttattcagattgtaaaagatcgtgttcaattaatatagccattaccttttgtgttatatggtttgatgctgtttaatagaaaagtgtcctgcattaaaatataggataactatccttttgctttcttgttttgtctgacattgccattagatatcagtatgattggatgcacatacatctgttcgttttggttcactgataggtacactgttttgctgcatgcatatgaaggttcaaatttagcaatacctgagacattcttgcttgttggcagtttttgttggtttggtacccatctatgccaagagttgtgaacattgttccttggtattttcctaggttcatggccccggtgcagatattgatacgctttgtgtgggtccaaggcatgcaactcgaactgaatactttttccaggctctttatgatatgctagttgatatgccagaggtcacagagttacatccagtgccagatgctcatgttcctgttttgaaattcaaacttaatggggtttctattgatcttttatatgctaatcttacacatgttgttattcctgaggacctggatctttcgcatgactctatattgcacaatgttgacgaacaaactgtccgaagtcttaatggatgccgagttactgataaaattctacgattggttccaaatattctggtttgcacctcctgcattgtctatttttcagatgatatgctaaatgctctttggtggatacggtatgatggccgtttattcgcttcagtaagtaactttgcatgacccattctttccaaatgcagactttccggacaaccttgagattcatgagattttgggcaaaacgccgtggagtctactcaaatgttatagggtttcttggtggtataaactgggcacttcttgttgctcgtatatgtcaactgtacccaaatgcatcaccaagcatgttgatatctcgttttttcaaagtctacagcaagtggaagtggcctaatcctgttatgctttgccatattgaagagggttctcttggtcttcttgtgtgggacccaaggagaaattttagagacaggggtcatcatatgcctataattacacctgcttatcctagtatgaattctagctataatgtatctatcagtactaggcatgtgatggtccaagaattcacacgagcttctgatatctgtcaggcaatagacgaaaggaaagcagactgggatgctttgtttgagccatatccattttttgaatcgtatagaaattatctaaagattgagatcacagcaagaaatgaagatgacctcaggaattggaaaggttgggtagaatcccggcttcgtacgcttgtattaaagattgaacgatttacacgtgagatgctcctctcacatcctaatcctagagatttcatcgacagctccaggccattgcattgtttttactttatgggtctctggaaaaaacaaatcagccaagctcaagaagctgagcagtatgacattagagcaattgtgaatgaatttaaaagcaatatccatgcatatcaacactggagagaaggaatggaaattgaagtttcccatgtaaaaagaaaagatatcccatcatttgtttttcctggtggaatccgtccttctcgcccatcaagaacagttggcaaggaagctcgggctgtttcaagaagtaatatttcagctaatgttcaagaaagaaatgttccaagcatggcccagcctatgccatataagagtagtgaagtaaacaaaattccgtcagatcctcatggtggctatcagtcgcaagaaagaaataatgcagtggtctctagtttgccctgtgaagaaactggccatatgttcaatgggtatgcaaatctccatacagaatctgttgagctggaacacttgagaagctacaagggaagtacatctgttcctgagaaccatgttgtgcatgatttagtcaagccaccagagagcatgccacctaactcaatccatgtttatccaagtccaacaaatggattgggccatcttttagatagttcttgtaaaaaaccagcagacatcattgtaaataaaaccacaaatttctcttcagctgtcctagcagtacctgatgaacttgatgagctggattctcatcaagtgaaggtaaatcagaaagatttaactgcagtagatcaaggattatctttggagcataaagttggaagtaatgggggcaaagcaggaaccacaggttcacctgataacaatcatctgaagcgtaaagctgaggaagagcttgagccacttgagcttgctgccccactagttcgccctcctgcaccaacgtccatgacccagaggaggcccttgagactgagattgtcaactgtggtgcaacccaaacctgctgaaggaacttcatgaatcgagttgcttggagacatggagattattctcttcaagggagggaggccgcctcaagctatccggtcctgtagagctgtgtaacggtagcaggaaaaaggcactgaaatgtctaatagagcaacatgtaaactaaatattgatgtaaaatccaaaattccaagttctaataaaattatcgtgttttgcc

SEQ ID NO: 18487 - DNA, 1069 bp, Oryza sativa
  ref <308>: DATABASE ACCESSION NUMBER: AK068881
  ref <309>: DATABASE ENTRY DATE: 2001-12-06
gatccgtcccgtctcctcgcccgccgccctcgactcgcgtctcctcgcctgccctgccgctggcatcctgctagcagaggtggcgctggcgttctcctgctcccgccgcattcgctcaccggtgagcatcctaatccatcccatccggcctcggcctcgagtttcgtctcctcgcctgccgcttgcgccgatccccatcctgcgaggagaggtggcgcccggcgtcctcctgcttccaccgcatcgtcgctcgccggccaaactgaagcctctcctctcaagggccaacctcctgatcgctagggacatagaatgggcaaatatcatgttggcttttgagcaggagagtagatatatcataatggatccgctctttcctcaatcacctgttggtttcattcgagagaaaggcaatgtcatatttaggcagctatttcgctcaagaaggccatttgttgcagaaattactgatgctatgggcaatgagatctttacggttagacggccattttggcttatcaacagttccatttatgcagaagtgaatggcaaggaggtaggtgtagtccacagacgttggcatctctggcgtagaatttatgacctgtacttagggaataggcaatttgctgtggtcgagaatcctggattttggaactggacctttactctcacagatgaggatgacaatgtactagcccagattgatcgtaattggaggggaatcggttttgaactcttcacagatgctggccagtatgcaattcgatttggtgatgcaggactaaaccgtaaatttggtctcgcttcagatatcgatgaactgcatgttgttcgccagttgactttacctgaaagggctgttgcactagctcttgcggtgtctctggattgtgattatttttctaggagaggtggctggtaagtgccgtgtgaacttaacctgtggagacggttcctctgtaaattttggtttaactactgttattgggaaactgattgaaatgcctacctactgttgtgaaactgattcaaatgccttttttctttcaggggacttcctttccct

SEQ ID NO: 18488 - DNA, 2823 bp, Oryza sativa
  ref <308>: DATABASE ACCESSION NUMBER: AK068882
  ref <309>: DATABASE ENTRY DATE: 2001-12-06
gagagcagcagctgccgccgccgacgacgagagaagaggcggccagatggcgggcctgcggcggctgtggggggagtgggagatccgggtgcttctgctgagcagcctctcgctgcaggtcttcctcctcttcaccggcggcctccgcaagcgcaacgtcgccgcctggctccatttcatgctctggctcgcctacctcctcgccgactccatcgccatctacgccctcggcaacctctcccagaaccagaagctctgcagcaacggcccccacggcggcggcgacatgcacctcctcgtcttctgggcgcccttcctcatcctccacctcggcgggcaggacaccatcaccgcattcgccatcgaggacaacgagctctggctccgccacctcctcagcctcgtctcccagatcgccctcgccctctacgtctactggaagtcgcgcccctccgccgcgggcctcctcgtcccggccatcctcatgttcgtctccggcgtcgtcaagtacggcgagcggacatgggcgctcaagtcggcgagcatgagcagcctccggagctccatgctgacgcgccccgaccctggcccgaactacgccaagttcatggaggagtaccactccagcaaggaggccggcctgcacgccgagatcgtcatcgtcccggagcgcccccccgacgacaacatccatgtccaggaggagcacatggagtacggcgagctcgtcgtcaaggcgcaccggttcttccacaccttccgccgcctcttcgtcgacctcatccttagcttccaggaccgaaccgacagcctcgccttcttccgccgcctccagcgagatcaggcgtataaggtggtcgagatcgagctcctgctcatgtacgagtcgctccactccaaatcctccgtcatccatggcccgaccggccgctacctccgcatcttcaccctcgccgcgcccgtcctctccctcatcgtcttctccggcaccgacaaggctccctacaagccggttgacgtcaccgtctcctacgtgctcctcggcggcgccatcttcttggagatctacgccatcctcctcatggccatctcgccatggagcttcgccgacctgcggaagaaggacaagtgcctccccgtggcgagcggggtgttccgggcggtgagctacttcttgccggaggcgaggccgcggtggtcgaaccagatggcgcagtacaacctcatccactactgcctcaaggacaagccgacatggctcaccggagcgctcgagaagctcgagtgggactacaatgtccgcgtgaagacgatctgggacagtatctggtacacccaccacatcggcgtctccatggtgctcaagcagctcgtcttcaagcagctcaaggagaaggccaacagcacggcggacccgatgagctaccggcggttcggcgaccaccgcggccagtggttcctccaccggatggggtgctaccaggagctcggggccagcgtcgaggtggagttcgacgagagcatcatcctctggcacatcgccaccgacctctgcttctacgacgacgacgacgacgacggccgcgacgccggcgagaggaagctgaagcggtggtcatcttgctgcttctgctcctgctccgaccacgcccccacggcggacgacagccacctgaacgacgtgtcgcacctgccggcggcgagcagggagatctccaactacatgctgttcctgctggtgatgcggccgttcatgctgacggcgagcatcgggcagatccggttcggggacacgtgcgcggagaccaagaacttcttcctccggggggacgagctcggggcagcgaggaaggcggcggaggcgctgacgaaggtgaagacggagatcaacccgcgggaggtgaagggggaccggagcaagtcggtgctgttcgacgcgtgcaggctggcggagcagctgcggcgggtggagcggcggaagcggtggcggctggtggccggcgtgtgggtggagatgctgtgctacgccgccggcaagtgcaggggcaacttccacgccaagcagctcagccagggcggcgagctgctcaccgtcgtgtggctgctcatggcgcacttcggcatgggtgaccagtacagagtcgaggccggccacgcccgcgccaagctcatcatcgagaactagccccaaattgcagccggcacataacagctgagagtttcagaattcagatcagttcagagttacaaataaattctcttttgttgctgaagttaaaagattgagcttgtgacttgatttcttaggccttttaccaagcccctcgaagagtttctctagcggctgggcaactcagaaattggcccaagcaacctcatcccacagtgcagtgatctactttgcgtctccacgcgcggcgcgaggttacggggcgtcggaggcatgccctccacagcgcacggaatcagggtgattggcgccgtgcgttacccagaccgagcgaagttctccgcatcctgcatgggagcgagtcgccatctttgattgcgaccgcgcgcgacacattagcagatttcggactggcaaaggaagtaacacgccacgtccttgcactgtgaccggccttagattaatcactgattcttgcggggataaatccatgtcaatctgtaaagttacacacatacttaattcctactattttttagtgatcaagccccttcctatagtatacaactctcaggctgaaagccattttatagtgaatttctttgtaagtgattaggcaaatcaaatgccctcattcaaatgttgcctaaccg

SEQ ID NO: 18489 - DNA, 2308 bp, Oryza sativa
  ref <308>: DATABASE ACCESSION NUMBER: AK099075
  ref <309>: DATABASE ENTRY DATE: 2002-08-28
gcctgttcatttcgacctctctcttcctctcccgtcgtcgtctcccccgtctccggctagggtttcggccgctcgccgccctcgcctccgcctccgcctccgccgccgccgctcgccagggggagcccttctcacctcaccgctcccgtctctctctccccgtcgaccccgacgggctacggctctacaccctccccgcctcggctcgtgtctgttcgcccgcggggacgctgtttccggcgggcggaggcgcggccgcggcgtcgcggctcctcctcggaggcacggtgcgggcgacggccctcctcctctccttccccgaccctctctctctatctcactctctctgccctagccttctacgctgtgtggaggcgtcgtcgcgcgcgcgcgcccggacggcgagcatctggatttgagcctaattgaagctgaacccccatggcccagtttaggtctgcgcctgtggaaagcgaggcggagccaggcgccgatggccctgtggatgaagccaatgctgtggaagaggagaaatctggtaagggtgaggatggcattgaggaggctgccgataccgttgattccgtgaaggattcagcaaagcctgaaggcatggatgcaaaggaggaggcggtggagcaggagggtggggccgcagcggataaggcaaaggatattcctgtgactagtaacggtaagacggatgctggcggaaatgaggtggctgaaatgaaggttgaaaaattggagaatggtgatgggcatttgaaggcggacggcgatagcaatggtgataacaagggtgctgatggtgagaaacagcttatgttagcgtcagctggggaggacgtggaggacccggtgctgtccaagcttgcaagcaactccttcatgtttgattacagctgtggtggtgatgactcggggactgaggaggagcaggctgctttcatgaaggaacttgagcggttttacagggagaagcttatggaattcaagcccccgaagttctatggtgaagggttgaattgcctcaagttgtggagacaagtgactgggttgggtggctatgatcaggtgacatcgtgcaaactgtggcggcaagtgggagagtctttcaaacctccgaagacatgcacaactgtttcatggaccttccgtaacttctatgagaaggcactccttgaatatgagaaacacaaaatcgaaacgggcgagtttcaagttgctgcatctaatttaacagagaggattacttctgaaagtcaggttggcatccatgcttctggttctggaagagctagaagagaatctgcaacccgagctatgcaaggctggcactctcagcgcttgcttggcaatggtgaaattgctgatccaataattaaagataaagggacggtgtctgtcttaaaaaaggataaaactcctaaaagcagcggttctgccaagaggaaaaggacaccgaccttggaagatgacaggattgtaccatataaacctgacaagctacaaaatgactcaatggttcttgaccttggccctccagctgattgggtaaagataaacgttcggagaaccaaagattgctatgaagtctatgcattggttcctggccttctgcgtgaggaggtacatgttcagtcagatcctgctggccgtttgatagttactggagagcctgagcaactagacaatccttggggtgttactccattcaagaaggttattagtttgccctcccgcattgatcctcatcaaacttcggcagttgtcactctccatggacagctatttgtccgtgcaccattcgagcagtcaaagtaaatggtgctctacaagatgaagcgcaacatgcaaggttgcttttgtaggtgggggtttatgtgattgacttgggcctgttcatcctgatcttcgttgcaaactagttactttctgcttcattactcctgccatgttgtctattctgtattgattaattctagttaactagatggtctagttatgtatcttgtagttcgttaattgtgatatgtagcttaagttcagctctattagtttagaatgttaatagcctgatgctaaacatgttcatggtttctttcttccttttttttttctcaactaaagaaaaggtgataatttgtagcatgtagcttgtgaggttattcctaatactcagttctcatactactcagaacatgaagacaagatagattcttggatgtaactgttgccttgtgcattgctgttgtatctgtataactgaattgacaactgtgcctgaccatcccttgaaactatt

SEQ ID NO: 18490 - DNA, 2766 bp, Oryza sativa
  ref <308>: DATABASE ACCESSION NUMBER: AK068883
  ref <309>: DATABASE ENTRY DATE: 2001-12-06
ggtggatttgaaactaaaattgggtggaaatgtcagctttgtgcccatttctgctgcttcactggggtactgatgattccgccatatagccgcaccacagtttcatagtactccaggtttcaggatcgatggcagaatcggggagtcgtttcttgagttcactcgactcaatgagcagtagctcatctcactactgttgaatgaaaggggaacaacttagaattaccgattaagttcaagaagaagattagaatcgcttgtgtttatgcacaatgtgatactatgctgcctctagcagctgaaaacttgaaatgccttattttagctcctgattttctacttgcaatgtatccagttcctagatgcttaggtctcaccatatgtaagcgtaagtgtaagcatcagctttctgtaaattcatgggtctgatgattcttgtgcagatatttaataacaagaagccggattctgcttcgccataaatgagggagagggatgtctgctgggagtactgtgacaagatggaagggaacaaggtcaggtgcaggttctgctacaaggtcctaaatggtggtataagcagactcaagttccatctgtctcaaatctcaagcaaaggcgtcaatccttgcaccaaggtgaagccggatgtcatagaaaaggtgaaggctgtcatagcagcgaaagaagagcacagagagacacaggttctcaagaggcaacgtgacactgaattgtcggtgcgtccaagaagaatacgggaccttccctctcagcctacatctccagagcgagctacttctcctgctattacttcaacctctgaccagacacagttccttgcgttggaagtatctactccagtactgaagctatcatctgtgacaaacaaggctcgctcagcaccacaatcggaagccgaacgatgcatagctgaattcttttttgagaataagttggactacaatattgcagactctgtttcataccggcacatgatggaggcacttggtggacagggattccgagggccgtcagccgaggttttgaagacaaagtggttgcacaagctcaagtcagaggttttgcagaaaaccaaagagattgaaaaggattgggcgacaacaggctgcactatattagctgattcatggactgataacaaatcaaaagctctcatcaacttttctgtatcatccccattagggacattcttcctgaaaacagtggatgcttctccacacatcaaaagtcaccagttgtacgaactctttgatgatgtgattcgggaagttggtccagacaatgtggtgcaaataatcactgatcggaatataaactacggcagtgtagacaagctgatcatgcagaattataacaccattttttggtctccatgtgcgtcttcttgtgtaaactcaatgttggatgacttctccaagattgattgggtgaaccgatgcatctgtcaagcccaaaccataacacgatttgtctacaacaacaagtgggttcttgatcttatgagaaagtgcatagctgggcaggagcttgtttgttcaggaattacaaagtgtgtgtcggattttctcacactgcaatcattgttgaggcacagaccaaagctaaagcaaatgtttcacagctctgactatgcatcttcttcgtatgcaaacaggtctttaagcagttcatgtgttgagatccttgatgacgatgagttttggagagcagtcgaagagatagctgctgtttctgaacctctattgagggtcatgagggatgtcttaggaggcaaggctgctattggttatatatatgagtctatgacaaaagtgatggactctattagaacatactacataatggatgaaggaaaatgcaagtcatttctggatatcgtcgagcaaaagtggcaggtggaattgcattcacctcttcattcagcagctgcttttctgaacccaagcattcagtataatccagaagtcaaatttttcactagtattaaggaggagttctaccatgttctggataaagtgcttacagtccctgaccaaaggcaaggtatcacagtggagctgcatgcttttcgaaaggcacaagggatgtttggctctaacattgcaaaagaggcccgtaacaacacctccccagggatgtggtgggaacaatatggtgattcagctccatcacttcaacatgctgctgtcagaatagtcagccaggtctgcagcaccctgaccttccaaagagattggagcataatcgttcggaatcattcagagaagcgcaacaagttggacaaggaggctttggccgaccaagcctatgtgcattacaatttcatgctccattccgactccaagatgaagaagggtgatggggatcccatcgcgctggatgctatcgacatgacctcgccatgggttgaggactctgacagtccaaacctcgcccagtggctcgacaggttcccgtctgccttggatggtgacttgaacaccaggcagtttggtggttcgatctttggcaccaatgatactctgttcggcttgtgacagctttcagttgatcagctcctcgtccggcaatgtgttgcttctgatgtacaagttatctctgtatgtatcattccatctccatatatctttgctagactagattctatatttgtttataccaaggtgaaaacctgttacttgttttggatcggacatgagaagctgataacctggagtatatggattatcgagattggagaac

SEQ ID NO: 18491 - DNA, 2250 bp, Oryza sativa
  ref <308>: DATABASE ACCESSION NUMBER: AK068884
  ref <309>: DATABASE ENTRY DATE: 2001-12-06
gaaactcttccagcatctttcgaacttgcagagaaggtaattaataagtgttatgagaagttaaagccagtgtttactcctttacttcggggcactcccttggatgagtacagcgaagttgttacatcattgttcgaagatgctttagatgctggagtagccgacaattctgatgcccctggaaaggatatggtggctgatgggaaattatctcataagattgtttcagatgagtcagctcaggaatcatcaaaattagagcaagatgccaattgccctggaaaagacggtactcctccaaacaatacttccacttcggcggttagcaatggttgtgctttaatagacagggtcaagtctccaagtggaccatcctcttctgataagaaggctgaactgccttctgatgacaatcaggcaaaagacactgatgatttgatatccggtgctaaagagataccagaaccaatcaccacagagcctgaaaagccatctgatcacaatttaaagaaaagccataaacttgatacttccactgattctgaagtggttgatcattctaaggctgttaacaacaacgaggatattttagtctctagggagttatccccagagactgatgatggggataataagctgccaccagagactgggaatagagctgctgatgacaaatcgaaacatgttgataacacacctgctggcaagggaaagcggggccggcctcctgcatcaaagtcgcatgagaagaagaatgttggaaaaggcaaagtatcaggtttagagtctaaaaaagctgacgcagttagtgattctggtggaagggctacaaggcgactagctaaagatgatgatatcaagtcttcattcaaaaagactggtgaaggggaatcttcgaagaagaagcagaaggaaaatttgaaacagcaggaagatactccacccgatgaagacactgatgaggatctcagtttaaaggatatcgtatctcccaagtcttcggccaaaacaggtaaaaacaaaggccaggcaggtgacagtgggggctcaaaaaggaaacgtgcacaggaagctgaagagactccccagcccaagaagaacaaaattcttaaaggaaatcttgttggctcaagaatcaaagtgtggtggcctgatgacagaaagttctataaaggtgttgttgagtcatttgatgttgcttcaaaaaagcacaaggttgtttatgatgatggagatgttgaacgcctacaccttaagaatgaaaaatgggaattcattgatgaggggcgagacaacaatcctgacgcatcgtctgatatgccgcacggcggaaggggtagagttagcttgggtgagcaaacaaaggaaggaaaaatagaaacacccagcagtgggaaacatcgtggcactgatgtcgctgatcctcccaagaaaagaggacgccctaaaggtgtgcgctccagcaatagttcacaaaatgatgacagtcctttgaaggggaaaagtgcagaaaacgatgatgaagatatatccaagacacctaaaagtggcagtgccctcaagaatgaaggtggaagatcatctcgatccactggcaagacaaaggatggcctgctaaagggaagcaacaaggatgagactggtaacactaaaagcgcaagcaaatcaaaaaatgatggtggcagcaaacacaaggattcaaaagatgaagctaaatccagcggatcaaatccaaaaggtgcaagcactcccaaagctgctgatggatccaagacaaatggtctttcgaccaaaagaaagcaaaaggagaaagaaggcgagtcatctgaagaggaagagcatgtgtctgctaaaatttctactggaaagaagcgcagaaggaaggctcataactaatttgctctggccttgtgcagttcttccaaggggtacttatgaggcatgcagtctgaaggtttttggcatgagcagcctagcaatttatatggcttccatcccttggctggttgcctgccaagtcttgccctaatcgaccgtcacgaaacagctggtagttgtagcagttgcagtggtagttgtaatgtaggtgttacttttgttccttgtggtcagctgtgagcctctagcaaatatggtttcttgcttgctgtcgttcaacccttattagattgtattttctgctggagctatttgagacgtcaattttgcagcaagcatgaatggagagaaatgtcgtagttcatatcatcg

SEQ ID NO: 18492 - DNA, 2559 bp, Oryza sativa
  ref <308>: DATABASE ACCESSION NUMBER: AK068885
  ref <309>: DATABASE ENTRY DATE: 2001-12-06
gagtgtgaccagaccagcccagcatatctcgttcgaccggcggcagtgttcgccgacatgggcgacgtactgccgaggtcttatgcccgccccgccggcatgctgccgccgaacaatgagttcgggatcagggagatcacgcctggcctcgcctgctccgggcctggcggggcgtacgagctcgtcgagaggatggagtacctgtacgtgcgcgtcgtcaaggcgcgggggctcaagtggagcggcgaattcgacccgttcgcggagctgaggcttgggggctactcctgcatcacgcgccacgtcgagaagacggcgagccccgagtgggacgacgtgttcgcgttctcgcgggagaggatacacgcgccgttcctggacgtgctcgtccggggccggggcttcgccaaggacgactacgtcggcagcacgcgccttgacctgggcatcctccccgacgcgccggcgagcgtccagcccgacagctcgcccgcgccgcagtggtaccccgtcttcgacaagaaaggggagttccgcggcgaggtgatgatggccgtgtggttcggcacgcagaaggacagctacttcgactcggccgtccacgcggacgccgcgttccccgtggacgacaagctcgcggcgcacatcaagcacatacggtacgacgtgccgcgcctgtgctacgtgcgcgttaagttcaccgaggtccgcgacatcgtcttcgcggacaaggcccgggtcggtgaggtgttcgtcaggtcgcgcatactgggacaggtgcacaggacgagaacgtccatggaccaccgctggaaagacgaggaaaatggtcacctgtttgtggccgccgcgccgttcaaggactacctcaacatgtccgtcgtgggcgtcaagaacggcaaggaggaggtcatcggccatgtcaacgttctgcttgacagcttcgaacgccggtgtgacgcccgcccgattagcccaagatggtttagtttgatgcagccagagggagccgccaagattgacaagtactctgccaagataagcgtcgttctttgcctcgaatgcgggtacaaggtgctgtcagagccggtccactacctgagcgacgtccggccggcggcgcgtgagcaggagcgggagcggaagtgcatcggcctcgtcgagctcggcatccgcgaggccatcctcaccgcgacgcgcacgcgcgatggccgaggctcctgcgacgcgtactgcgtcgccaagtacggggtgaagtggtaccgcacgcgcaccgtcaccgacagcatctcgccgcgtttccaccagcagtaccactgggaagtgcacgaccactgcaccgtgctcaccgtcgccgtcttccacaattctcagataggcgacaagggcggcctcgtggccggcgaccccgtcaaggacgtcctcctcggcaaggtgcggatccggctctcgacgctcgagaccggccgcacatacgcctacgcctacccgcttatgtccctccacggcggcggcgtcaagaagatgggcgagcttcgtctcgccgtccgtttctccagcacgtcgacgctgggcctgttccagacgtacgcgcagccgcatctgccgccgatgcactaccaccggccgctgaccgtcgtgcagcaggagatgctgcggcgggaggcggtcacgatcatcgcgcaccggatggggcggatggacccgccgctgcgccgggagtgcgtcgagcacctctgcgagtcgcacgcgctgcggtggagcatgcggcgcagcaaggcccacttcttccgcctcgcggaggcgctggagcccctgtccgcggcgagcgcgtggttctaccacgtctgccgctggacgaacccggtcaccaccgtcgcggtccacgtcatcttcaccatgctcgtgtgctacccgagactcgtactgcccaccttcttcctgtacaagttcatgctcggcatgcggaactacctgcgccggcccaagcacccgtggcacgtcgacatgagggtgtcccacgccgacacggcgcaccctgacgagctcgacgaggagttcgacgagttcccgacggcgcggccgcccgaggtggtgcggatgaggtacgacaagctgaggagcctcaacgcgcggatacaggagatcgtcggcgacatcgcgacgcacgccgagcgcgcgcggtgcgtgatgacgtggcgggacccgcgggccacgggcctgtacctgctgggctgcctgtgccttgccgtgatcacgttctcggtgccgttccaggcggtggcgctgttgactggtttctacctgatgcggcacccgattctgcggcagaggctgcctgacgttgtggcgaacttcttccgacgactgccctgcaaggtggactgcctactttagtatccatgtctaaaataagctttataaaaggaccaatatgtaaaaaattcagtcaaacttcaaattagtttttagaagtttgcaactgattttttttctcccaaaagttcaaaatcgaactatccccgagagagaccgaggctgaaagaagccaatctgccc

SEQ ID NO: 18493 - DNA, 2200 bp, Oryza sativa
  ref <308>: DATABASE ACCESSION NUMBER: AK068886
  ref <309>: DATABASE ENTRY DATE: 2001-12-06
gtgaagcaaagcagagatcacgtcctcccaggactggagcctggagggccaaaaccccccaaatttcccaagccaacccaaccaaaccggccgtctcgtctccttcgtcgttggcaatgcctccactgccagcctagcccacgctgcccaccgccccacccccccaaccccaacctccctccactccccctagctttccccctccacctcgtcgtcgtcgtcaaccaacctcacccccaacccccaaccccaactcctcctcccccccaaatcccccagatcccgcacgccgccggtggccgcagggccgccgccgcccaaaccctagccggcgggcgggcgcagtagcggagatctggtaccgtgccgcgatgggggacttcaacgtggcgctggtgatcgtggcggcggtggtgagcgtcctcgtcctgctcgtcagcgtctacctgctcatcaactaccagcaccccgacgacgccaaccaggcctacttccccaagctcgtcgtcgtcctcggcatcaccgtcgccctcctctccatcctcatgctccccgccgacgtcgccaaccgccaggcctgccgccgcgccatctacagcggcgcctgctccctcaccctccccatgaagaccctctggctcgccgtctacatcgccgacgccgtcctcgtcttcctcgtcatccccttcgccatgttctactacgagggcgaccaggacaagtcagtggggaagaggctcacctccgctctcctgtgggtcgccgtctccgcggtggtttgcggcctcatcctcggcatcctatacggacttgttggcaaagtggacttcactgtcaggcatctttcttcagcagttgagacatttccaaattcattcactagtttctcaactggtcaaccttgcatcagtacatcgcccaagcagtgcgcagcttacactgcacctgctaactctcaaacaacttggacaatgcgcgctaccttccctgaatatgtggttgctcttgctaccatcgttggatctgttctcttcacaatatttggtggtgttggaattgcttgccttccattgggacttatattctcatttgtccggcgcccaaaagctgtcattacacgctcacaatatataaaggaagcaactgaactaggtaagaaggctcgggaattgaagaaagcagctgaagcccttcaccaagaagagaaaagtgggaagaagggcagaaaatggcgcaaaaatgtcaaggcccttgggaaggaattagtacttttagaagatgacatgaaggctcttgaagagatgtaccctcaaggagaacaggctgaggctacctgggctttgacagttcttggttacattggaaaacttttatttggtgctgtcgggttaattatatcgattgcttgggttgcacatatcgtcatatacttgttgattgaccctcctttgtcctccttcctgaatgaaatcttcgtaaaattggatggtgtttggggtctgcttgggactgctgcctttgcattcttctgtttctatctcctcatagcagtgattgctggggaaatgatgctgggtttgaaattagttttcatcaccattcacccaatgaaatggggaggaactttgatgaactcgttcctgtttaatgttggactcatcctactttgctccatcagtgtgattcagttctgtgccacagcttttgcttattatgcgcaagcaactgcagctcaggagatctttggccacacactgcaatctctccgtggaattaagtatctctacaagtacaatgttttccagtatggctttgtggctcttgcgatactcacactcttttactatgcaatatttggatggcgaaagaggaaaccgacaggaagattccagctctcaaattgatttgtggtttgttctgtaaggaagcctgacgaattgaactacaaacatatttgttcacgagtgatagattggttagcaatgtatatgatctttgaaaccgctttctcaaagagctggagagtttatccatgtaaattagcaaccatgaagtataaggagaaaactgagatttcagtagggcacggacatggttgttaaaagcagaacccagctgcctttgtaatgtacacatttctcatcgcggctcttcttttccttgtgtattattattttacacttggctgatgttattcttg

SEQ ID NO: 18494 - DNA, 1515 bp, Oryza sativa
  ref <308>: DATABASE ACCESSION NUMBER: AK068887
  ref <309>: DATABASE ENTRY DATE: 2001-12-06
ggaggacgaaactagccttctctccttctctctcgtgttctctcccaatctcttcttgcggcggaagcaaagcgagaagcgaggcgactcttctccggcggcggcggcggcggaagcggcggcgagatggacggcggcgtaggcgaggaagggaagcagcagccgcacctggtgctggcgcacaagctgttcctgctctcgcacccggacgtggacgacctcgccaaggtcgacctccgcgccgatgtcctcgccgcagtcaaatccgatgatatggcgtctctgtacgagtcgctgggggccggcggcgtgctggagacggacgctgcgctgctcgcggagatgcgcggcaggatcgaggaggagatccggaagcttgacgagaagatcgctgatgctgaagagaatttgggtgagagtgaagtgcgtgaagcccatctagccaaatcgttgtatttcataagggttggagagaaggagaaggcactagaacagcttaaagttactgaaggaaaaactgtagctgttgggcaaaagatggaccttgttttccacactttacagattgggtttttctatatggattttgatctcatctctaagtctattgacaaagccaaaaaattgtttgaggagggtggtgattgggagaggaagaacagattgaaagtgtacgagggcttatactgcatggccactagaaacttcaagaaagctgcaagcttatttttggattcaatttcaacattcacaacctatgagttgttcccctatgatacattcatattctacacagttcttacaagtgttatctcattggatcgtgtatccctaaaggcaaaggttgtagatgcacctgagatcctggctgtaattggcaaagtacctcacctctctgagtttctcaactccctctacaattgccagtacaagtcattttttgccgcattctctggcttgacggagcagatcaagttagaccgttacctgcagcctcatttccgttactacatgcgtgaagtccgtactgttgtctattcacaattcctcgagtcctacaagagtgtgacgatggaagcaatggcttctgcatttggtgtgaccgttgatttcatagacctggaattgtcacgcttcattgctgctggaaagctccactgcaagatcgataaggttgcttgcgtcctggagacgaaccggcctgatgccagaaatgctttctaccaggcaaccatcaagcaaggggacttcctgctgaaccgcatccagaagctatcacgagtcattgacctgtaggtgttagtgttggagctggtgcttgccaaaactctgctcgagctcccccgcacgagtaacttatttgctttggtcccaggggactacgaacagtacttgacttcgcattcgaagtaggttacgaggaaagagagcttaacaaaatcagcgttaaatctgagaatttgagcttatgtaacctactatatggatcgatgaaagttcagacccgttgtttct

SEQ ID NO: 18495 - DNA, 1232 bp, Oryza sativa
  ref <308>: DATABASE ACCESSION NUMBER: AK068888
  ref <309>: DATABASE ENTRY DATE: 2001-12-06
ggcggctccaagccaaacaacatccgcggcgccaccgccgcagccggcggagggagcaaaatggaggccgccgccgccgtcgccccctccggtctccgggcgagcttcctcgacgtcctcctcagccgccgtcgtaacctccaagtggctctcacggtggagcccgggagcccggtgaagcgcccgctgtaccaggggaggccgccgatggggcggagcgaggccatggaatcgtgcccgaggaaaggggtggtgaactccaaggagaagttggttgaagaaaatttctacctgattactgagtcaggtgaacaagggcgtgtacctgtgcttcttctgaaacttaacgatacaacccctaaaagaaaaccagttattgtattcctgcacagctcatataaatgcaaggaatggctgcgtccactgcttgaggcatatgcctccagaggctacatttctgttgccatcgattctcgctatcacggtgaaagggccaacaataacagcacttacatagatgcactaaaatcagcttggaggaatggggatgcaatgcctttcattcttgacacggtgtgggacttgataaagcttggagatcatctcagtgaacgggaggatgttgatccctgtaggattgggattaccggtgaatcacttggaggaatgcatgcatggtttgctgctgttgtggatacacggtatagtgttgttgttcctataattggtgttcagggatttcgatgggccatagataataacaagtggcaagctagagttgatagtatcaaacctctatttgaagaggcaagaattgatctagggaagagtgaaatagatacagaagttgtagaaaaggtgtgggacaagatagcacctggtctggactcacaatttgatgcgcccttttcactccctgtaattgcaccacggccacttctcctcctgaatggtgctgaagaccctcgatgcccagtacttggtttacaggaacctgtttccagagctgctaaggcttatgaagaagttggttctgcagataagttcatgttcattgcagagccaggaattggccatcaaatgacagcgaacatggtgaaggaagcaagtgattggtttgatcgcttcctttagagggttatgtatatgttccgaatactcttattataccacatcgtgagggaaaggcatactctacaacaagttgtctcagtttataattgcttatattg

SEQ ID NO: 18496 - DNA, 1572 bp, Oryza sativa
  ref <308>: DATABASE ACCESSION NUMBER: AK068889
  ref <309>: DATABASE ENTRY DATE: 2001-12-06
gatttcaaatggcacaaatcaatatatttttttgttcaagatcacagcctaccagtaggtaaattcagtttcacaagaaaagggtaagagaaattggagaatgaccaaaatacccccttcccctccatctatttctgtgtttgtgctcctctactgtctccatctcccttctcttctgcttccgatctgcagcgccttccgcctcgccggcgagcaagccggcgccgtcgacggcctcctctccctcccggacccgccctctgccctcctcccctgcgcgacctcctcgctcgctcgcccgcccgcccgacctccgtctccggttcgcgtccaattttgaggagtgaaatggatggggttgtcgccgcttcggctgatgccaccagggacgagattaagattatgaatgtgtacatatgggacatggatgaaaccctcattctgctcaagtcgctgctggatggctcgtatgctggtgcctttgatggcctcaaggaccatgataagagtgttgatatagggaagaggtgggagaatctcattctggaactctgtgacgagcatttcttctatgaggagattgagaattacaatgaaccctttctcagtgctgtcaaataatatgatgatgggaaagacttgacaacatatgattttgaagctgactgctttagttcgccttatgatgatctgaataaaaggaagcttgcttacaggcaccgtgctattggagagaagtatacaaagggtttggaaaaaattctggaccaccacatgatcaaagtctggaatgatctgtatagcgcgaccgacaaatacaccgatggttggctttcttcagctcataagttgttggaagaagcaatgggtaaatcaacagctgagtccactgccaaacattcaagcatcaattgcatagttacatcagggtccctgattccaagtcttgccaaatgtttgctctatcgtctggatgatgtggttgcattcgagaatgtttacagctcctgggaagtcgggaaactgcagtgcttcaaatggatcaaggagcgctatgatggcccaaacgtccgtttctgtgcaatcggagacggacacgaagaatgcaccgctgcgcagataatgaagtggccatttgtcaagatcgagttccaccctgatgcccctcataggttccctggcctgaaccttccaaccattcatcgcatcatggataccgtttatgattcatcgagcaacgatggttaaccaacatcctgttggtcctcctgtttacctcagtcctccgatgccggcatttgccaattgccgtggagaccttgttaaaggaaattgtaagcagagagatgcgatgggaaggcatattgctgaccctctgcctggagaattaggaggctggtgtgtgataaataaagcgtccgactagttccggcatgtgtttctagaaagattctgtgctgttcgtgttgccattttactctgaccaggcaaatcgttcgtctgttggttgttgtatgtatcccggccattgtggtcgccggcggtgtgcattggcatttcaggtgattttgt

SEQ ID NO: 18497 - DNA, 1042 bp, Oryza sativa
  ref <308>: DATABASE ACCESSION NUMBER: AK068890
  ref <309>: DATABASE ENTRY DATE: 2001-12-06
gacatttccccaaccgccgaacccctcgccgccgctgccccaccggcggcgatggaccccacgcctcaccgcggcggctcgccgtcgccgaggttcacgctgcagccgagccgcctcccgccggaggacatgctcttctgcgtcgacgtcgacctggagacgcgctccgagatgaggatcgccccgggccccgccgccgccgccgccgcgtcgccgggcgccgcgggggcttcctcgggggccgcggctgcttccaggcaggccgctcggccgccggtgaagaggatggacgccgtcaagcaggcgctcctgctcttcgtccacagcaagctcaccatgtgccccgatcaccgcttcgccttcgcctccctcggcgacaccgtctccttggtaaagaaggatttcagcagtgatgctggttctgcagtggaggcaatccaatccctggatgcgtcggaaacgagatatgcgatggctgatctcactcagctcttcaagatagcttaccaggaagggaaaagagcagaattgcaaggccgcctactcagagtggtactcatctactgccgttcctcaactaagcctcaacatcagtggcccatcaagcaaaagaatttcaccttggacataatctatcttcatgacaagcctactgctgataactgtccacagaaggtatatgatgctttggttgatgcacttgagcatgtcagccagtatgagggatacattctagagactggtcaggggcttgctcgaatcctgttccgtcagacttgcattcttctgtcgcatcccttacagcgttgcatccaagatgaccttgatattcccaagccacttgctaagaaaaatatggttactgaagctgcgcagaacgaagatggcatgccagtctccacccagtaggtagttaggccttctagttcagtggtttgcatcatgaagtcaactcaagagcttcatttcgttttatttgtttgcattaaggttgttctgtgtaatgcaaatgaccaattgaatgtcaatttgttgctgtgtc

SEQ ID NO: 18498 - DNA, 1137 bp, Oryza sativa
  ref <308>: DATABASE ACCESSION NUMBER: AK068891
  ref <309>: DATABASE ENTRY DATE: 2001-12-06
gagcgagaccgcgtgcgcggaggccggagggggagaggacgagaggcggcgggcggcggagtagatggccggcggtggcgccgccgcgtcggcgctctcgaccccatggaggtcgctgctgcagcgagcgttggacggcaatgcccacttgaagcactccaccttcttccaactcgccacggtgggtggcggcggcaggccggcgaatcgcaccgtcgtattcagggggttccaggagcaatctgataagattcagattaatacggatgcacgaagcaataagattggtgagatcaggaattgctcctttggtgagatatgttggtactttactgacacttgggaacaattccgtatcagcggattcatagatgtgattgatggttcaaaccccgaacctgtcaagctacagctgagagagagagcttggtttggaagctcagtaaaatcgagattgcagtacttgggaccatgcccaggtcttcctattccggatgatgatctcattaaggatgctcatcttgatccatcagctggtccagtagatgccttttgccttctggttcttgatccagaaaaggtcgattatttgaacttgaaaagcaatcaaaggttaatgttcacaagaaaccagaagggagatgggaccaacagttggatggccgaaaaaattagcccatgactgtttgcggattctattgcagctccaaatttgtttgtggatttatcatggtctactagtacctctcttttccgagcaaactttaggggaactgtgatgtgcactagggttcccgatcttccaaaaggttctgataaacaacgatttgggcggagtcacgacacaaatcgatccggcttcttgaacgcgcacgctcttgagccccgcaatcgcagcaccacgtctatccgagttagtgatgtccgcatcaaactgcatatgttattcgttaacagagggaggaaaaagagtcaatacagtacaaataaatcagagattaatggacagtgcaaataaatactactactataactcttgcctgtacatagtcattttttcttgtttctcttgatattttatgtattccagtttccttacaggaatgttaatgccataccatggatgttgtcctggcc

SEQ ID NO: 18499 - DNA, 2157 bp, Oryza sativa
  ref <308>: DATABASE ACCESSION NUMBER: AK068892
  ref <309>: DATABASE ENTRY DATE: 2001-12-06
gggaggggaggagaagcgaagcgaggaaggtcaagccggggagggcacgcacgcacagatccctcccctctcctcgctgcccatctctctctctctcttcccctcgacgcggcgagatcaggaggaggaggaggagaggggggaagggaggaagggaggctgagatcccgaggccccccaccggagacggcgaatcctggtccggcgcctggtttgcccccggattcgggaggagtttccgttcggggtcgagggatttcgggggcgcgcgcagccatgaacgagaaggcctccgtctccaaggagctcaacgccaagcacaagaagatattggaaggcctcctgcggctgcctgagaatagagaatgtgcagactgcaagtcaaagggtcctcgatgggcaagtgtaaatcttgggatctttatatgcatgcagtgttctggaattcatagaagcctcggggtacatatatctaaggtaagatcggctaccctggatacatggctgccagagcaagttgcatttattcaatcaatggggaatgaaaagtcaaatagctactgggaagcggagctgccccctaactatgatagggttgggatagagaacttcatccgtgcaaaatacgaggacaagagatggataccgaggaatgggtcatcaagaccatcatctggtgctagagatgagaagagctcagagtcacaaactagtgttaacaggggtggccataatcaaagatcttcatttgagcaacaccgcacttcaccagctgcagtgagcaaaattgctccagtggtttctaggacgcccacccaggcaccacatcagccaaaagcacaaccatcagttcccaaggtttcacgtcctcaacccgagaaatcacctcctaatgcaacaccaccaaaggttgagaggccatcagttgcaccacctcctaaggttgactatgcaactgatctcttcaacatgttatcaatggatggaacaaccgagaaagaagcagagtcatcttctaatgatgatagtgcatgggagggcttccagtctgcagagccagtacctagctcagacaaaaaggattctgctaagccagtagaaagtaagccccagtctacatcaggcatagaggacttgtttaaagattcaccagctgtgacagtatcctcagctccagctgccccacaagtaaatgtgaagaatgatatcatgagtctgtttgagaagtccagtatggtttcgccatatgctgtccagcagcagcaacttgcttttatgaccccccagcagcttgcacttctgtctcagcagcaagctttactaatggctgctcttaaagctggaaatgcaccccaagtgattccagggaacgccagtctgctaaatggtaatggttctaatcctgccaatggaggcttgccttcacaaagctggacaagtcttgcttatcagaatcctgggttggctccagtagcagcacagaatggtgccaccaaggttgcgaacaacaatcaggaattctcttttgggaatttcaattttagtacacctggagcatacaacactagctcatctgtcccagcaaatggggccgcaagtgcagctgctaacaagagcacatccccgacctcttcttccctcccctctcaatcaggcaaagaatatgatttttcatcattaactcaaggactgttctccaagcgatgaacacttgctatacttggaaattaaacaaatgggcctgtatgcaacgatggacacagcagattttattagggggaaccgggggccttgtacactcttttatgaggcagcatttcttcttgtggatattacgacaccttgtagctgtcctggacaaataagaggaagaatatagcagctaattgcatatgttgtttcctacagctgaagagagtcgatattgttcatgatgccgatctctttgaatagaggacgccttgtggctttgttggacttacatttataagagcataatgcaactattttattctctttgttcatgacatagttacaatacgtgacgccgattattttctactgtaccatacttggattttgttattcacaaaacatttgattgtattattatgccaagtgagctattacacgcactgaaccaaacttaattccctg

SEQ ID NO: 18500 - DNA, 2608 bp, Oryza sativa
  ref <308>: DATABASE ACCESSION NUMBER: AK068893
  ref <309>: DATABASE ENTRY DATE: 2001-12-06
agtggttgccctcgccatcgccggcgaactcgctcgcccacctccacctgtgccgccggcggcgccggctctccctcccgccgccggcatcttcgcgctcctccgttctcggctccccgtcagcttggttcgcagcggtgtgcggtggcgtgaggacggggagcggtttctcgcggggcccaacgttgcctccggcggcggcaacgagtccttcctcttccaggtgtggtcaaatcgtggttgctgagcccttaaagcagtgcaaaaatctcacctggtttctatccactggaaagagttgagcattggaatttagaaggcaacttggtttatttccttgctgctgtgacaaattctcacacagtaatggcaacaagcggatcccttgatgaggtgcaagagataaatgtgcacctggaaacagtagaaaatgcactcgtgaaaacagtggttaatgaggatgattttgtcgatgaggaatcaggaagtgatactgatgaacaagccacagaagatgacttggaaatcatggaaccaaaggaagggatggcatttgccagtgtgaatgatgcttttgtgttctatgagagatatgctcagaagaagggattttctataacaaggagaatctcaagcactttccaatccttcaccttcgcttgcagaagacaagacaacgctcaatgctcctcaaacaatgcatggaagcatcatcagaatgaatgtccagctaagataattgtggatcttgatggtcctgacgacaaattcttcttatcttcagttacgcttgagcacaatcacgatctcagtccaagtgaaacaagtcgaatggaagttttcatatgtaacaaaaaactgattcgtgtgctaaaagaagaagggtgtcaaatgggagagcagacaatcatgccaacaagaagtccagtactccttgcttgcaagctgaaaatcgcccatttggtcaaaaggatcccatgaacaatttgcaattggaaagaaaactgaagctcagtgatgcatataggctttatcattacttcttctgcatgcagttcaagaatcctagctttttctatgctttggactttggcaaggactcctgcctgagaaatgttttctgggcagatgcaagaagtagggcttcatgtaaatatttctcggatgtcgtgacagttgacactacatacttaatgaacaaggagagcatccctcttgttccttttgttggtgtaaatcatcacaggcagccgattttgttgggatgtggactactatcagatgagaccactgtgacctttctatagctgttcaaatcctggctagctatgtcaaataagccaccagaagtcataattactgatcagtgcgatgcgattcaggatgctatcgagaaagtttttccacaaacttgtcatatatggcgtttacagtctgtcatgaagaagatgcctgaaaatctcagtggattctcaggatttcaaagcattgaaaatgctttttcaactgtggtacataattcattgacacaaactgtttttgaaaacaattggagtaagataattgacaagtttggccttcatggcagaagcgcatggcttaatatgctgttctgtaataggcataaatgggtgcccacttatgtgaaaaataacttttgtgctggtatgttttgcacacaaaatagtgaaagcattggtagtttatttcatggatacatcaattctaccacaacgttggacgagtttctggaccaatataataaaacaattgtgggcattgattgtaaggaaactgatgctaactggaaatcctcacatgaggttgtaccatgtgtcacccattatggcattgagaagaaattccagaaggtttatacaaataaaatgtttgaagaatttcaagagcagctaaaaggtaagatgtactgttatccaactcttctgaaacaggaaggttcggtttacatattcaaggtgacgcaagatgttaaaattagggagcaacaatgtagcttggatttcacagtgtggtgggacagagatgattgtgatggaagatgtaaatgcacatgccgtcatttcgaattccggggaatattgtgtagccacatcattaccgtacttgctctactgaaggtcaaaaaagtaccccccaaatatgtattgcagcgatggagaaaggatatgattcggagacacggtaccattactaactggtcctataatgagatggtcgactcaccggttgcacgaaggtttgatttgttatgcaaatccttctatgaagtggcagagaaggcagtggtatcaaatgaactgctcatgttggtgctggatagtgttgaagaattaaaacggaaggttgatgcacatacagcgcaaaattcatgaaattcaggtctctaatccttcacagagcagaccatgaggtgtgatgatcatgaagctccctttctcctgacaagaacaaccgacattttcagcgtcaccatgtaagatatctttcttctagctgaaacatttcgaggggtaatgaaactactgatttcaatctgtaatctcagtgattgatatgtgtgaaattattgatgtgaagttacgttctg

SEQ ID NO: 18501 - DNA, 1382 bp, Oryza sativa
  ref <308>: DATABASE ACCESSION NUMBER: AK068894
  ref <309>: DATABASE ENTRY DATE: 2001-12-06
ggctgcggatcagtgtggccaagcagaagcagcacacacgaacactcgaaacaccgctcctgcttcaaattcgcatggctccgagaggcagctactgcaggcgggtgatgggcgtggccgtcgccgtggcggcttgcgcgctgtgcctcctgccggcgacgaccagcggcgcgctccgcgtcgggttctaccagagcagctgccccaacgccgaggcgctcgtccgccaggccgtcgccgcggccttcgccagggacgccggcgtcgccgccggcctcatccgcctccacttccacgactgcttcgtcagggggtgtgatgcatccgtcctcctgaccaagaaccccgccggtggccagacggagcgcgacgcgacgccgaacaacccgagcctccggggcttcgaggtgatcgacgccgccaaggccgccgtcgaggcggcgtgcccgcgcaccgtctcctgcgccgacatcatcgcgttcgccgcccgcgacagcgtcaagctaaccggcaacgtcgactaccaggtccccgccggccgccgcgacggcagcgtgtccaacggcaccgaggccctccacaacctgcccccgcccaacgccacggcgcagcagctcgccgacacgttcttcgccaacaagttcctcaccctcgaagacatggtcgtcctctccggcgcccacaccgtcggccgctccttctgcgcctccttcttcaaccgcgtctggaacggcaacacccccatagtggacgccgggctggacccggcgtacgcggcgcagctgcgggcgctgtgccccacaagggacacgctggcgacgacgccgatggacccggacacgccggcgacgctggacaacaactactacaagctgctgccgcaggggaaggggctcttcttctccgacaaccagctgcgggtgaacgccaccatgaacgcgctggtgacccggttcgcggcgaacgaggcggagtggaagcagcggttcgccgacgccatggtgaagatgggccacatcgaggtgcagaccgggcggtgcggccagatcagggtcaactgcaacgtcgtcaacccgtcgacctcctcgccggaggtcgagctggccggcgaggatcaggagaccggaggcgccgtcgcggcaagctagctagctaaccaatctaatcatgcatgtcggccgttggatgcgagtgatttcctttaatttcctttttttgacgtgcacgaacatttaatttgcgtgtactagtgtcgtcgtgtcgtgtcgatcgatctttcgtacgtgcatttgctcttggaatgttttaggtcggattccagtgatgaagaataagtactacgtatgtacacgtaccatgtgtgttttattaatcgtgctact

SEQ ID NO: 18502 - DNA, 1015 bp, Oryza sativa
  ref <308>: DATABASE ACCESSION NUMBER: AK099076
  ref <309>: DATABASE ENTRY DATE: 2002-08-28
ggcctacctccactctctcgcgctcgctctccaatgccgccaccaatggcgctctccatctcctccaccgccgcggcgaccgctctcctcccgactctcccgccctcgcgctcgcgcctgcgcgtcgcgccgcgcagggcggcggctcgggtggcgcgcgtggtgtcggccggatacgccgcggggttctacggcggggcggcggctgcggccggtggcgagaacgacgaggtgggggatgaggagggttcgtcctcggggttcggtgctgggctagggataggaggcggtgggcttgggatgtcggccgcggaggcggcgctggcgctggaggagcgggagatgccgccgtgcccgcccgggcttcgccagtacgagaccatggtcgtgctccgccccgacatgtccgaggaggagcgcctcgccctcatacagcgttacgaggagctccttgttgcgggtggcgccatgtatgtggaagtcttcaaccgaggagtcatcccactggcatacagcatcaggaagaggaacagcaggactggtttgccatccacctactacgacggaatctacctcctcgtgacatacttcaccaagcctgaatccctggatgctctgcaaatgaggctcaatgctgacgacgatgtcatccgctcaaccagtttcaaggtccgcaagcggaaagccttttaagatcagtttcaccacctggactcaggtttccatgttttggggaatatgtttatatcatacaagaatcctactgccatgggaggagattggtttttcgctgcaatcgttgagaaaaaatgtcgccctttctgttgataatttagaagaaatttgtcttccttttttttcgttatagcactgctctgatcttacctggtactcctacacgttaagggatattgaacgaacacttttgtggagcatggcctgctggggcctctggaacaagttatgctgttaacaaaatcagggctcatttcctgtacgccatggcatttcattt

SEQ ID NO: 18503 - DNA, 2178 bp, Oryza sativa
  ref <308>: DATABASE ACCESSION NUMBER: AK068895
  ref <309>: DATABASE ENTRY DATE: 2001-12-06
gagccggtgttctactggcgactggcctcctcgagttcttgatcttggcggattgccgtccatggagaccacacgaagcgatggcagcatcatggtggtaggggcggtcgatatcgattgcccccagcaccggctgtgcgggtaccgcgacttgatacggggcgtctccggcggcggcgccgccatgtcgcgctggccggaggcggcgcccttcgtcccgcagatcgccagtactggtggcgatggtggtgcagcggtggccggcggcggctggtcgagcgggagctcaagcccggctccatcgtcttgcagctcctcctcctcttggcgcgagggagactgctgctacgacgtctgctggtgttcttcttccacggtccacgagcttcgcagcatcgcggagcggatggtccgtgacggctacatcgaggggctcatcagggctttcggtggcgcggccactgccggagccgccggacggcgtggccccccagacgagcttctcctccataactggttctcgcagctcgacgtggagtgggtcctgctcctccatacctgcagcgaggaagaagaagacgaacacgtacgacgacctcctcctcttcccgtggaagatttgatggcgcttatggagcggtggatccgagccctcctaaccatggtgcaggttctctgcatcacgcagctcgagctccgcgccaagaagccaaccgtcgccggagtccggagagccatccagttcttcctgctccgccgcgacagcaagacggcgcacgcggactacgtgcagcaggtggtccagttcgcgcggttcgcggaggagagcatcctcaggatgctggccttcgtcgacgccgccactctcgccgtcgtcgaggaggacgacgacgaccaccgggtggccgaggcgctcccggggatgttgcaggtgtacgcctgcatctccgaggcctctccgaccgtgctcgccatgttcaaagaagcatccgatctcctcgcttccggctcctcccgccatggccaggaggcacaggttttcgacggcatggacggcatcttcctgcgcaagaggaagaagctgagcgacgcgatctgggacatgatggagaaggttcgatcctccttcttgcaggatggatgctggcaagtctcgccggaggcatcagcatcaggagtccatgagaccaccgtgctgatgatgaactacatcgcgcttctctggcgcaacgacgacgtcctcaccttcatcctgcaggatcaccacttcagcgtgttcgtctctcacacccagggcttcagctcggtcgtgaacctgatcaccgacatcatctcttgccttggccacaaattggaggaaattgcctcctccctttccaattccatcttggacccagcgttgcgttgcattttcttgctaaacaattggcagcttgtgttgcaccgcatcgaatccctggacctgccatcttgggccttgatagacagatgcaggacacggaggtacatagacacttacattgacgtcttctggtcgcctatgttgtgctgcatcttcatcggaaattcttctgatactcctcgaaagaaaacctacagacctgctttcggcttccgaagatacctgtctcttgaaaattttgagatagaattcagaaaaacctacgcgaagcacaagtttttcaaggttccagaccctaagcttcggcagagattacgtcaagccatcatccagaaaatcattccgcattatagcatgtatctggaggagcgagcagcaaggggaatgcacaatcgacctcccaaaattactcctgagcagttgaaggagctattagaagaattattcgaaggttgaagcagatgaatttcagtggaataaatggctatatatttaattagcactcaccgttttgtcaccctagcttgggtcgtaggtttgaaggtttgtgctccggccagcaattaaggtgtggtttgtcttctttggactttggtgattatggtgagagtataattcaccaagttcctgcaaacagaaacttggttagtcttgccttattcgccggagaccttacttagtcttgcctgcttgtgaagatgggggttactaaaactgttgaaatgagttttacttaaatgttacaaatttaattatttccgttgtacagataatcc

SEQ ID NO: 18504 - DNA, 1409 bp, Oryza sativa
  ref <308>: DATABASE ACCESSION NUMBER: AK068896
  ref <309>: DATABASE ENTRY DATE: 2001-12-06
ggtactacgccaatggctctccgctgcctagctgctgccgcagtacagcttgatcgttgcccgtaacctcccgtggctccgatcccgtctccggcgcggcgcgcggctcggcgttgagacagtttgccgcctcatgtcccgggagctggagctgctgctgtttttgctggccctacgggcgagcggcgaggtcgtcgcgggttcggcggaggcagcggcagcggcagcggcgtggcccgcgctgcaggtggggttctaccatgccaagtgccctgtcgcggaggacgtcgtgctgggcgagatgaggatgatcctcgaggaggatcccacgctcgcgccgtctctgctccggatgcactaccacgactgcttcgtccaggggtgtgacggatcgatcatgctgaggtcgaggagcgggaagggggagagggacgcgacgcccaaccggagcatgcggggctacgacgccatcaatcggatcaaggcgaggctggagaccgtctgcccgctcaccgtctcctgcgccgacatcatcgccatggcggcgagagacgccgtctacctgagcaaggggccgtggtacgacgtggagaccgggaggagggacggcgacgtgagcgtggccgagtacgccgagaacgacctggcgccgccggactccaacatcgtcgacgtcaagaccttcttcagcgtcaagtctctcaacgccaaggacatcgccgtgctcttcggatgccacagcatcgggacgtcgcactgcggggcgttccagaagcggctgtacaacttcaccggaaggatggaccaggacccgtcgctggacgccggctacgcggcgaagctcaagaagctctgcccgccggggcacggccacgaccacgaccacgacggccatggcggcgccggcggcgcggccaaggtgcccatggaccccggcagcggcttcacattcgacctgagctactaccggcacgtgctcgccacgggcggcctgttccagtcggacggcagcctccgcgacgaccccgtcacgaggggctacgtcgagaagctcgccaacgcgtcgtcgtcggaggagtacttcgccgacttcgcggcggcgatggtcaagatgggccgcaccgacgtgctcaccggcgatctcggggcggtcaggccgacgtgtgacagcctcgtcgactagtttattcggcgtcccgccacatttgtgatctgtagaattttatatggttttctctgtaacatatatgtaatttcgatttagattagggaaaggttgagacttgagagaagttgcagtttctacgcttttgaggagactgattggaacagcgtatgaatctagagttaaacacttgtcagttgtcaaactactacaaactaatgaatctgtacagatgggcttgatg

SEQ ID NO: 18505 - DNA, 1384 bp, Oryza sativa
  ref <308>: DATABASE ACCESSION NUMBER: AK068897
  ref <309>: DATABASE ENTRY DATE: 2001-12-06
gaagcgtcatttttcctcttcctctctactctcggtcttctctcatcgctcgcctgtatgtcttctccaccgctgcgcatctccacagccggcgacgccctccctctccgccgctccccctccccctccccccaccggcggcacccctccctctctgcccccttcctccttagccacggcccaaggcggcgagcagcgccctccttctgcaggcgacgccctccccccagccggcggcgccctttcctcagcgacatcattgtcttctccggcacagtggaggcaaccccttccgttagtgcctcggcgacaacatcctccttgcggcgcacggtggggcgctcgccaagccgccacgacctcggggcagcgggtgcttgcctctgatgtgagtagtggcgccggtttttttttgttttctgggatgattttgattcagtgccgttgaatttgtgattttgtgattctcttgtttctttgcgtaattcttggatcggatcggatttgatctcttgttcaataatctgtattgcccgtacatgacgggtgcgagctggtcggagcgagatgcaatctcgcatactgatacggatgaaaaaattcctaggaaaataaaaaaatggattgaagcggacttttctccttttgttttatttttttcgtcctttttggttattattacggacgatattttttgaaatccgacagatccttttttttttccacccgattgaatcggatcgatttttttatgttttgttaccgcgtcgacaaaatcggatcgacttttttttcgcccctgattttttttttcacaaggacgacggaaacaactcatactttttaagtagcacaaaaagtagcatatatatatatatatgtatatatatatactatatacttatactacttaaaaaataagaaacgttttcttcgtccgtttaataaataaaaaaaagcgaaaaaaaacaaaagagtccgattccccttggaaaaaaagatcggatccttaaaaggaagaaaagaaactttccttcgtccgtttaataaataaaaaaaagcgaaaaaaaaacaaaagagtccgattcccctggaaaagaaagatcggatccttaaaaggaagaaagtccgagaaaaaataccgtttaaataaaaaagcgaaaaaaaagtccatggataggtatgaatcgaattattataaccgtttaaattcgcttttttaaaagttaaatttaactttaaagtccgactcccccggtggaaaataaaaaggagagaaaaaaacaaaaaaagaagagaaaaaatatctatcgcaaaaaaaataaaaaaataaaagggcgttcgacttaaaaaagtctgactccctatggagaaaaaaaagggg

SEQ ID NO: 18506 - DNA, 998 bp, Oryza sativa
  ref <308>: DATABASE ACCESSION NUMBER: AK068898
  ref <309>: DATABASE ENTRY DATE: 2001-12-06
gcttctctcctctcctcttctcttctcttctctggtggtgtgggtgtgtccctgtctcccctctccttcctcctctcctttcccctcctctcttcccccctctcacaagagagagagcgccagactctccccaggtgaggtgagaccagtctttttgctcgattcgacgcgcctttcacgccgcctcgcgcggatctgaccgcttccctcgcccttctcgcaggattcagccatgaagggggccaaatccaagggcgccgccaagcccgacgccaagttggctgtgaagagtaagggcgcggagaagcccgccgccaagggcaggaaggggaaggccggcaaggaccccaacaagcccaagagggctccctccgctttcttcgtttttatggaggagttccgtagggagttcaaggagaagaaccccaagaataaatctgtcgctgctgtaggaaaagcagccggtgataggtggaaatccctgaccgaagcggacaaggctccctatgtagccaaggccaacaagctcaaggccgagtacaacaaggccattgctgcctacaacaagggcgagagcactgccaagaaggcacccgccaaggaggaagaggaggacgacgaggaggaatctgacaagtccaagtccgaggtcaatgatgaggatgacgacgagggcagcgaagaggatgaagacgatgacgagtgagccttccagtggacaagatgggagcagcaagacgctaagggcggcgggcgtcctaaggagcctatccatcatcatcatcgtctactagaattattcagtttcacttcacatcgtgatgttttactttttctctcgtcctataacggatagcgctccttgttggcgccactggtgggtgttgtggtgcagccaatgtcttgtctccaccgtcaatgatccgcttgtacctagattactctttccattgtcatcggctaacattgtgataatatcagtttgcgtatgttagatt

SEQ ID NO: 18507 - DNA, 1674 bp, Oryza sativa
  ref <308>: DATABASE ACCESSION NUMBER: AK068899
  ref <309>: DATABASE ENTRY DATE: 2001-12-06
ggttcgatcaccaccaccacctctcgctcatcccaatccccatcacgagcgccccagaatccctcccctccctcgtgcaccgcctcccgtcccatccagctccttcttcttggcgggcgagagatcgatcgagctggctgcgtgtgagcgagttgccacgagcggccaagagattaacggagggggcggaccagcggagcgaggtcgttgaggggatatggagcggtacgaggtgatgagggacatcgggtccgggaacttcggggtggccaagctcgtccgcgacgtcgccaccaaccacctcttcgccgtcaagttcatcgagaggggactcaagattgatgaacatgttcaaagggagattatgaaccaccgatcactgaagcatccaaacataatccggttcaaggaggtcgtgctaactcccacacatttggcaatagttatggaatatgctgctggtggtgagctatttgaaaggatttgcaacgcagggagattcagtgaggatgaggcaaggttcttcttccaacagctgatttctggagtgagctattgtcattctatgcaagtatgccatagagatttgaaactcgaaaatactctcttggatggcagtgtcacacctcggcttaagatttgtgattttggttactccaagtcttctgtcctgcactctcaaccgaaatcaactgttggcacaccggcttacattgctccagaggtcctctctagaaaggaatacgatggaaaggtagctgatgtttggtcatgtggggtaacactctatgtgatgcttgttggtgcgtatccttttgaggaccctgatgacccaaggaacttccgcaagacgatcactaggatactcagtgtacagtattcaattccagactacgttcgagtttcagcggactgcagacatctcctgtcccggattttcgttggaaatcctgagcagaggataactatcccagagatcaagaaccacccatggttcctgaagaacctgcccatcgagatgaccgacgagtaccagaggagcatgcagctggcggacatgaacacgccgtcgcagagcctggaggaggtcatggcgatcattcaggaggcccggaaaccgggcgacgccatgaagctcgccggcgccgggcaggtcgcctgcctggggagcatggatctcgacgacatcgacgatatcgacgacattgacatcgagaacagcggggacttcgtgtgcgccttgtgatcgatagatgccaaattcgatcgatcgatcatcagctggttgaagactgaagtagcggggcagcgagctttctttgtggctgatgtgttgctgtcattcatgcctcgtttttacttctgggatcacatatgctttgtgaccaagagattgccatcgctgtggataaataagatgaatttaattgcatacttagttatattcttggcagagtgcttttgtgctgctgattctgaattttagttgtctgatcatttcttctttatgcaaattactatcgtctctcgcaattgacaaccagcttggagcagattctgttttactatcatctttgcaccgcagagtatggacatatatcgagtgcacatttacatatagggaatgcacttatatgtgtaagtaataatacaatactttggggttcatgtgtt

SEQ ID NO: 18508 - DNA, 1218 bp, Oryza sativa
  ref <308>: DATABASE ACCESSION NUMBER: AK099077
  ref <309>: DATABASE ENTRY DATE: 2002-08-28
gcccctctgaccccgatagaaagggaggaaaaaaaaaagagaaggcgaaaccccaaatccgccgcgatggccgccgccgccctcctccgccgctcgccggcggcgcgcgccctcctctccccggcgctctcctcccgcctcgtcgcctccaagccccactcgtcgtcccccgcgccgccgccgccgccgtcgaaggcgggggcgaacaccaagacgttctcgatctacaggtgggatcccgactcgccgtcgacgaagccccacctcaaggactacaaggtggacctctccgactgcgggccgatggtgctcgacgtgctgctcaagatcaagaacgagcaggacccgtcgctcaccttccgccgcagctgccgcgaggggatctgcgggagctgcgcgatgaacatcgacggcgacaatggcctcgcctgcctcaccaagatctcgtcggcgtcctcggcctccacgatctcgccgctcccccacatgttcgtcatcaaggacctcgtcgtcgacatgaccaacttctacaaccagtacaagagcgtggagccgtggctcaagcgcaaggacgcgccgccgcagcccgggaaggagatcccgcagaccaaggccgaccgcgccaagctcgacggcatgtacgagtgcatcctctgcgcctgctgctccacctcctgcccctcctactggtggaaccccgaggagtacctcggccccgccgcgctcctccacgccaacaggtggatacaggacagccgtgaccagttcactaaggagcgcctggattccatcaacgacgagttcaagctgtaccgctgccacaccatcaagaactgcacacacgcctgccccaagggcctcaacccagggaagcacatcgacacaatcaagaagctccagctcgaggcctgagtgagcagtatatctctcttcatgagatgaaactctgtcgaaaaattgtaatcagccagcctcttgtttctctgcctttttagtccatcgcctgacgaataattgctggaacgcaggattcccttctgggcctccgatctgatgacttccatttccatcagatggagggagcattgtagggagtgaataatttgctaccgtattttacgttttgttctgtatctaattcggtttgttgttcaccgtccattccattatgtcgtgcggtttatgcatgaagtaattcatggattttacctttgtttt

SEQ ID NO: 18509 - DNA, 1444 bp, Oryza sativa
  ref <308>: DATABASE ACCESSION NUMBER: AK068900
  ref <309>: DATABASE ENTRY DATE: 2001-12-06
tttagatgtatttggtccatatgagcttctcaatttcacacttggttcctatgaagatgaatatccaaatctagcttcatcaggtttaagcaaagctgcactgggtggtatcttggcaagcacaatagctagtgctattgcactttctgcagtagttactgctcttataatgagaaggaattcaagaactaatagaatttcaagacgttcattgtcgagattttctgtcaaaattgatggggtcagatgcttcacatatgaagaaatggcttctgctacaaataattttgatatgtcagctcaagttggtcaaggaggttatggaatagtctataaaggaattctagctgatggaacaattgttgcaatcaaaagggcacacgaggattctcttcaaggttcaacagagttttgcacagaaatagagctgttgtctagattgcatcatcgcaatctggttgcgttggttggttactgtgatgaagaaaatgaacagatgctagtttatgaattcatgccgaatggcactttacgtgatcatctttctggaaagtccaaaccacctctcggttttggtttgaggctgcacattgcattgggtgcttcaaagggaattctgtatctccacaccgatgcagatcctcctatatttcaccgtgatgttaaggccagcaatattttgttggattctaaatatgtcgccaaggtagctgacttcggtctttcgaggcttgctccagtaccagatgttgaaggggctttaccagctcatgtctccaccgttgttaagggcacccctgggtatcttgatccagaatacttcctaactcataaattgacggataaaagtgatgtgtacagccttggggttgtttttcttgaattgttgaccgggatgaagcctattgagcatggtaaaaacatagtgagagaggtaaaaaaagcttaccgatcaggcaatatatctgaaatcatggatacccggatgggcttgtgttctccagagtgtgtggatagcttcctccaacttgcaatgaagtgctctcgggatgagactgacgctcggccatccatgacagagattgttagagaactcgagctcatcttgaagataatgccagagggtgatcttatccagctggaaactccacagacatactcaggacgtgctatgagcaaggaccctatgagtaaatctacatcaaattcaacaaatgggaattacttggcctcatctcaaacttttactagtgttgatgcaagtagtagcggcgtgcttctgggatggtgagtcctcggtaatgttatggtagttctaaacatgcagcaatactctgtaatattgtggacttcacactttcatttgtcaatgaaccagccagccttgctggaaaatgcaatacatgatagtaacaattgataatgcaagaaaaatgtaaatgtt

SEQ ID NO: 18510 - DNA, 2066 bp, Oryza sativa
  ref <308>: DATABASE ACCESSION NUMBER: AK068901
  ref <309>: DATABASE ENTRY DATE: 2001-12-06
gaacattcattccatccttgccaggccatctcccactcaaagtctcacagagctagctgatcaagagccattacagattgtggctcaaagcttaggctacacaaattaagatgaccatggctatctcctctgctcttcctagccctctactcttggcggcttccctactgcttctcatcgtccaagctcagggcatcactaggcactacgaattcaatgtgcaaatggcgaacgcgacgaggctgtgcaacaccaagagcatggtgacggtgaacgggcagtgccccgggccggagctggtggcgagggaaggcgaccgcgtcgtcatccgcgtcaccaacaacgtcgcgcacaacatctcgttgcactggcacggcgtccggcaggtgcggaccgggtgggcggacgggccggcgtacatcacgcagtgcccgatccagacggggcagagctacgtgtacaacttcacggtggccgggcagcgcggcaccctgtggtggcacgcccacatctcctggctccgcgccaccgtctacggcgccctcgtcatcctccccaagctcggcgtcccctaccccttccccgccccgcacaaggaggtccccgtcatcttcggcgagtggtggaacgcggacacggaggaggtggtcaaccaggcggtccagaccggcggaggcccgaacgtctccgacgccttcaccatcaacggcctccccggccctctctacaactgctctgcccaagacacgttcaagctgaaggtgaaacccgggaaaacgtacatgctgcgcctcatcaacgccgcgctcaacgaggagctcttcttcgccgtcgccaaccacacgctcaccgtcgtcgaggtcgacgccgtctacgtcaagccgttcaccgtcgacaccctggtgatctcgccggggcagaccaccaacgtgctcctcaccgccaagccgtactaccccggcgccaacttctacatgtccgccgcgccctactccaccgccaggcctgggaccttcggcaacacgaccgtcgccggcatcctcgagtacgagaaccccgccatgtcgccctccgcggcgagcttcgtcaagggcttgccgctgttcaagccgacgctgccgcagctcaacgacaccgacttcgtcaccaacttcaccgacaagctccgtagcctcgcgacgccggagtacccggcggccgtgccgcagtcggttgacaagcgattcttcttcacggtcgggctgggcacgctgccgtgcccggcgaacatgacctgccagggccccaacaacacgcagatggcggcgtccatgaacaacgtctccttcgtgctcccggcgagggcgctgctgcagtcccacttcaccggactctccagcggcgtgtacgcgccggacttccccgtcgcgccgctgtcgccgttcaactacacggggacgccgccgaacaacaccaacgtgaagaccgggaccaagctgctggtgctgcggtacaacacgtcggtggagctggtgatgcaggacaccagcatcctgggcatcgagagccacccgctgcacctgcacggcttcaacttcttcgtgatcggccaagggttcggcaactacgacgccgtgaacgacccggccaagttcaacctcgtcgaccccgtcgagcgcaacaccgtcggcgtgccggccggcggatgggtggccatccgtttcctcgctgacaacccaggtgtatggttcatgcactgtcatttggaggcgcacacgacgtggggcctgaggatggcatggctagtgttggatgggagccatccgaaccagaagctgcttcctccgccgtccgatctgcccaaatgctagtcgggaccttaccacagatgccgttgattcttctttcctcatttcatttgttcgccaatttgcgattgctttctcctgaaggagattttagtgtgttagcccgttcttagctaacttttgtgacattattttgttcttttttcttttatttgtgtacaactatacaatgacactgttttgatgcttctttgaataaaaaaatgggcattaattgct

SEQ ID NO: 18511 - DNA, 2604 bp, Oryza sativa
  ref <308>: DATABASE ACCESSION NUMBER: AK068902
  ref <309>: DATABASE ENTRY DATE: 2001-12-06
gctctcctattttcatcagcttcccttgcaagccttgctcctcctcctcctcctcctccaaagtccccccaaaatcggcgcctccccgtccaattctccgccgcgatccgctccccgaacccgccggagcgcgcaggaccgcgcggggacgccccgggcgcaaatgcgcgcgccccctgcgagggttggagattgttgtcctgctactgagatggatgaagtgccgggtaatcaagaagatcccagacttggggcctatgccgacaagatcactgatgcgatgtttgcggaccatgtggagttggggtctcattatgcaggtgattcttcttcagaggcaggatgggctccaatgatcgcgagaatgcagtcgcagtcgcagctggggagtaaccagcttggtgtctcctttgagaatggcagtttgccagatgacccggcgtcgttggcatcggcattcaagaacatgagcttgggattcagggattttactgttggcactcctgctaatcctgtcagtgttgcacccctaggtggacattatcctgcaagtcatgtgatttcatctggtgagaccacaatgaactcatttcatcagcaggagtttgctcaagatggtttcaggccttcatctctgaatcccaatgttgctgaatacatgaagccgaagtacggtgtacacaatgttcagatgtgcaccgggctgcatggctcggattatgtttctggggacccgtataatctaccatcatcagcttcacctttacagaaacagtattttattgatgggcaattccgggctaatgcaccatatcagcagactggctcgaatttcatgaggcaagattttgatgctgacagtcattatcttttgcaatcccagtatgcttatcagcaaatgccacaggtcgctggatctgatgttcattgggttagaagcaaccaacatggtgttcactcttctatccctgcagcttcaccttatctcaggacaccaatggttggtcagcaagcacatagcagtgctgatacttactggaatggtgctgctatttcacatggaaacaaccagctgaattccacatttgtgaacaattgctcatgtataatttaccctgattgttcacgcgaaatctgcgaatattgccagatgaagcaagcagaaaagttgaagcatcgttatatgttcaggcgttcatccaaaggtttcctgcagcctcagatttttgataaggtcaacattaaatgttttcctggaaagacgatggtgaagtctgatgatataaattcagcgagaaatattcagtctgtctttgaacctaatggccgcattgaaatgaatcagagaattaaccagcatggacacaatcaacatcttaatattcagggcaacgatttcttgctttttgacaggctaaactcccaggctctgtcacctgtggaatctgaatatggtttggccatgaaaattcctcaaatgagttatagttcagtagatgaagttgttgggaaaattcatctcttggcaaaggatcagaatggctgccgcttcctacagaggatatttacagaaggtacttcggagaatgttaaaaaggtctttgatggaatcattgaacatattggtgaacttgtggtcgatccatttggaaactacttggtacaaaagctacttgaagagtgcaaccatgatcagaagatgcatatagtctatgaaataaccaaaagaccagggcagcttattaaattttcatgcgacatgcatgggacacgtgtagtgcaaaaggtgatagaaacaataaactcgccagatgaagtttccatggttgtatgtgccctgagctctggtgccatcactttgatgatggatgcaaatggctgtcatgttgcactccgctgcttgcaaaaattctcacatgagcacaaagcattccttcttaatgtggccatggaatattactttgagctagcccaggatcgtcaaggttgttgtatcattcaaaaatgcattcttcatgcaaataaggaacagaagaaccagttgttgtacaatatcacttccagggctcttgagctgtcagagcatcagtatgggaactatgttgtacagtatattcttgatctccacatttcatgggcgacagatgaaatactggacaagctggaagatcatttcggatctctgtcgatgcaaaaaagtagcagcaatgtggtagagaaatgtttaaaagaagcatcgtggcctaaacgtgttaaaatcattcacgagcttatcaatgaccctaagttactgcatatcttgatcgacccatatgggaactatgtgatccaaacagcgctcaaggagtgtgaggatgctgcagtacgcgctgtgctgatcggagccattaggccacatgttgctgctcttcgaaacaacatgtttgggaagagaattctgtcaaaaacttacctgaagaacaggaagcactaatcttgcacctttgggcttttcttctggagtccacctgtcaggcaatgtgcataaggtgcaacactaatgtatctgtaagaatcatatgctacagaatagatccactcaaattaagtagattaagaaagatg

SEQ ID NO: 18512 - DNA, 1326 bp, Oryza sativa
  ref <308>: DATABASE ACCESSION NUMBER: AK099078
  ref <309>: DATABASE ENTRY DATE: 2002-08-28
ggtggaagaggtactgatcatctgaaacaccataatgtggaagatgtcacaagtcgatgagtggaagccggtgatcgcaatgctgttctttgacctcatatctgctgtgacaacagccttgctcaagaaggcgctcgcggaggggcttgaccgtcttgtactcatcacgctgcgacaactagtcgccacgatcttccttgctccgattgcctatttcaaagaacggggtaaaagacctaagctcacactggagatccttgtgtacctcttcttcagtgcagcacttggtgccgcgctatctcagtacacattcttctatgggttgcagtacacgaccgcaacattcgccataactttcaccaacatgtcccctgtgatcaccttcctcattgctgcactcctaagggtggagtcactgaacatgaagaacaaggcaggagctgcaaagatcatcggaacactcatgtcattcgccggtgtcatgctcctcaccctctacaagggtgtggccttgacacaccaagttgtgtcttcagtgagctcagatcatcaccatgcagaaatagacaacccagcaaaaagagctggacactcggtactgtagcattactggcaaactgcctttgcttctccttttggcttctgctgcagaccaagcttaccaagaagtacccagcactgtactccagtactgcatacatgttcttaatcagctccctccaaggtggggccctgacggcagcgatacaaaggcgagcatcagtgtgggttctgacaaggacagtggagattgttgcagtactatatacaggaattatggggtctggagtgggctacgtactgatgacatggtgtgtcgaaaagagaggtccagtgttcacttcagcctttattcccatcatccagatcatggttgccataattgatttcttctatctacatgagaacctctaccttggaagtgttgttggatccatattgatgattctgggcctatatattcttctgtggggaaagaacagggatacatctgcagcagcatctgccaaagaagccaaagaagaggaagaggacaaggagaagcaagtcaaaccattaggaccaaactaagttggtattgtactagtttgggattgtagaacatgaaaaatagttcatcctcctactaccagtagtgttggtattgtagtttcttttactgggaaacatgatgtattctcccaatcaccgcagttatgtttaattatggaacactgtaaatcaccctgctccctgcagctcaaaattcacttgatgcttaaccctgacttctggggcaggttatgc

SEQ ID NO: 18513 - DNA, 1690 bp, Oryza sativa
  ref <308>: DATABASE ACCESSION NUMBER: AK068903
  ref <309>: DATABASE ENTRY DATE: 2001-12-06
gaacatcagagtcccaatctaactatgatcactcgatcatctcattacaactacatcgattagcatcagcaagctgcaatggctgcttctgctgctctgaagatggctgccctgtgcgtgctggttctgtgcagcattgggtcatagtcacaggcgatgatagcccacgcgtcatcgactgctaagcatgacgcagccgccggcgcgctgctgcgtgagctcgtgcggaacgtcgtcgccgaggagctaggcctctccggcggcggcgccagcggcgccggcggccgtggcaacgtcggcgacgcctgcccggcggcgtgccagaactgcctgatcctctgcgcgatcaagtgcgtcctgaagcccaccccccatctcggtgtacgcagacgatgcagtcctgttctttaggccaacggccggtaaagcaagcacgatcaaaagactgctgacgctgttcggtgaggcaacgggactcaaaacgaatttctgcaagagcacgatcacaccgatacaatgcaacgatcagcagcgggcgatggttgaggccatcatttcctgtcatgtggaagatttacccatcacctacctgggcctcccactaggaacaaggaaaccaacaaaagctgaagtacatcccatccttgacaaattagcaaagaaagttgctgactggaaaccaaagatgctatccatcgacggcagactttgtttgatcaaatcagtactcatggccctacctgttcactacatgtcggtcctgcaattcccgagatgggcaatcaaatacatagagcgaaaatgccgaggattactttgggaggggcaggaagaggtgagtggcggacattgtctggtctcgtggcgaaaggtatgctctctagtggagaaaggtggtctcggtgtgaaggacatgaatttctttggtcaggccctaaggttgaagtggcatgcgaaatcactggaatagaaggataggccctggatgatggtgactttcaggcctgggaatgatgtagagatcatctttcgctcagtggcagagtactcagcaatggggagaacactgacttatggacagcaaactagaccgggaagggatgttttgcttggcgatggccgatcctgcactcttatgcggggcgcaccaggctttcggtcgacaaagccctgtgcaacaatcgatgcagaatggaggtgacaggaccctccaggtgaaaaccgagtctagctgaatggtaacgttgacgtctaagacgccatggcctttgtcaaggtgttgtttaggaggtcctattccttgtcttcgttgccttctctctgtttggtcgtcggcagttttaggttgttttcattaggttggggcgagggatgagtggatctccttctctctcgccctctccctcttctcaacccctccacgtgaggataaccgaaagctttttgatgcccttctatgttgagtcggtgtttggtggggcttttgcaacccctggttgccctagtggcgatcaatcacacttagcggtggtcggcttggtgctagtttcctctccagggtgtggtgcgaggaactgccagctctcggtggcggtgtgtttgttttccctgttacgatctcctagagttgtaatcttgtaattttttttctgctatttcaatatcaatacgaacttcgcattgtctgtgc

SEQ ID NO: 18514 - DNA, 1237 bp, Oryza sativa
  ref <308>: DATABASE ACCESSION NUMBER: AK068904
  ref <309>: DATABASE ENTRY DATE: 2001-12-06
gatgtccccttctcctcggccgcgccctcgactccccgtctcgttcgcccgccgcgccgcgccgccttcccactgcatcccgcgccgcgccgccagccgccgcatcttaggaaggaggggagcccgcggcggcggcggcggccaagatgagcgacgacgtgatatggcactgcatccggcacaaccactgcagcttcatggccaagatcacgacggggatattctgccggaacccgtacaacgccaccggaatatgcaaccggagctcctgccctctcgccaacagccgctacgccaccatccgggaccatgacggtattttctacctatacatgaaaacagctgaaagagcccatcttccgaacaaattatgggagagggtcaaactacccagaaattatgagaaagcaatggaagtcatcaataagcatcttgaattttggcccaagttacttgtgcacaaaattaagcagcgcctgacaaaaatgactcagtatcggataagaatgaggaagcttcaactgaaagtgagagagaaggtgatgacaatgcccaggaaggagactcagcgccatctcagaagaatggataaagctgaaaaggccgctcagttggaaaagaatattgaaagtgaattgaaggaacggttgaagaaaggtgtctatggtgacatctataactatcccttcaaagaatttgacactattcttgaaatggaaaaagatgatgtagctcctactgaggaagaggaagaagaagaggtggagtatgttgaaggtgatgatgaaatggatgacatggaagacattgaagattttggaggccttcctgatgatgatgaagatgatgataatgatggtgagacggatgaagatgatcttttggatgaaccggtagcaaagaaacctaaagggcgaggttctgatttgagatcaaatatagggaaaaaatccaagaagcttatcactgaggtggaacgagatgatgacatgggtatcagacgaaggacgcgaatgtgagttgtgcgagcactggcttcaattgcatatgccacggggtgctgtgctgtcagttttggttgtacctgagattggcttagacttagttgctgagaaatcaagatgagttgtggcatagaacattatatttatatgttggcaaactattaggtttagcgttcaaattgcaagataagtgtaacattattttgcagcaagcactttacaggaagatgctc

SEQ ID NO: 18515 - DNA, 1357 bp, Oryza sativa
  ref <308>: DATABASE ACCESSION NUMBER: AK068905
  ref <309>: DATABASE ENTRY DATE: 2001-12-06
ggtgttacgggagcatggagctcactgagagtaagtgcgatggcgggcaagaagttagcttgctggacgctcagctcgagctctactggaacaccttcgccgtcatcaagtccatggctctcaagtcggcgctagacctccgcatcgccgacgcagtccacctccacggcggcgccgccaccttggccgagatagccagcgaggtggccctccacccgtccaagatcccctgcctccgccgcctcatgcgcgcgctcaccgtctccggcgtcttcgccgccgccgtcaagcccggagacggtggtggtggtgagcccgtgtacgagctcacgccgtcgtcgcggctcctcgtcggctcctcgaacctgtccggcatcatgtccatgatcctccacccgacgctcgtcgtccccttcctcggcgtcggcgagtggctccgccgcgaccgcgagccgccggaggaggacccgtactgcatcttcaagcaggcgcacggccggagcctgtgggagctggccggccgcgacgcggcgttcgacgcgctcatcaacgacgggatggtctcggacagccgcgtcatcatggactacgtcgtgagggagcacggcgaggtgttccgggggatcgcctccctggtcgacctcgccggcgggctcggcgcggcggcgcaggtcatctcgaaggcgttcccggaggtgaggtgcagcgtgatggacctcgggcacgtcgtcgccaaggctcccgccggcaccgacgtcgagtacatcgccggcgacatgtttgagagtgtgccaccggcagacgctgtcttcctcaagtgggttctacatgactggggcgatgacgattgcatcaagatattaaagaactgcaagaaagctatccctcctagagacaaaggaggaaaggtgataatcatggatatagtggtcggagcaggaccgtctgaccagaagcacagggaggtacaagcgttgttcgatatgtacatcatgttcgtcaatggcattgaaagagatgagcaagagtggaagaaggtttttatgggggctggatttagtgggtacaagattatgccagtcctgggttttaggtcaatgatcgaggtgtacccttgaaggtgacaccggtgattgtgattgtgaaatcaatgattggtgattagttgctcggtggagatgtggagtgtagcatgtttgtttgttgttgtgagattcacaatagtgatgattgtgtgggtgtgttttcttggttgtatgtgaaattgtgattagaattcagaccaataataaattgtgatactatgttgtatcgatgtaaactataggaaaacgacacgggtggactatatttatcc

SEQ ID NO: 18516 - DNA, 2514 bp, Oryza sativa
  misc_feature (196)..(196): "n"=any one base of a, t, c, or g
  ref <308>: DATABASE ACCESSION NUMBER: AK068906
  ref <309>: DATABASE ENTRY DATE: 2001-12-06
gactggaacacgcaccgacccgctcggaaaaaaaaaaagaaaagaaaaacagagcgcgcgtctcgcgcacagcgcacaggacgtcggcgcggcggcggcgagcggcgagcggccgatggcggacggcggggagatggacgaggaggccatgcgggccttcttcccgatgtccttaggcaaggcgcccacgagagcnggcgccgccgcctccgcgcacgcctccaccctccgcaagccgccccaaaaccctagcgccaagccctccacctcctccgctgccgccgccgccgccgcgggcgacgacgacgacgacgacgacgacgacgacgacgaagggcccatggtcgggccccctcggcccccgccccagcccgctggcggcggcgagggggaggacgacgaggagggcggcggggtgatgattgggccacctcggccgccgccgcggtcgtcctctcgcggtgagggggaggacgcggatggcggcatgattgggccgcctcggccgccaccggtgaaggatgatgacgaggaggacgaggatgacgacgacgacgatggggatgacagcgacgacgagatggaggatgacggcgagcgttacaatcggattcctctcagcaacgaagttgttctgcgggggcacaccaaggttgtctcagccctcgctgttgaccatacaggatcccgagtgctctctggaagctatgactacactgtatgtatgtatgacttccaaggtatgaactcaaagctgcaatcattcaggcagttagaaccctttgaggggcaccaagttcgcagcttaagttggagcccaacatcggatcggttcttatgtgttactggttcagctcaggccaagatatatgatcgggacgggctcacactaggtgagtttattaagggtgacatgtatatccgagatctgaagaatacaaaagggcacatttctgggcttaccggtggtgaatggaatcccaagtcaaaagaaaccatactgacgtcatcagaagatggatctattcgtctgtgggatgtatcagactttaaaagtcaaaagcaggtcataaaacctaagcttgcaagaccaatgcgaattccagttacctcatgtgcctgggatcatgaaggcaagcgaattgttggtgggataggcgatggttcaattcagctctggactgtcaagactggatggggaagcaggccagatatacatgttgagaaaacacatacggaggatattacaggggtcaagttctccacagatggacaaatactcctgtcaagaagtatggatagtactctgaagatatgggatttgaggaaaatgaaaactcctttgaaagtttttgaagatttaccaaatcactatgctgagacaaatgtggctttcagccccgatgagcaacttattttcacaggaacttctattgagaaagacggtgaaaatggaggcctactttgcttctttgatagaaggaaacttgagcttgtatcaagggtggggatttcaccacattatagtgtgataaggtgtctatggcatccaaggattaatcaagtattcgcaacagttggggataagaaggaaggtggtactcatatcttatatgatccttctattagtcagagaggagcacttgtatgtgttggacgagcacctaggaaaaaatctgttgacgattttgaggtgcaacctgtaatacataatccacatgcactgccactatttagagatcaaccaagtcggaaacgccaaagagagaagatactgaaagacccgctcaaatcacataaacctgaagctccagtcaatggtcctggctttggtggaagagtcggtactacaaaaggcagcttgttgacacagtacctcttgaaggagggtggtttgattaaggagacatggatggacgaggatccaagagaggcaattttgaagtatgcagatgctgcagagaaagatccaaagttcattgcaccagcatattcccaaactcagccgaaacctgtatttgcagagtcggattctgaaggcgaagagaaaaaataattgacaatattaagttacatgcatgatgagcctggtaacacaatttgttgacaaagataacattggagacaatctgtttagaaaactattgtgaaagagttgtggcccatgtagcagtccggcacgatgtggctttgatgtataccattaccaccaacacgttctccatccatcaggcttccagtcctgtttgtgcgcagcagctcacaataatacgaccggtgtacaattatgtcgttggctggcaactgatgtggacattatttgtacctactgacagtagtaactccagcttattttgtatcttgatcagtatacaatctcgcgttcttccatcatgtattgtccatggtgaagctgtagcctgtttgcagacataaatgcatttaccgtagggcaaagttgtcatactgatttggatgttatttgcagaatctacgcagattattcttcgatcg

SEQ ID NO: 18517 - DNA, 1791 bp, Oryza sativa
  ref <308>: DATABASE ACCESSION NUMBER: AK068907
  ref <309>: DATABASE ENTRY DATE: 2001-12-06
ggcgtgccatacacgattgctccagctagctgcacctgcacatcgccatggccatggccgacctggagttggagaaggttgcgagcttcttgctggcggcgctgctgccgctcgtgctcttcaagctggcggcggcgaagcgcggtggtggcgatggcggcatgaggctgccgcctgggccgtggcggctgccggtgatcggcaacctgcaccagatcatggcgggtggccagctcgtgcaccgcaccatggccggcctggcgagggggctcggcgacgcgccgctgctgtcgctcaggctcggcgaggtccccatcgtcgtggcctcgtcggccgacgccgcgagggagatcatgagcaggcacgacgccaagttcgccacacggccgtggagccccaccgtgcgggtccagatggtcgacggcgagggcctcgcgttcgcgccctacggcgcgctgtggcggcagctgcgcaagatcaccatggtggagctgctcagcccgcgccgcgtcaggtcgttccgccgcgtgcgggaggaggaggtcggccgcctcgtcgtcgccgtcgccacggcggcgacgcggcggcccggcgaggccgccgtgaacgtcggcgagcggctcaccgtgctgatcaccgacatcgcggtgcgcacgatcatcggcgaccggttcgagcggcgggaggatttcctcgacgccgccgccgagtgggtcaagatcatgtccgggttcagcctcggcgacctgttcccgtcgtcgaggctggccagcttcgtcagcggcacggtgcgccgggcggaggcgaaccaccgcaagaacttcgagctgatggattacgctctcaagcagcatgaggagaagagggcagctgctgcagctgccggcgccggcgccgtggaagacgatgaggacatcgtcgacgtgcttctcaggattcagaaggaagggggcctcgaagtgcccctcaccatgggcgtcatcaaaggcgtcattcgtgacctttttggtgccgggagtgagacatcagctaatacactccaatggactatgtccgagctcgtgaggaacccaagagtgatgcaaaaggcacaaactgagctacgtgattgtcttcgaggaaagcaatcggtgtcagaagatgatttgatcggattgaaatacttgaagcttgtcatcaaggaaaccctaaggctgcatcctgtagtgccactgcttcttccgagagaatgtcaagagacatgtaacattatggggtacgacgtgcccaagggtacaaacgtgctcgtgaacgtctgggcaatatgcagagatcctaggcattgggaaaatgctgagacattcataccagagcgatttgaggatagcaccgtagactttaaaggcacagactttgagttcataccatttggagcaggacgaaggatgtgccctggtttggcatttgcgcaggttagcatggagcttgctctagcctcattgctatatcatttcgactgggaactccctagtggtgttgcgccaagcaatctagacatggaagaggagatgggtatcaccatccgaaggaagaatgatctttacctggttccaaaggtccgtgtgcctctatagtttggctcgtaactgcttcacacaatatgtgtctcctgtgacccgtacctgccaagtagcgatcatgagcattccattgtgtttcatgcccttatggtgttatgctgctcaacttttttaatgttttctcgaaataagtaccatcatagttgttcatgtaactataaattacgagttt

SEQ ID NO: 18518 - DNA, 1373 bp, Oryza sativa
  ref <308>: DATABASE ACCESSION NUMBER: AK068908
  ref <309>: DATABASE ENTRY DATE: 2001-12-06
ggctcttctctctctcctctcctctcctaccatggagcccgacgcctcctccgccgccgccgcccaaaaccctaaccctaaccctagcacggggctgccgcccatctccgcctactaccagacgcgcgcggagcaccacgccgtcgtctccagcgactggctcgcgcacgccgccgccgcggcctcgctccctccctcctccgatgccgccgacgcggacgccgcctccgacgccgcggcgctgctctcccccgggagcaacggcggcggcggcggggtgatcgaggagttcaacttctggcgccgcaagcccgaggccgcggaggccgtggcggccatcatggcgctcgccgccgtcatccgctccagcagggccaccaccatgatggagctcgagatcgagctcaagaaggcatccgacaagctcaagtcttgggatgccacttccatttctttgtctgccgcatgtgatttgttcatgcggtttgtaacaagaacatcacatttggagcatgagaagtttgatgctgcaaaatcacgcctaattgagaggggagaaaaatttggagagatatccttaaaggctcgtaagacaattgcaatgctcagccaggattttatttcagatggttgtactattctggtacatggttattccagagttgttttggaagttctaaagctagctgcatcaaaaccgcaaactcttcagggtactttgcacagagggcaggccggacagaactggtttacgaatgtcaaatgaactggcagcattaggcattcctgttaaggtgctaattgattcagctgttgcttattccatggatgaagttgacatggtgtttgttggtgctgatggggttgttgaaagtggaggaataatcaatatgatgggcacttatcagatagctctcgtcgctcacagtatgaacaaacctgtttatgtggctgctgaaagttacaagtttgcacgcctatatccgttggaccagaaggacatgacaccagctcaccgacccattgattttggagttccaattccggctggtgtggaggttgagacttcagcgagagactacactcctccccagtatcttacgctgcttctgactgatctcggtgttctgacaccatctgttgtgagcgatgagcttatccaactatacctatgatcactggtacggagatatgatgtaccgatgtaccgccgtggaatctaaggttttccctgtcagttttttgctatgttgtatttgccctttacgtggatgcaatgtttggaggattcacaaaagggttatgcaacagaagataaccccagttttgtctaaagcatctatctggtgttaatagttttggtgttggttgcg

SEQ ID NO: 18519 - DNA, 1473 bp, Oryza sativa
  ref <308>: DATABASE ACCESSION NUMBER: AK068909
  ref <309>: DATABASE ENTRY DATE: 2001-12-06
gattcccccaaggcgccgcaacgttccccgacgccggccggccgcccacggccctcgcgcgcatgggcggcttcgctccccaccccgtcgtcgtccccaccgccgccatggacgggaccagcagcgttagcgcgcggacggcctcgtctctgtcgtcgtcgtcgtcgtcgctcgacgacggcggccgtggccggcctccgccggccgggtcgacgctggagctgccgtcgcggaagcactaccggtacccttcccggtcggcgaggctgttccagaagctgcgccgctcgctcccgctgctgacgctggcgccgcggtgcggccggatgcaggtcggctcggcgagcgaggtcgccgcggcggcggcgtccggcggaggaggaggaggagcagccgactcgcacctgatgtcgcacgtcgtgtcgtcgttctccggcgcggcgcggccgatgcggcgggtgacggggacgctgttcggccaccgcaagggccgcgtcgcgctggcgctgcaggagacgccgcgctgcctgcccaccctcgtcatcgagctcgcgatccagacgaacgcgctgctccgggagctcgccaaccccgccggcgcgcgcatcgtcctggagaccgagcgccgcgcgccatccacggacgccgccgccggcaagcaccggagggcgccgccgctgctggacgtggcggcgtggaccatgttctgcaacgggaggaagaccgggctcgcggtgcggcgggaggcgacggacgacgacctcgcggtgctggagacgctgcgccccgtctccatgggcgccggcgtgctccccgcctccaacaggtcgtcgtcgtcgtcgtctcagtcgccggagaagggggcggcggcggcggacgacgaggtggcctacatgcgcggctgcttcgaccacttcgtcggctcgcgcgactccgagtcgctctacatgatcgcgccccagggcggcggcaccggcccggagctcgccatcttcttcgtcaggctatgaccaccaccaccacctactcgccggctcgccggcgatgcaccgatcaatccatcgccaccgccatcgcgcgcgccatgcaaagcaagacgaagggcgcgtcgtgattcgtgcagccctcttgacggcctcgagattcgtgaggagcaggcgagccacctcgactccctacgtcagagatggcttagcttaaatttaatcatctgattaagcactaatcttgtgctcttagtgggtgattaggttgtgaggaggtcattgcataaatcgggtttaatggtggtgcccaacacctcattgcacacacaatctagtggagtacggagaaaattatattaattaattaagttgcttgcttttgctttcttctctctcgcgtttaattatcggatggtaattttgcataatttatttgtcagtgcaaagaatttgagaattacatataaactccattttggtttagatt

SEQ ID NO: 18520 - DNA, 1196 bp, Oryza sativa
  ref <308>: DATABASE ACCESSION NUMBER: AK068910
  ref <309>: DATABASE ENTRY DATE: 2001-12-06
gacggtcttttcttgtgtagtgcaatcttatctctttccctccaagaaacacttcagcagaggagcaacaatggcggcggcagggtcgctgggacttctccaggcgccatcgtccttcacggcggcagcggcgagccggccggcttctcggcgagcaccgcgagctctgttcgccgtgagagcctcggctgccgccgatgccaccaaggacgccgtcctcaaggccttccgcgagaagagagctctcaagatcatttcagggcttcagaatttcgacaggagtagtgttgcctctgttgtctcggctgcagataagggaggtgccacccatgttgatatagcgtgtgaccaagacttagtaaagcttgctctggagcttacttcccttccgatttgtgtctcctccgtagatccttcagcattccgttctgcggtagaagctggagcaaagatgattgagattggaaactatgattctttttatgacacaggcatcgaattctcttctgagaagatcttaaagctgaccaaggagacaagggaaatgcttccagatataacactgtccgtaacagttccacatacactgagcctcctagatcaggtaagacttgcagagctactcgaagaggaaggcgctgatatcatccaaactgaaggagggaagtgttctagtccaacaaagcctggagtgcttggattaattgaaaaggcaacaccaactttggccgctgcatactccatctctcgggctgtcacaattccagtgatgtgtgcatctgggctaagctcagtgactgcaccaatggcagtaactgcaggagctgccggtgtgggagttggttctgctgtcaacaaacttaacgacatcgtcgcaatggtcgctgaggtgaaaagtattgctgaagcattgggtttgccttcacggaacgtgtctagcaacttgagaacagttcaccattaggggctagttacctcctcttctagacaaactctagcgatcaataatattatcaaaagatgcagtagcttgacatttcacagtctactgcctttcgtaacatatatgcaaagcaatgcagaggtgccaattggcgttttcgacggttgtaatgtagctttggccagtggcgttgttgaactgagatcaagtttcagctgcaatcaattgtcagattgtcacatctttcccatgc

SEQ ID NO: 18521 - DNA, 2015 bp, Oryza sativa
  ref <308>: DATABASE ACCESSION NUMBER: AK068911
  ref <309>: DATABASE ENTRY DATE: 2001-12-06
gacgcgcaggaggatggagtagtagaatggatggatggatggatggatgagggtagctagctaattggcaaattaaacaaagaagaagaggaaaggaaggaaggaagcgaaggatcgatgatgccggccggtcccggtcccttggtggtggtcctcctcctaagcctgctgctgttggtggcagggatccatgggcgcctccagcacgaggaggaggaggaagaggaggaggtccaggaccaggagggaggcagcagcagcttcacccttccggtgtgggcgccccacgttccggagtcgggggaggagcggcgcgagcacttccgggcgttgatggccaaggacatgaggcggatgatgcggcaggtgccggagctcatgtccaagacggacatgttcgagctgccgatgcgaagcgcgctcaacatcgcgcaggtgggcatgtacgtggtggttgtccgcatcggcaccccggcgctcccctacagcctcgccctggagacggccaacgaagtcacctggatcaactgccgcctgcgccggcgcaagggcaagcaccctgggcggccccacgtgccccccgccgccaccaccatgtccatccaagtcgacgacgacggaggcggaggagggtccggcggcaagtccaaggtgaccaaggtgatcatgaactggtaccgccctgccaagtcctcctcgtggcgccgcttccgctgctcccagcgcgcctgcatggacctcccctacaacacctgcgagagccccgaccagaacacctcctgcacctactaccaggtgatgaaggactcgaccatcaccagcggcatctacggccaggagaaggccaccgtcgccgtctccgacggcaccatgaagaagctacctggcctcgtcatcggctgctccaccttcgagcacggcggagccgtcaacagccacgacggcatcctctccctcggcaacagcccgtcgtccttcggcatcgctgccgccaggcgcttcggtggccgcctctccttctgcctcctcgccaccaccagcggccgcaacgcctccagctacctcaccttcggcgccaacccggccgtccaggctcccggcaccatggagacgccgctcctgtacagggacgtcgcgtacggcgcccatgtcaccggcatcctcgtcggcggtcaaccactggacatcccgcccgaggtgtgggacgagggccccctggggaacgacaacccagaagccggcatcatcctcgacaccggcacctccataacctacctcgtgtcggcggtgtacgacccggtgacggcggcgctggacagccacctggcgcacctgcctaaggccgaaatcaagggcttcgagtactgctacaactggaccttcgccggtgacggggtggacccggctcacaacgtgacgatacccagtttcagcatcgagatggccggggatgcgaggctggccgccgacgcaaagagcatcgtcgttccggaggtcgtcccgggggttgtctgcctcggcttcaaccggatttcgcaaggcccctccatcatcggcaacgtgctcatgcaggagcacatctgggagatcgaccacatgagcactgtgctcaggttcaggaaggacaaatgcatcaaccatcagcagctcaacaggcaccacaagaaggcctcttcttcctcctcctcctcttcctcttctcctcctccttatccggccgcctgacaacctcgctcgcacgcacgcatcttcaattcatctgctgcagcggctcatccctctcctattaattactcatcttccgcatatatatatatatatctgtagcgtacgtacgtatctatcatgtgcgtactcactccattattaagctcgcatcgcatgtaatactattacttatatatgtaatatataattaatcatatatatacatgtactctgctctactactactactacagaagtctatatatacatttgcttgtccttctatataatatagggacaattgcacc

SEQ ID NO: 18522 - DNA, 1726 bp, Oryza sativa
  ref <308>: DATABASE ACCESSION NUMBER: AK068912
  ref <309>: DATABASE ENTRY DATE: 2001-12-06
gggctttcccctcgcgacctctcacgccgccgccgccgccgaggaaaatggttgagcacctattcgaggatatcttcactgtgaccaggctcgatcctgatgggaagaagttcgacagaggtataattttacctggctgtacaatgaattgagctctgcgtctactatatggtttgctatgatgcctgacaatatgtctcccggagtatttgttacttgttagagctttgctggtttcgaacttaggccattttctagttcctttacattgtttagatctttgagttgtatgccgttttttgtgcttaatgttggtgcagatctttgttgaagtaatgttatccttttccatgtctatgtacagttagtcgcatcgaagctcgtagcgagcagttcgacatgtacatgcagttagatgttgctactgaggtctatccgatgcgtgctggtgacagattcaccatggttttagctcctactctgaatctggatggaactccggacactggcttctacacgcaggctggcagaaaaacacttgctgacaagtttgactatgtcatgcatggaaagctctacaagatctcagaagacagttccggtggtcaagccaccaaagtgtatggcttctatgaatttcaaatttaatcaatttgcattgtctagcaggagcatggtttatcataatctagtaaggcttaagtggggtttctttgctcatttttcaacatatcccagatgaacttatcctatagggttaattaaccatgctgatgaagtgcgtagttttgattattaaatgctttctttaagcttcaggatcctttaagagaactttcagtatttggttttaggaataaatggctgttttttgtttagtttgagtgcatcaagatggtcttattgatcaatctaatttttctattgtccagggtaaaaacatatcagtgcactcagttttttagcttttccaaagaaaagatgcaaaattagttgaagtgactagcttataatgattttgcatggggtttttctttgtgcactaaaggctattcttactttgatatcatgtaatgtcaacaagattaataatcactagctaaagaactcaggtgttcagtttgttcgaacagttcatatgcatcccattgctgtctgtactgtttcagctacttggttaattcaattcaagtgcatttacttaattaattgtatcattgttatgtgaatcatgttatacgaagataagtaccttcaaagaacaatttttcgccttgccaatatgtaaatctggcctacagctacacagcttgtactagactactgttagtcctgtatcaagtttatttttaacgtaatcctgtatcatgtgatgatgtcaactccctttgtgctatgaattttaatgaattgcattcttttccattctagggagatctatgcatcgtttggtggccttctgatgatgctcaagggtgacccctccagtgccgctagctttgagctggaccagaggctgttcctcctcattcgaaaggtgtagatgcactatctacctaataacctgtgatgatggttaactttcaggctatagccagcctctgatctccatttgatggtttcttgtcatgctaattgcgcaccacccctatccactcccttgggtggcaatgcagctttgtatcaaacatcgacaaatacttgttgaaacataactcatttaagc

SEQ ID NO: 18523 - DNA, 2295 bp, Oryza sativa
  ref <308>: DATABASE ACCESSION NUMBER: AK068914
  ref <309>: DATABASE ENTRY DATE: 2001-12-06
gcggggctggagaacgtcttttctcaattgtgttattgcagtttcatgtgagggtgctcctcctgtccaaatgggagaaagatatcctcacatgttcttgatcctcctactttttcatggagcccatgcggctttgaaagatccagtacagaaatggcagactcttggaggtcagcgtcctcttgtcattgctcgtggagggttctccggcttgtttcctgattcaagccagttctcgtaccagtttgcaatgtcgagtagcttgcatgatgtggttctgtactgtgatctgcaattgtccagtgatggtttgggcttctgcaaaactggattgacattagagaactcgacgcttatcgccgaagccttccctaagagggccaagacatacaaggtgaatggagaggaaatccatgggtggtttgctttggatttcaccgcagacgagctgtatcagaatgtcacattgatccaggacatcttttctcgcccaagcacatttgatggagccatgggaatgtttacccttgaagatcttgtcggactcaagcccccacatttatgggttaatgtagagtatgctttatttctccaggagcacaaattaagtgccgaagattacatattaggattaccaaaagattttagtgtcgcttacatctcctcaccagaaattggattcttgaaaaacgtgggtgctaagctcaagaaaagcaacaccaagctaattttccggtttcttagagaagacgtcgctgagcataccaccaagaaaacgtatggagagatcctgaaagacctgaaatccgtcaaggcctttgcatcagggattcttgtccccaaggaatacatttggccattgggcaaggaccagtatctgcggctgcctactagtttggtcaaggatgcacatgcccttgggcttgaagtttttgcctctggatttgccaatgatgtctccatgagttacaactacagctttgatcccagtgcagagtacttgcagtacattggcaatgcaaacttctctgtcgacggcgtgataacgggtttccctcccactgcatcaggagctgttgcgtgtttggcaaataccaagggcaatcctcttcctcctcctggtggtgatggaggcaggccactgatcataacccacaatggcgcgagcggcgtctacccgggcagcactgacctcgcatatcagcaggcggtgaaagacggcgccgacatcatcgattgcgcggtccggatgtcgaaagacggcgtggccttctgccagccatctgcagacctcagcaccagcacgacggcgtccaccagtttcatgaccaaaatctccactgtcagtgaaattcagaacaagtcgggcatcttctcctttgatctcacatggagcgaaatccaaacattaaaacccgatcttcttggtccgtacacccaggcaggcctgaagaggaaccccgccgcgaagaacgccggcaagttcgtgacattgcctgaattcctagacttggccaaggccaccaatgtctctggcatcatggtcgagatggagcacgcatcgttactcgcgaagcgaggcctcgggctggtggatgccgtgtcgggggcgctggcgaacgcgagctacgacaaggagggcgggcacctgccggagctgatggtggtgtcggacgacacgtcggtgctggcggcgttcaagaagttcccggcgttcaggcgggtgctgatggtggacgagacggtcagcgacgcgtcggcgccgtcggtggaggagatcaagcagttcgcgacggcggtgaccgtcggccgcgggtcgatcgcgcaggtgaacggcttcttcctcacgcggttcaccgacgtcgccgaccggatgcacgccgccaacctcaccgtctacgtcggcgtgctccggaacgagttcatgaacctcggattcgactactgggccgaccccatcatcgagatcgccacctacgccttccacgtcatggccgacggcctcatcaccgagtaccccgccaccgccgccacctacttccggagtccgtgcagcgatctgagcctgaacctgagctacgcgatcctgccggcggacgccggcgccggtggctgccgtgtgctggccgccgccgtcgcttccctgtttctgatactgctgccatctcatggcttccattgacgacgatcttgatggatggcattgtactaacagatgttttctctgcgtttttctctcctcgtatcctactttgtactgtgtaacataatgttctctaaatagattatatgtgt

SEQ ID NO: 18524 - DNA, 2298 bp, Oryza sativa
  ref <308>: DATABASE ACCESSION NUMBER: AK068915
  ref <309>: DATABASE ENTRY DATE: 2001-12-06
ggggcggaagcggaagagggaggaggcagagaggtcggcggcggccgtggctggggtggggaagggcgggaagaatgcctccgcggcggccggggaggaggccggcggcgccgacgggaggaagcgggtcaccgtcttcttcggcacgcagaccggcaccgccgagggcttcgccaaggcactcgctgaggaggctaagtcaagatacgacaaggcgatattcaaagttgtggacttggatgagtatgcgatggaggatgaggagtacgaggagagattgaagaaggagaagatatcgttgttcttcgttgcaacgtacggagatggtgaaccgactgacaatgctgctaggttctataaatggttcactgagggaaatgagaggggtgtttggttgaatgacttccagtatgctatttttggtcttggcaatcggcagtatgagcatttcaacaaggttgccaaggttgttgatgagctcctagttgagcaaggtggaaaacgtcttgttccggttggtcttggagatgatgatcaatgcattgaggatgacttcaacgcatggaaagaaactctctggccagaattggatcagttacttcgggatgaaaatgatgtttcaacaggcactacctacacagctgccattcctgaataccgggttgaatttgttaagcctgatgaggcagcccatttggagagaaatttcagtcttgcaaacggttatgcggttcatgatgctcagcatccttgccgggccaacgtggctgtgcgacgggaactccacactcctgcttctgatcgttcatgcactcacttggagtttgacattgctggcactggtcttacgtatgaaaccggtgaccatgttggtgtatacacagagaactgcctcgaggttgtagaggaggcagagaggttgttaggctactccccagaggcttttttcaccatccatgcagacaaagaggacggtacaccactaggtggtggttctctggctcctccattcccttccccgattactgtgaggaatgcgcttgctagatatgcggatcttctgaattcgccgaagaagagtgctttggttgcattagctacttatgcttcagattctactgaagctgatcgtctgaggttcttggcctctcctgctggaaaggatgagtatgctcaatgggttgttgcgagtcaaagaagtctattagaagtgatggcagagttcccttcagcaaagcctccactaggagtcttctttgcagccgttgctcctcgtcttcagccgagatactactcaatttcatcttcacctagcatggcacctaccagaattcatgttacatgtgcacttgtccatgaaaaaacacctgctggaagggtacataagggagtctgctcaacatggattaagaatgctattccatcagaagagacaaaggactgcagctgggctccagtttttgtgagacaatcaaacttcaaactgcctgctgatccttcagtaccggttatcatgattggcccaggaactggtcttgctcctttccgcggattcttgcaggagaggctgtctcaaaaacaatcaggagctgagcttggtcgctccgtattcttctttggatgcagaaacagcaagatggacttcatctatgaggatgagctgaacactttccttgaggaaggagcattgtccgagctggttctcgccttctctcgtgagggccctacgaaggaatacgtgcagcacaaaatgtcgcagaaagcttccgaaatctgggacatgatctcccagggtggttacatttacgtctgtggtgatgccaaaggcatggccagagatgtacatagagttctccacaccattgtacaggaacagggatcacttgacagctctaaggctgagagctttgtgaagagcctccaaacggagggtaggtatctgagagatgtgtggtaagaggtgattttcagcacaccaaaaacgcctgtattcatgaggcacaacattcgttcatatatagtagtacagaagttccttcaaggagcaatattgctggaagaatattgacacatgaccaagatgaaatgcttttagtagctcagcatttttttttcttctctcttttctttttttttccctttcttttatctttcttgagttccataagaggttttttcgactgtgtattatagtatgatttatatgtataatatgaggacaattttggcaatatgcctgtgatagtgtgatgctaataattgtagatgatgtctccaagagggatttaattatacatg

SEQ ID NO: 18525 - DNA, 2935 bp, Oryza sativa
  ref <308>: DATABASE ACCESSION NUMBER: AK068916
  ref <309>: DATABASE ENTRY DATE: 2001-12-06
gatattcatttctcatagttatccccgcctttctctcctccattggaggattagaacggagagagaggaaggtggggaaaattgttagatttgttcatccattatattttcttgaaaggaaaaggaaggcgaaggaattcaggtatttgcatcacatcacaatctgcaaagcaggaatacctgaaactctcatccagagttgacgaaatcatgtcaacttagaatgatatcaaggctcttgttacattcagaagatcagggcttcaggccctgcttgtttgttgctggatgaagacattcaccaggaaaccactgcaaagtgcagtgcacgtacaattccttcgatcaagtggaagggcatttcatgggcttatagatcaactttgttccaaatgtcctaaacatgatgatggtgccactttgcaaagtgaaaccacttcaagcaagttcatgtgtttatacaagttcttcaggacatcaagtgaaggtgacactgcagctgtagacaatgtattgcgcaatgatggaaatacagaagttgtcgctatccagtcgaaagaaaatggtcgcaattctaataacatattggaggatggagagaagtcagttctgtcgtcggatcattctaaaaaattgagtgcacatcatcgactgaaaatctggattactagtggacacagtggcataatcggaagatacggaaagaagttggagctaaatgctgccaatgtgcctaagcagttcccaagtgaacatgtgaatactgtatggccagattggctcatgaaggtggcccctgaggcagtgcaaggctggttccctcgtcgtgcagaatcatttgagaaattaggcaagattggagaaggaacttatagtagtgtgtacaaagctcgagatcttaaaacaggcaagattgttgctctcaagaaggtgcggtttgtcaatttggatcctgaaagtgtgcgctttatggcaagagaaatacttgttcttcggaaactgaatcatccgaatgtcataaagttggaagggatcatagcatctcctgtttcaacaagtttgtatcttgtatttgaatacatggaacatgaccttactggtcttgctgcaactccaggcctcaagttcactgaaccacaggtaaagtgcttgatgcaacaattgcttagtggccttgatcactgccacagcaatggagttcttcatcgagacttgaagggttccaacctcttgattgacagcaatggtgtcttgaagattgcagactttggtctagcaacattttatgatcctaacaatcagcaaccactcacaagccgtgttgcaacattgtggtacaggccaccggaacttctgcttggtgccactaagtatggagtttctgtggatatgtggagtactgggtgcattctggcagaattgcttgctagcaagccaatcatgccaggaagaactgaggtagagcaaattcacaagatcttcaagctctgtggatcaccctctgatgagtactggcagaaactgaacgtgccccagacagggatgttcaagccctctcgccagtataggcggtgtattgcagataatttcaaacatttccctcagccagctatagttcttctagataatttgcttgcattagaaccagaagctcgtggaacagctgcctcgactctccagagtgactttttcagaagaaagccacttgcttgcagcccttcaagcttaccaaagtttccaccgagcaaagaatacgatgcaagactcaagctagaggaagctaggaggcaaagaaaggttggaggatctgttagacctggaagagagaacgttagaataaatcgtggtaatggctctatccaaccaaagaaacatacatatatcagtggaaatctccacccgcaaggtgatccacggacattagctacaagggtgcgatctcctggacttaacgccacatggaacaacaggggtgattcaatgacggtcgtgaagtacctggatgtaagtacaactctgtgcggatagcatattccactatcttgacgacaaggagctcagacttgcttcaacctgaaccaactgatgtaatgaataagatgcatggttctcccaagaacgacctgggagagaagggccagactgggagctgtagggttaagaacagaacgcatcactctggttcactggttacaccagaaggaaacatagaggagatgctcaaggagcatgacaggaacatccaagcagccatgcgcaaagcacgccttaacaagaagaaatagttgtgacatttaggtgtgttcaagctaaagatcccaacttttccaagttccagttgaggaatggcagggctgcattcttgcacagagcacagagcttcttcaaaaggatcaagatcaaacctgaaatgtcgatacaatacgagagtttgggcatggacattatttcaaatgacaggttgtcctttgaacctgaaattcttgactgatggcagtgagagatccagatcatgccggagcaactaagaagaaatttcgacaacattgagtcatggataggtacatcttacagttacaaagtatgagcagcactgcggaagaggaggccaaacagagtgccagggatatccgaaagcgtagactggcctttattcttgcctgaattcttgtttcaccaagcttctgtggtctttccccttgttatggctgttctaacccatgccatctgcatctggtgttgctagacgggcttgtataaacttttcatcctcttatttctcttgtttttcttcttgcaagggtcttatataaactgtgcattctttgtccagttttttggctgtgtgcattctatgcagaggccgggggtggactcagttggaatgtatcatcttggtgtatttaactgagtcttaataaaacttccattatct

SEQ ID NO: 18526 - DNA, 1811 bp, Oryza sativa
  ref <308>: DATABASE ACCESSION NUMBER: AK068917
  ref <309>: DATABASE ENTRY DATE: 2001-12-06
gggttgtttcaaagctaaaccaccctttccctcctcctcctcctcctccctccctcccccgtcttctcctaccatcgccccgaaacaaatccccaatccctcaatcgccgccgcgatgccaccactccaccgccgcctcgttctctgcttcctcatcctcgccgccgccgccgccgctaccaccgctgcctccatctccacccccgccgagctcgcggtcgcgtcgcaccctctgtcccccctccgtctcccgccggccgcgcccttcgccggcggcggggagggcggcggcggtggcggtggccccttctgcacacgcgtgcatatccgcggtcgcccgtcccgcctccgcgacccgtcgcgcttcttccacgccctcagggtccgcgccaacgctacccgccccagcggacttgagctctgctttcaccggaatgccacagtgggtccatgcaagtgcgcggcgtcacagtgccataagatggccaagagcggcctatgggtgcaagccatctccccgtacgacacccgggtcctcgatttccggatgccatcggacccttcgaggtctatcatagtgtcgacggaggaagagttcttgcttcacagggtggtgttcttgttgctgggaatggtgctgatggcagtggcgcacactcttagcgagtctgtggtattctactatggcggagcaatgacgattggaattttccttgtaattctgattatactcttccagggaatgaagcttttacccactggtagaaagagttctcttgcaatttttgtgtactcttcacttgttggcatgaccacatattttttgcactatttgtcgggacttttacgttctgtgcttgtggaaattgggattgccgaagacatgcataatcctctaggtgtattccttctcgtaagtgtgatcttagctggagcctggtttggttactggggtgtccgtaagcttgtgctaacagaagaaggatctgttgatgctggtgtggcttattttgttgagtgggctatcttgattatttctgcagttatgatcctgcagagttctttggactatctctttgcattttcagcattattattttgcacagccatcaaagcagtttctaggattgagggaaagtcaagagttctacggtgcctatcaagggcattttcgaacattgttcccactggctatgaaggttttggtgaggagtactccagcatgaatggatctcaccaagatggatttagcaagcttcatggtgaatacatgaggagtacaccaaaaagaaattcacttcgatcaaggaagacattgtctcaagaccttgctacggatagctactattctaccttccacactaaccctgagcggaaaaagttttcagaggaggaatatgcagcattcactagagaagagacacataaagctatgaaacaactggtctcatcgcctgatttcaacaggtgggcactagcaaacgtggacaggatatctgtgactcctccacaaagaacaccccaaaatagcatgagccagcagcggaaacgtttgttcggactgttttaagctgtgtgtgatatcttccatctagtaatctggtttcaattgccaatcaatagatttgagctgtatatcagtttttcttcctggtagtggtatcttcagtgtgcttgcagcggtaggtattcaatgtatatgaattgagtggtagctagcagctgtaacaatggtgtatttgcttgtggaagcgaatctgtagtagctgtaacgatggcgtatttacttttgtggaagcaaattttgtagg

SEQ ID NO: 18527 - DNA, 2262 bp, Oryza sativa
  ref <308>: DATABASE ACCESSION NUMBER: AK068918
  ref <309>: DATABASE ENTRY DATE: 2001-12-06
gacgagaagatttccattaactccgccctcgtgtgttatctatccatccatccagccatccgtctcatcacccccacctcttcgctccgtcgcctcctctctctctctctcctcgccccgccgctttttagggtttttgttcgcgccgccccggtgagaggtagacgggtctccccggcgagatgggccacgtcgacgcatcggccgccgccgccgccgcgcgcgacgcgaagaagaagagggggaaccggtcgtcggcgaagctgaagcagtgcaagctcgacgcgcgccgcgagcagtggctttcgcaagtcaaggatggaaaggaggctaaggcatcgacttcgccgacaggtacagagccaaatgctgggtccatgaccgttccttcgccacaccctccgctccctcgccgtcgcttagatgtgaggtcgaagggaggggatccagaggaggacagggaggagaggggtgctgccaggcaggagttaggcagcagctatctggactctcctgtgcacagccctagctcggacaattctgggagcgttggcggcatgcacaggaagcattacaacaatggtggtggcctcaatctcagcagcagcagcagtgtatggtccagttcgagaagtgtgagcgaggccgaggatgatgatactggtggccctgaagaggagaatggggtcttggatgactgggaagctgttgctgatgcagatgcgcttacagttgatgattgtcattcccaccagagttcaggtcatgtggcgccaccagctgctccaaatgtttgtacagctcctgccaatcaaactggaaggcaagatcccattcagagaacaaaagcttgggcgcctgatgatatattccgtccacagagcttacccagcatctccaggcaggtcagcttcccagcaagcatcgggaatggctggatgggtgctgcacagcaggccaacctctctacgcctttgacatgtccaatatgctgcgaggatcttgacctgacagactcaagcttctgtccttgtccttgtaaattttgcctgtgtctcttctgccacaacaagatcctcgaagctgatggacgctgccctgggtgcaggaaggaatatgttgctgcgcggctatcccggtcttgtagcatgggtccaagatactaggttgtgccagggtttataatagctctctgtcgcaatttggtcctttgctgttgctgtcagatatgcgttttgtcttgtgttgtccctttttggtataaagaaatgtgaatattggataggtgctaaatccatatagaacgtctccagaaactcggtgtctgtttttagactgtttgcattgtatgtgatgcgtatgttgctggagaggactccttatcgttttgtgatatcatatatgatagctatataagatgacctttgcagctacttatctacccatttatgagcaatgaagtacattgatctttgcgtaatatttgcctacctctgaatttttatatatatattttttacttttgttaagatgttttgactccgttcatcataagtaactcataaaatattatgcaatcctttcttgtcctttaaagcatattcttcaacatttaatgctggtatttgctctgtgggtgtactccattttatcaaatgcaataggtgtggtgttctaagagtggatttacatttgtaaaccaaaccttcatgttactgtattatattggttttgccctgtaattggaccagatattccctacaatcactcctaatactaaatattttaaagaacatacaacggttgcaagctgttttcagaattatatctcttagaaggtttcctggccacttccaccattaagatttgaattttttttttcaatttttagtatatttcattggatttaaccttccatgttgtggttaatcaatagtctgccagggttggttttatcatcctgactttggcaaggaaggaattgactctaatttcggttaagagtcagttaagttgagcaatgaatcaacattacccaagaacccggtacaagtcggattgttcttttgctggaagtgtcaggcgttaatgtctggtgcaaacgtgcaggttgtccgtagttaaattctttggtgcctgtttgtgtatcattagcagtatatagagtgtactggcctcattgaacgtgagagacctgtgaaatatggaacgtttgttgtttaccagttgcaaaattttgttgtttgccaagtgttgcaaagt

SEQ ID NO: 18528 - DNA, 1079 bp, Oryza sativa
  ref <308>: DATABASE ACCESSION NUMBER: AK068919
  ref <309>: DATABASE ENTRY DATE: 2001-12-06
gacccaagctcccaaacccctctcgcacccaatccaacccaatcccctcctcatccactccgctctgcggccatggccgcctgctgctcctccctcgccaccgccgtctcctcctcctccgccaagcccctcgccggcatcccccccgccgcgccgcactccctctccctcccccgcgctcccgccgccaggcccctccgcctctccgcctcctcatccagatccgcccgggccagcagcttcgtcgcccgcgccggcggtgtggacgatgcgccgctggtcgggaacaaggcgcccgacttcgatgcggaggcagtcttcgaccaggagttcatcaacgtgaagctgtccgactacatcgggaagaagtacgtcattctcttcttctacccgttggacttcaccttcgtctgcccgaccgagattaccgctttcagtgacagatacgatgagttcgagaagttgaacactgagatcctcggtgtttcaattgacagtgtgttctcccatcttgcatgggtgcagacagacaggaaatctggtgggcttggtgatctgaaatacccattgatttcagatgttactaaatcaatttcgaagtcctttggtgtcttgatccctgaccagggaattgctctgagaggacttttcatcattgacaaggagggagtgattcagcactctaccattaacaaccttgccattggacgcagtgtagatgagaccatgaggacccttcaggcgttgcagtacgtccaggacaacccggacgaggtgtgcccggccggatggaagcccggtgacaagtcgatgaagcctgaccccaagggaagcaaggagtacttcgcggccatctaagcacacatatgcatatgcctggtgatggatgtagggagtttttttgctttcgcgagagccattgcgtttcgtctccaaagtgtagtaccgtgtgctcgtctgatcggattttgttacttgttcgccaccagctgttactttgttccctaacaaataaggctttgttttggtcgtgttatacatgtatacatgttagtgcgtttcaagatcgcttctgtttt

SEQ ID NO: 18529 - DNA, 3827 bp, Oryza sativa
  ref <308>: DATABASE ACCESSION NUMBER: AK068920
  ref <309>: DATABASE ENTRY DATE: 2001-12-06
ttgaagtaagtctgaatttctttggccacaggcgacagccccaaaaccccgacaccccaccgccgaccacctcgccgccggcggcaccgctcccctttgccgccgtcggctctacctccttcccactctcccgtccttctcctagcctccctcctctctctctctctctcaatacttttttctacctttcatactaccttccatgttcttgttccgaatctgggttcccaagccgctgatgcgccccttccctgattcttctgatggaactaggggaggctgtgtggccatttttcccgttggagggtttcgtctagatctgtcgggtgtgggacatgcggattgcaggtgctgtcggttgtgttggcggcggcgggtcctgccgggatagttggccgccgacggccgcttggctgttgggttgcacggtgtgtgctggctggtagcgaggatggttttagggtgttgggcgaaagctctgtccgactcatagccggcctgacggcgatgaacgtccttggacatcatgcaatgcccctcctggaggcgtcgtcgcaagagcatctccagtagagaccctaaatacaattcctaaacagtttttaggtgctaaggacaaaaaataaactccagcaaaacccatactacaggtcctaaaataggaaggacctcaaataccactccgcagtccctaggcctgggggctgtagaccgaggccctatcgccgtttttctacgcgggaggaaatttcctgacgtgtggtgtctgtcttccctcccgcggaatcgctgccacggcgccgatcttcgccagctcgctggttccgccgctcgtggccgacggtgcgaccatccagtacctccaccggccactgcttgtcgtccgcgtgcccgcttgcttattttttcgtggtccttgatcagttcgcacactgatgcactatatggtagacaagaatgttctgaaattcatgaccatcagaaacatgttctaaacaatcctgctctcgattggtttatggctaactgtggttctaaacgatcatggcataaaaattattgttctgttcctttaaagtttgtggtgcttggtaggttgagacaattaggctgcttgcaattatgcagtagttccttcaaagattattctgcagtgttgttcttttgtgtcagttgtgagttgaagtttaacttcaaggttttttttttctaggaggatttaagctctttctgaagtttctcagatagattagattggaaaaggtcaagaccaatttctcagttcctgcgactgcgcgaaaaaacaaaaccatggtgactgttgtggaggaggtcgaccaccttcctatatatgatctggaccctaagttggaggaattcaaggatcacttcaactataggataaaaagatacctcgaccagaaatgcctgattgaaaaacatgaggggggccttgaagaattttctaaaggctatttgaagtttgggattaatacagttgatggtgccacaatatatcgtgaatgggcgcctgctgcacaagaagcacagctcattggtgagttcaataactggaatggtgcaaaacacaagatggagaaggataaatttggcatttggtcaatcaagatttcacatgtcaatgggaagcctgccatccctcacaattccaaggttaaatttcgctttaggcatgggggtggagcatgggttgatcgtattcccgcatggattcgttatgcaacttttgatgcctctaaatttggagctccatatgatggtgtacactgggatcctccagcctgtgaaaggtacgtgtttaagcatcctcgacctccaaaacctgatgctccacgcatctatgaggctcatgtggggatgagtggtgaagagccagaagtaagcacatacagagaatttgcagacaatgtgttaccacgcatacgggcaaataactacaacacagttcagttaatggcaatcatggaacattcctactatgcttcttttgggtatcacgtgacaaattttttcgcagtcagcagcagatcaggaacaccagaggatctgaaatatcttgttgacaaggcacatagtttaggattacgagttctgatggatgttgtccatagccatgcgagtaataatgtgaccgatggtctaaatggctatgacgttggacaaaacactcatgagtcttattttcatacaggagataggggctaccataaactctgggatagtcgtctgttcaactatgccaattgggaggtcttaagatttcttctttctaatttgagatattggatggacgaattcatgtttgatggcttccgatttgatggggttacatcaatgctataccatcaccatggtatcaataagggatttactggaaactacaaggagtatttcagtttggataccgatgtggatgcaattgtttacatgatgctcgcaaaccatttaatgcataaactcttgccggaagcaactattgttgctgaagatgtttcgggcatgccagtgctttgtcggccagttgatgaaggtggagtagggtttgacttccgcctggcaatggccattcctgatagatggattgactacctgaagaacaaagaggaccgcaaatggtcaatgagtgaaatagtgcaaactttgactaacaggagatatacagaaaaatgcattgcctatgccgagagccatggtcagtccattgttggtgacaagactatagcatttctcttgatggacaaggaaatgtacactggcatgtcagacttgcagcctgcttcacctaccatcaaccgtggcattgcactccaaaagatgattcacttcattacgatggcccttggaggtgatggctacttaaattttatgggcaatgagtttggccatccagaatggattgactttccaagagaaggcaacaactggagctatgataaatgcagacgtcagtggagccttgtcgacactgatcaccttcgatacaagtatatgaatgcatttgatcaagcaatgaatgcactcgaggaggaattttccttcctgtcatcatcaaagcagattgttagcgacatgaacgagaaagataaggttattgtctttgaacgtggagatttggtttttgttttcaattttcatcccaacaaaacttacaagggttacaaagtcggatgtgacttgcccgggaagtacagagtagctctggactctgatgctttggtctttggtggccatggaagagttggccatgatgtggatcacttcacgtctcccgagggaatgccaggagtaccagaaacaaatttcaacaaccgccctaactcattcaaagtcctttccccgccccgtacctgtgtggcttactatcgcgttgatgaagatcgtgaagagctcaggaggggtggagcagttgcttctggaaagattgttacagagtatatcgatgttgaagcaacaagtggggagactatctctggtggctggaagggctccgagaaggacgattgtggcaagaaagggatgaagtttgtgtttcggtcttctgacgaagactgcaaatgaagcatcagatttcttgatcaggagcaactgttggtgcccttgtaatctggagatcctggcttgccttggacttggttgtggttctttagcagttgctatgtacctatctatgatatgaactttatgtatagttcgccttaaagaaagaataagcagtgatgatgtggccttaaacctgagctgcacaagcctaatgtaaaaataaagtttcaggctttcatccagaataaaacagctgttcatttacc

SEQ ID NO: 18530 - DNA, 2518 bp, Oryza sativa
  ref <308>: DATABASE ACCESSION NUMBER: AK068921
  ref <309>: DATABASE ENTRY DATE: 2001-12-06
gatctcgtggcggctggcgagcggcgacggacggctcgacggctcgacggcgcgggaggccggcagtctgcgccgcaggcctaggcagaaggggaagccaaggagctaaggagcaaggcaacaaaacaagaaaatggttagaaagagagaggcagaggaaggtcttggcatcacgaagagtgttggaaagatgctgacattgaaaaggggtcttgatgatatcaccataagcccaagtacgagtaaaagatcttgcaatggagaggagatatctggtttgctctctctgtgtgtgtgcgcgcacacgcgtgtgtgttcatgtttcttgtagctctatttgagtactcagttgtgctatgtttgtttaattaggtgaactcattgaagaggtcccatccaattttagtaatgtcgtatcacttgctttatctgatggtgattacgttgttatactcttcttggtttgccaaatatatatttattaacgttgctaggtataaatgatctaagttactcttcttgtgtaggacactctgtgttgtttgcatgctcaggcataactatagaacacaagcgtaacttcacaaggtttttgacttcagcaagtttggttaaagctttcaatgataaaacaaaagaccgtgataacttaaaggtggtgttgctaaccatcctttactattttttgctgtttacataagatataattgcgatcattcgataacatcgcagtataattatagatcgaagtgcgctgtgaaggcaattttgtcgtagggtgtttggatgaatatgatttagatcacgaaattgcttttgtcaaagtcatgaccttccttaatgttcacgaggtgcttcccaatcacgtgatgaaatatctgtccgtgagtaaggtagtagctgtaggacgtgatatctctggcaaattaatcaccacagatgggatgctaattagcgattcaaatggatctgaagatgctgaagagtttatgttgtccacatgtaaaatctctgaggtatactttaaacagaagttcttcgatctatctctattactaaatgcacttgtaggcatcatttgtatgcaacccgtgttctgtataactctattttgttgattagttcctatgtaacccttgttgcctgccattttgtttacatgctagggttgggaaggtggggcactgtttgattctgatgggaaccttattggcatgaaccttttatttcttgtgggaagatcccttttcctgccgatcagtataattattgaacggttggagtattttcggacatcctaccgaaggaggaaattttttgcattggcaacaaaattgaaggcaatcagggttggaggaagactctcaattgagatgcctaagtcccttctagaagatgtttgtgatgaggatcaatttgagtgtctagactccatgggttatcccatgccatcaataaatggcatggttttggtcaacacttttgaagagacttttggcgacttgtatgatgaaggtgtctggagtgagctcagcaaaaatgtttcttcaagaatatctcgaaatgttgtctcgcttgcttcattcaatggagaaacaagatattttgcatgcacaggtttttttattgaatggaacggatgtacatctattctgacttcagcgagcttagttagaaaatctggcgatcgtagcaagattgttgaaaatttgaggattgaagtgttgcttccaaacaaaaaacgtacagaagggacactagagcactgtaatttacattacaatgttgctattgtcagtgtgaaggatttccgtgctctttgccctgcaaatcttcatcatgagcaggaaagtgtatgtgaggatgtattagctgtggggcgctgcttcgaatcagacatattaatggctgcaagtggtcgtttggttggctggtcaggcacacttgattgcagaatgcttcggtacgccaattttaaaatcaccaaggctgggattggagggcctcttattgattttgatgggagatatgttggtatcaacttctttgatgacatagtaggaaccccattcctatcatgcaccgttatcctccacgttctgtcacgttttgatgaagaaaggactatcaataaagttggcaatggtgacacttcatctggtgtgcttgattggactatgactggagatcgtagtgttcggccaaatagctggcccgtgcccaagccattttggtgtcatccggacgatctgccccgtaatgaaacccggactcgccacaaatacggatactacaatggacagaagttcaagtacatgtgttagggcttagttctgtttcgttgaaaatttgctacttaacctgtacaagaagtcatatgcttggttctgccattttgaattgctatgtttatgtcttggcaagggaatctgacgacttgtgcttgtcttgacaatttatatgtatgtacaaatgttcattttggtgctgtggactgctgcgttgcttaacttgaggc

SEQ ID NO: 18531 - DNA, 1040 bp, Oryza sativa
  ref <308>: DATABASE ACCESSION NUMBER: AK068922
  ref <309>: DATABASE ENTRY DATE: 2001-12-06
ggctttgttcacaccgcgcgtgccagcgagagccattctcgccggagcgacctcgccggcgacgccgtcgccgccaccccacctccgtgcggtatgcgttcttccttcccgcagcttccagcagcgcgcttctcaaccctctcgcagcgtttgctcgatccgtgacgctgacgcctgcatccactgaaggtagggtaggtagtggcggttgccgagatggccgggatggtcgccgccgcggcgccgccggcgtctctttgccgtccgattgctgtcccccgagctcctatgcgccgccgccggctcactccccgcgtgaagacgacgccctcccttcgctgcgaagattccccgaagatcgctctactccaggtacaagccatgcgatcttcagaagagagtagttctgatgaggacgatgagatcctttctgagctcaaagagaagtgggatgctattgagaacaagtcctctgttctcttttacggaggcggagcaatcatcgctgtctggctatcctcgattgttgtcaaagctgtcgattcagttccagtgcttccgaacatactggagctagttgggcttggctactcgggatggtttgtgtaccgctacctgctcttcaaggaaaaccgggaagaactggccaatggctttgatgctctaaagaaaaggatcactggaaatgaggaatagctgtgtatcctgtttctctgcttgaacgttgtcattagagccttttgttttttctcatgtaaatgctggaagcgttattgatgtttatggcctcccacatcttctgtactgtctgcagctcagcggggtttgcagtatcatctgacttctgaacagatctccacatttatggctgcgctaaaatgcttgtgattcttctgatatggaggtcggctggtcctgtttcttggctggcttcctttccccaatgattcagctgtatgttactactgctaagtttaagccagaactgataagtttaagctgtagtacaagcaattatttgaaataaattcagtagtccg

SEQ ID NO: 18532 - DNA, 3714 bp, Oryza sativa
  ref <308>: DATABASE ACCESSION NUMBER: AK068923
  ref <309>: DATABASE ENTRY DATE: 2001-12-06
ggtggtgcagcagagtttgcaatcttacatggcttctaacattagtgcagctgctcccatgttggtagaagctttcgatgcctcagtgtggggcgacttctttgtgaactatactccagaaccgttacagaagtcggaggaatggatgagggataggctgatcaattgaaggaggaggtaactttgctatttgaaacttgcaaggatgtggaggaaaaattgaaacttgtggatgtgctccaacatttgggaatagaccatcacttcgagagacgtattgccgttgctttaagcgacattcatggtgctgaattcaacagctccagcctccatgatgtcgcgcttcgattccgtttgcttcggcagcatgggctatgggtttctccagatgagttcaacaagtttaaaggcccagatgggagattcaacgctgaagtaatagatgatcccatgggcatgttgagcttatacaatgcagctcacctattaattcatggcgaggtggaattggaagacgctattttgctctcaaggcatcaactcgaaacaataatagcaagaaatctcaagtcgtcaccattatctcaacaagtaacacgggcccttcgaatacctttaccacggaccttgaagaggatagaggcgcttaattatatagcagaatacaatcaagagcaagcatgcaatccctctgtgctccaacttgcaaggctggattttaaccttctgcaacttcttcacttgagggagctcaaggaattttctcggtatatttaattttcctaagtacttgtttcatgccacacattaatcccctctacttccatatagctagcactagtacagattcttctatctataacgggctctaatatgcctagaaatagcgggccgtcacaaggaagtcatctcaatcgggccgaaaagtgcccgattgagatatggtcatacagacatgttagatgggcataaaacttaagcccatcacggatgacaactatcagtgacaagccgtagtttaggcccgattgagataacatttcatttctcaaacgggcctaaagttgcagcccgtcacagataaccatgtgacgggcaccaactgtagtcccgattgagataacattccatatttcaaacgggcctcaagttagggtccgtcacagatgaccatcatccgtgacgtgcaccaatttgaggcccgtttgagataacaactaggcccgtcacagatgactcatcagtgacgggctatatacttaatctctatcgggcattaactaaagcccgtcaccgataagtatttttccatttttcatatgaagtgtttatatttgtaagttgaactataacaaaataattaagtgcaaaataataatttatttcatgagtcaaaataattttacgggtagtaaatgatttcaaattcaaattcaaacggttcaaaaaatgttatatagaaaaatacccaaaataaaagttatagatcttgatgagttatacaagtttgttgttgatgacgttttcggttgaagtcgttcactgatctaaaattctatttgaatttttcaaactgaatttcaaatttcaaattgtttaaatagagtcagatggagaaatgaccaaaataaaaattttgcacctcgatgagttctacaactttggttttggtgacttttccatttgaaatcatttaataaccccaatttgacatgttggcctagggcttaataggattaatagaatactcataccaacaagttacaactacttttccggaagccgatctccaaagaactttggtgttaagcgtgcttggcctgaagcaattttaagatgggtaaccgatcaggaagttcttctcaggtaaatttattgcccgtcacagatgaacatctgtgacttctagcctgtgacggacgccgtgctcgattgagatggggcttaccgcctgattaagatgatggtatcccttctagtgtaggatgccacgatatattttgtttgtgtatcactaacaatatcataaattaatttcttttccaatatatactagtcaatgacatcatctcaaattgtcacataagtatataggcaaatatcattaaattttcggagttgggtatggtattctttgtaataacgttgcggggatgtggtcattatttaagttgtcgtgaactcagatttgtactactagtgcaggatatataaaaaggccttccaactttcaaaaaataaattccacactattattctgacttctacgtggtttctctttgtatgatttactagttgatacccaacgctttgcagcgggatatgtgaataaatgcatgttatacattatagaaatgatagatgtgtatgtttaaataatatgaaaatgacgtagagataataatttgacgcatattaagttctaaaaatacaacaaattgtaaatgatatatcatgtttgcatgatatttaaaatgttctagataataattgctagtgggtcatgatgtggcatacttgcatatgctttaaaatactctagataataatagataataattgatagtggttgacgatgtgactacttgtatggtgtgctttagggcatgtacaatggtctttattagcggtctctctttgttgcattgagtctaataaagaaaagatgactagtaagaaagtattttggtatattaatgattagataccgtattgtcttaactattgtaacgtgatagcctctaattaacgtagagaccataccggtctctacctttgtacttgcccttaggagttagtggatatcaactatatatagatagtatagatatgcaatggaatattaatcagatgttcaactaattgatttagcaaatcacatcatcacaattccatgaaatgaagctgtgcatgcacacaagctagatatatgatcgatccaaatatgtacaattttctctccttctaataatatgtatattgatgtgcaaggctatttgtgcgttcaaaaaaataataaagacaattatgatttaatttattgcacaaagcacacattttatgaagatacaacaagctaaaagtatcccatattattttcaggtggggaaataatctatacggtgcagtggaactaacctactctcgagatcgtatagttgaatgctacttttggtcctatacaatttactacgaacagaaatatgcgcaagcacgaatcatccttgccaagatattcgtgctagcaaccttactagatgacacttatgatatgcatgctatattggaagagggccaaaagctcaatgaagcaatacagagatgggatgagagtgccatttctgttttgccggagtacttgaagaattactatgccaagctaatgagtaccttcaaagagattgaggatgaactgaaatcagaggagaagtactacattacttatgctgtaaaagcggtacaatactagtactcatcaatcctttttactccatatgtatgtcatcctcgttaatgcaaacagagtcatatggacacttgctatgtgtgatcgtgatcgagccaacaaaagtataacaggcacaaaatcataggcaaaaagttgaagaacactcactatgtataatgtaggattgaaacatagcaagagccaaccaaaggtaggatgaatggtagtggtagaaaaaaaaatcttgtacaattgaaatttcaccg

SEQ ID NO: 18533 - DNA, 1967 bp, Oryza sativa
  ref <308>: DATABASE ACCESSION NUMBER: AK068924
  ref <309>: DATABASE ENTRY DATE: 2001-12-06
cctccaacctctctccccacctcgcgcctttttcgctattttcctctctctcccagcgcgcggccaccgccctcttcttcttcctgttcttccaccaccacatcggcgccgcctgtctcatgtgggcttagccatgacgcggctcgccgtgcgctctctggtggtcttgttcttgactgtggcctcgccgtttcttgttgctggtggtggtggcgccaagctcaacgcgtcgtcgtcgtcgtcgccgctgtacgggatcgagttcccgccgttcaacgccggcgtcgcggatggcggatgcgacgggaagctgatggtgcaggggatggaggaggtgagccggtccccttcgctgaagctgcatatgacccaccggtccgccgccgaggccgccgcggcgggcaggacgaggaaggagtcgttcttggattccgcggggaaggacgttgcccggatccacacgatgctcaggagggtggccggagcaggcggaggtagggcagcgacgaattcgacgccgcggcgcgcgctggcagagcggattgtggcgacggtggagtccggcgtcgcggtcgggtccggggagtacttggtggatctctacgtcggtacgccgccgcggcggttccagatgatcatggacaccggcagcgacctcaactggctgcagtgcgcgccctgcctcgattgcttcgagcagcgcggcccggtgttcgacccggcggcctccctttcctaccgcaacgtcacctgcggcgacccccgctgcggcctcgtcgcgccgccgacggcgcccagggcgtgccgccgcccgcactccgacccgtgcccgtactactactggtacggcgaccagtcgaacaccaccggcgacctcgccctcgaggccttcaccgtcaacctcaccgcccccggcgcgtcccggcgcgtcgacgacgtggtgttcggctgcggccactcgaaccgcggcctcttccacggggccgcggggctgctcggcctcggccgcggcgccctctccttcgcgtcccagctccgcgccgtgtacggccacgccttctcctactgcctcgtcgaccacggcagcagcgtcgggagcaagatcgtgttcggcgacgacgacgcgctgctcggccacccgcggctcaactacacggcgttcgcgccgtccgcggcggcggcggcggacacattctactacgtccagctcaagggcgtcctcgtcggcggcgagaagctcaacatctcgccgtccacgtgggacgtcggcaaggacgggtccggcggcacgatcatcgactccggcacgacgctgagctacttcgcggagccggcgtacgaggtgatccggcgggcgttcgtggagcgaatggacaaggcgtaccctctcgtcgccgacttcccggtgctgagcccgtgctacaacgtgtccggcgtggagagggtggaggtgccggagttctccctcctgttcgccgacggcgccgtctgggacttcccggcggagaactacttcgtccgcctcgaccccgacggcatcatgtgcctcgccgtcctcggcacgccgcgctccgccatgtccatcatcggcaacttccagcagcagaacttccacgtcctctacgacctgcagaacaaccgcctcggctttgcgccgcggcggtgcgccgaggtgtaagccggcgccggcgccggcgccggccacgagaggatccaccaatttgaaggtcctcattttgatcgaattcgggtttaggtgtggccaaatttggggcaaatttgggtgtagaaattttgggggcggaaattaaaggtcaggaggagggggttgacacgcaaagttgtatgtagcacaaaggtttcgaaatctccaagtaacagagatttttttaggaataattaggaatacttttttaccaaaaagattgcagtttgtatacagattttggttcaaaacatttcgcaag

SEQ ID NO: 18534 - DNA, 812 bp, Oryza sativa
  ref <308>: DATABASE ACCESSION NUMBER: AK068925
  ref <309>: DATABASE ENTRY DATE: 2001-12-06
ggccgccgtctccgccgccgccgatgttgtccgccgcgcgatccggagccctggcgcgatggcgtccccgggagaccctcctccctcgcctcctctcctcctccgccaccggcgcggcctccccgcctgcgcggcaggcggcgctgctggagctcccggaggtggagaaggtgctgcgcgacgtgcgggcgggggacgtgcgcgtcttccccgtcggcgagggcgggctgcatggcggctcctgcgccgactacatggtcgtcgccaccggccgctccgactggcacgtccgcaacatcgcccaggctctactctacaagataaaacagaagcagaagggttctgatagaatattgatgccaagtgttgaaggccagcaagctggaaagtggattgtcattgattctggaagtatcatcattcatgcacttgaagaaagagcaagagaatattatgatttggaaagcatttggacaaaagaagtgtctccaaacatttctgttcaggaattggaaacttcccttgtgaagacacgccgcagggaccactctcagaaacccatgaagagcatttgagtacatgagctagttccatgatctatgatctgtgattgtgagtgtgtaatccatcagatttgtgtcatctatttctgatgtagatattgtgtggaacgaaccgcaccactggccaccattaacttaagcttcatttacatttcatctatggtttattccaggtcaacaaagatgataaagtggtgtcaagcatgtatttgcatccaatgaattttgaggatgggtgagatgcttgtg

SEQ ID NO: 18535 - DNA, 1402 bp, Oryza sativa
  ref <308>: DATABASE ACCESSION NUMBER: AK068926
  ref <309>: DATABASE ENTRY DATE: 2001-12-06
gagcagcagcagccagcaagggtaggttaggttgacgaggatggcagtggtggtggctggcagcagggggaaaggggagcagcagcggctgccgtggcgagaggcgcagcaggaggcgaggtgccccgacatggcgccgtcgcggccgccaaggccaaggccggggccggcgagggccgccgtcgtgtactacctctcgaggaacgggcacctcgagcacccgcatttcatggaggttgccgtcgcctcacctgacgggttctacctccgagatgtgatcgaccggctcgacgcgctcagaggcaaggggatggcgcgcatgtactcgtgggcgtccaaaaggagctaccggaacgggttcgtgtggcacgacctggcggacgacgactacatctacccggtggctgggcgagagtacgtgctcaagggcacggagcggctgcacccgatccagctcccgctgctcgacgcggccgccgcgtcgtcctgctcctcgggctcgcaggagacggccacgtcctcgccgcccgggtgggagaacggcaccggcgaggcgcgccaaaagaagggcgcgggaataaacacgtcggagctttgtgagtacagggtgtacaaggccgaggaccccgccgcggcggccgcggacgccgcgacgcagaccgaggacggttaccgcagcagccgcggtagacacgcccagcgcgccgcggccgcggcggcgcaggaggagctgagcagagaggagacgtcgccgccgacggcgtcgacgagccccgagacgctcgaggcgctgatcaaggcggacggacgcgtcatggcggccgtcaccggcggcgggaggaccagggcgtcgtccgtgctcatgcagctcatctcgtgcgggtccgtctccgtcaagagcacgctcgcctcgccggtgatggctcgcaccgccgcgcactaccgtccacggccaccgcgcccacctacactcgcgtcgaccaccaccgagatcccgaactaccgccaaaagatcgtcgaggacaaggagtacctcagcggtagcctcgtcgagacgaagcgctcgtcgccggccgacacgtcccaagacattgccgttctccggcggtcatcctcttacaacgccgacagggtgcagaaggtggagccgtcgacggaggccgtggacatgcacgacagatgcatcccgcggaggcccaggggcaagaaggacggcggcgcctacctcatctccggcgggaacgggcagtacgggagcaaaaggcacgggggatgaggagtttgggcttgggttcaggcttgcgccggtgtggtgatctcatactacctattgtacgggatgataattccgaaattgatactcctatatgttagccattaattatgttctgtatatgcctcc

SEQ ID NO: 18536 - DNA, 1043 bp, Oryza sativa
  ref <308>: DATABASE ACCESSION NUMBER: AK068927
  ref <309>: DATABASE ENTRY DATE: 2001-12-06
gaatccgcaaaccagttcgccccccaaatccgaccgccgctcaagccccacgccgcgccaccggccgccaccgccgccgcggacagccgcgatggcgaagaagatgggcgtcaactccaaggcggaggcggcccgcgagcgccgctccgtcgcggaggccgaccgccgggaccgcgtcgagcgcgccaaggaggaggagtactggcgcgaggccgagggccccaagtcccgcgccgcgcgccgccgggaggaggacgccgagaagcgcgccgaggccgccgcccgcaaggccgagaaccgccgcctcgcggaggccgaggccgcctccgcctccgcctccgcgccgtccaagacggccgccagcaaggcctcccgcgtcggcgccccggcgcccaaggtcaccgaggccgagctcgcgcgccgccgcgaggacgagcggctccgcctggagcgcgaggccggggccgccaagaagcgcgccgcgcgcaccgccgaggaggaggagtacgagcgcgtcgtcttggtcgccaacaccaacagggacgactccatcatcgaggcgaggtcggtcgacgaggccatcgcgcggatgtcgctggttgactcagagggagccttgcccgccgacaagcaccctgagcgtcgcctgaaggcatcattcaaggcatttgaagaagcagaactccctaagttgaaggaagaaaagccaggcctaacactgaatcagtacaaagacatgatatggaagctatggaagaagtctccagacaaccctcttaaccaggctgcagagtgatgatgcattcctgctgaattgtagaatttccaagacttccaaatgggtcagaacttcatcagatgctcatggactgaatgtgtgggagatgatcagcttctcggctaataatttacaaagtgatgcagtatatatcatgtgagctcgtttttgttagagattttcttctggttcctgttgtgcgtaatgtggtcgggggcacgttcacttgaattttaacgattgtcaattcgaaattgtggttcat

SEQ ID NO: 18537 - DNA, 3699 bp, Oryza sativa
  ref <308>: DATABASE ACCESSION NUMBER: AK068928
  ref <309>: DATABASE ENTRY DATE: 2001-12-06
gacacgctgctgctgctgcttctcgatgaggaatatttttttttgcttcggttaaagcaacgctaattccccgcgtcgcaagcttgcgtttctaggagaaagtaaagcttgcgtttttgagactaaagcttgcgttttttgttttttaattgtggagtttgggaggaggaggggaaaaaatcgcgatcaggaaaaggcatctcgagaataattatttaagtccccagagcgagcagtgacgcgaaattccccaggagagatctccatctccacctccactgctcgggcggggatgtcgtcggcggcgtcggcgtcggcggccggaggggcaggcgaggagggcgccgccgccgccgcgcagccgcagcaggaggggccggtggtgacctgcaagggcgtgaacgggctcgacaaggtcgtcctccgggaggtccgaggcagctctgccgaggtgtacctgtatggcggccatgtcacatcatggaaagatgagcatggagaggagctgctttttgttagtaataaggctattttcaaacctccaaaagctatacgtggagggataccaatctgctttcctcaggtccgtgcttttcctttcctgcattttttttttgctcgtaatctcttccgctttctcaaattttaattttgctcagtacttcgtattctagttttcaacttcggaaatctggacccacatggctttgcaaggaacaggacctggagtgttgaaaatgatccaccaccatttccagtaccaacttctaataaagcttacgtcgatttaatccttacgcatactgaagaagatctaaagatctggccacataggtgggcatatactaaataattacatgttaatagtaaattaattaccattgtaagataattgaaagtttttttccctctatttcttatcatataattgttttagtagaagacaaggtagctgttcacatggatcagtaaaagcaaatcctttatttcagttacgagttccgtctgagagttgcacttggacctggtggagatctgatgctgacttcacgtataagaaataccaatgcagatggaaagccattctcatttacatttgcatatcacacatacttttcaatatctgatatcaggtacacttgtttaactctcgacaaagcccatcagttctgaaaaattcatttcaaaggcacagtgcagtattggaagtgatcatgtttattatccacctaatatgtttgtctaaaatgtgggcttaattaatggaaaatgtttctgtatgtttatccacaatgaagaattccttttccatttcaaatgtatttccatagacatacagaaacaatttcttcattgtgcataactttatgctaatatttcagcgaggtgcgagtagaaggcctggaaactctggattacctagacaacttacaagagagaaatcgatacactgaacaaggggatgcaattgtttttgaatctgaagtgcgttaacaaaacatttgaaccttacactatccttcatttttctttgcattctaactaaggaagcaaatgcaaacttattgtacagttggacagaatatatctgggcacaccgtcaaaaattgccattattgatcatgagaagaaaagaacatttgttgtgaggaaaggtggccttcctgatgctgttgtttggaacccttgggacaagaaggctaaggctatgtcagactttggggatgacgaatataaacgcatggtctgtgtggaggcagctgctatagaaaagccgattactttgaagcctggtgaggagtggactggaaagttggaactgtctgctgtcccatctagctattacagtggtcagctggatcctgatcgtgttcttcaggattcaagtgtcccggaggactcaatcagctagtccttagtggatatttgtccaggtaacatttctactaaagtatcagacttggtcctgtctttgagttgtgaacatagattagtaaatttctgtgcaggcaagtaagcggcattcttctagtagtatggtcctatgtaaaaaatgtctacatagtattgcatgcagactagaagacgtatgatggtcctgcataaagttttcaacatagtttacatagaaaataggcatgtaccatgcatagcccatattatattgacgagaatcctttttttaatctaatcatctccgtactgttttcttgtggaagcctgccattatttatagaaattcttaggtgacgtgccagattgccagagtatgcattgtaattgtgatatctagaccagttcaagtgtccggctttggagtggtctgtggtcagttagcatatacataaacacccagaatttgacggcaagcagaccagttttttttgtgaggaggttatattaacaaggaaaaagctcttgtgcttgagctggtgggtactctctctatctgtactgtagagtgtgctttgagattcggaaatttaaaaccatgcctgactttttccttttaatgtgattttcatgcataattggtagtccagtacctgcaaatttttgaaattttagcgtttgtaatgtttgaaggagacagagaatatttggaaatgctaacagtgaagaaagctgttgcgctatcatcaagtgtctcctattggagttaaatctgcaatctagagatatatggggggcattttgcaccaatctcaaacagcaaggaatggtgcatgttcatgggttacctacccttcagtcttttccccttcagggtatcaaaatcaggggttagggcctaggggagactcgaggctaacttaaaatggcatctgcatactatctggggatgccaaatagtgcgcattattgttttatttgcttgcagttgtgaatgaagtgatgctgtaaactctgcacttttggccttttgggcatgtacatgtattttttcaccgcacatttcgctaaaattttgtttacttgctttgtactgaccttggcatgttcttttgttgtaggtagactattatatcatatgcataagggacattggcaacaaggagtgtcaaaacgtttattccattctattcaaatctttgttgttttttggcatgcatatctgaactgaggaatttcaaaattgatttacgttttgatatctacataacgtaaggggacgggtcggtattaataccctgtatatgcatgtttgaagtgagaaacatctcattgggttgtaaaataaaaatcaatactgtatctcttttttgatcggcaccttttccattctaatatcaagtaaaatagtacacctacaaaacgtagtcacctgtcctacgaacgtgcatatgaggtataaacattctgagcttggttaaaaccaggacttgtttggatccataatttacctgtgcttgtactttggtttgaacacctttttcttgatggagatggatgcagaagtgtgaagtcaccttgatgcttcagggtagctgttattgcagtaggagaaaatgaagtatctggtgtttagcgaagctggacattatcaacgtcagctatttagagttagctccagatcgccgtgttttgattaattttccaagttgatatgaaaacgcggttgtaaaatgaattgccacaaatttctgtcgaaccaaattaaattatggttagactaattatgtgattatctcttttctt

SEQ ID NO: 18538 - DNA, 1158 bp, Oryza sativa
  ref <308>: DATABASE ACCESSION NUMBER: AK068929
  ref <309>: DATABASE ENTRY DATE: 2001-12-06
ggtggtgttcatcgctagacgccatgcgaggcgagggttttagcactcgatctcctcctccgtggcagtagagggcggtgcttctccgcccaaaatcttcggtctccgccgccgtttcttgggtgctctccgccttccgtttgcgttgaaggatcaagaacgacgcctctttctttttcttggattttccttctctgaaacccccaatcttgaggtccttgatttctctaaggccagtccgtagtgccagctgaacattgatattgcttaagtaaggcaaccgtattgcccaatggacaacctgtcagagccactgctcgcagagatcatcaagaggattgccaagacaagtgatcgtaactctctttcccttgtgtcgaagcagctctacactatcgacgcggagcaaagggatgctatccatgttggctgtggtcttcacccggcaactgaagctttggcatcactatgctcccggttccctaatttgtggaaagtagtgattgattactctggttggatatctatccacgggaagcagttggacaaccaagggctccttgtgctttcgtctcactgctcttcactgaccgatctcacattaaacttctgctcctatatcgatgattctggtattggctatctggcttattgcaagaaactaaggtctttcaggctgaactttgcaccagcaataagttcaagagggcttctctcggtggcagttggttgcaagagtctttgtactttccaccttgttgattgcatgaaagtaggaagtgtggagtggctggagtaccttggcagggccggatcattggaagaacttgtggtaaaggattgtaagtgtaggaataagtcttggctggttggtcttggtcttgtggtgcctttttcctgcttttcagctttctaggacagcatctctactttcagtttggatgctctaggacagttaggacagcagtttgttgagatgctctaggacagtttgttgggatgctctgctctaggacagtttgttgggatgctgacagcaccctcttagactagcatggctgcatggctgctacaagcagctataaatatgtatccaatcctctttgggaggacatggcttttgtgtttagtgaatgaagaaaaccagaaaattgcccc

SEQ ID NO: 18539 - DNA, 1408 bp, Oryza sativa
  ref <308>: DATABASE ACCESSION NUMBER: AK068930
  ref <309>: DATABASE ENTRY DATE: 2001-12-06
ggctcgccgctcccattccctgcggattctatctctctcttctccaattcgcgcgggctcgggcgccgcattggcgcgatctccggattgtgagggggtttgttgtcgaattgttgggggaattgtgggtgctggttgggccgatctcgtcgctggagcaggaggggtttcaggatcggtgcggttctgtgtggttattggggattgttgtgatcaagattcggcttcttgcggtatggcgaggatgggcgaattgagggggaattggagcgaatcttgggtccccaatgcttgatctctgattcttgggaagtacattctccagattggtgcgatcccggcgtgaattttggggaatttctcggatcaagaatttggccaactgtccctgcaagaaacaggggaaattgggggccaatctggtgccaattggggagtaatttggaggtggaggcgatcgatccggccggggagatgattgcggcggtcggccggggaccggagggatggggggaggacgagatgtccgtgctaccgcggcataccaaggtggtggtcaccggcaacaaccgcaccaagtcggtgctcgttggcctccatggcgtcgtcaagaaggccgtcgggctcgggggatggcattggctggtgcttaccaatggcatagaggtaaagctgcaaaggaatgctttaagtgtgattgaacctccaactggcaatgaggatgatgataagtttgactgtgagaacatgcagtggaatagttcagatctggcatccgatgacgcacaatcaccaaagccacagaggtcaaggagcaggcagcatagagggttccagaccaaatccttcagccgctccatgtcttgtgattcccactccaaggcgtcattttcttcctcctcaagggctcacacgaaagttgacctgagcaagctggaaatgactgcattatggagatattggcgtcacttcaatctcgatgctagccctaacccatccagggagcagttagtggatgctgtccagaggcactttgtgtcgcagcaattggatgagttgcaggtcatcgttggtttcgtgcaggctgcaaagaggctgaagacaaacgtgaaagtggcctgatggagagaactggttgtcttcaactaacagattcaagataggatgcaacatgtttggtcaatgttggccatgctatgtaatatatgtgcatgaggctgcttagatttggatggctagattaatgcacaactagaactctcttggttcatcgtctttatgttagctccctgtgatgtagatatgcagtatgctggcaaaggatcttgcaacctctagctcagttatctcctgctgactggatgtgaattgacatgacaaattataaatcagcttctcatatttaccc

SEQ ID NO: 18540 - DNA, 1389 bp, Oryza sativa
  ref <308>: DATABASE ACCESSION NUMBER: AK068931
  ref <309>: DATABASE ENTRY DATE: 2001-12-06
gagggtttggtctcgcctccatccccatcgtccgatccgatcccccgccatgagcggccaccacgaagctaagccctaccagccccgccgcggcccggctcccgccgacgaggaggccgcccccgccgctgcggcggacgaggcggaggcggaggcggaggtggaggctatggagcggtacgagcaggagcaggagtacgaggagggggaggagggggaggaggaggagtacgagggcggggagggggtccccatggacgccgacgcctccgccgcggccgtggcggggatggacccgcacggggagatggtgcccgtggccggcggggaggcgggcggcggctacccgcacgtggcgtcgaacaccctcacgctgtcgttccagggcgaggtctacgtcttcgagtccgtttccgccgagagggtgcaagctgtgctgttactgcttggaggaagagagctagcaccagggtcgggttcggtaccatcatcttcagcggcatacagtaagaagatgaattttcctcaccggatggcatcattgatgaggttccgggaaaagagaaaagagagaaactttgataagaagatccggtatactgttaggaaggaagttgcacttaggatgcagcgtaatagaggccagtttacatcatcaaaatcgaaggctgaagaagcaacatccgtcataactagttcggaaggttcgccaaattggggcgcagttgaaggtcgacctccatcagctgctgagtgccatcattgtggtattagtgcagcgtcaacacctatgatgcgccgtggtcctgatggcccaagaacattgtgcaatgcatgtggacttatgtgggcaaacaagggtacgatgagagaggtaacaaaaggtccccctgtgcccttgcaaattgtgccagctgcaaccaatgatgttcagaacggaatcgtcgaggcaacaggtgtcgagcagcacaattctgcagtcgaggaggcagtttctgctgcaaatggccatgaatcgcagtcgggagtcgcgtgatgcttgagggttcagacttgagaaaaaggaggaggatgcgtatcaatcaacaatcaagtagtcatggtgctcaacaagttaaccggatgtatgatatgaccggctctaggattcatgtggttctgcaatgccggtctctccgagatgatatatgcttgtggccggctttttctatgcttgtatttgagttttatagctttgcctttggcagtagataaatggacgagttcagcttgagcgcatgtgacatattttgcattttactctcttgtcagatgtaatcgttgatttacaggtgacactgggcaagcaggcaggttaatttcacaatcgcagcatcagtgcattgtctg

SEQ ID NO: 18541 - DNA, 3165 bp, Oryza sativa
  ref <308>: DATABASE ACCESSION NUMBER: AK068932
  ref <309>: DATABASE ENTRY DATE: 2001-12-06
ggacgaaaatgccactcactttccccacacgcgttcgtcactccaagctcgatgtctctcccccgccgctttggatcaatcgtcagcgactcaccattcggcgactcggccattgacagcgatagtcgcacgggttcttgcttatttggatccgttcttccggggagcgagctaaccgggcgagcgagatgcagcaccagcaaggatttgatacacacaggctacaccaggaagtaaaatcgcggtggttaaagcctaaagaggttctgcagatattgcagaatcatgatcggttcatcatcacacataagactcctcataagccaccgagtggtgcttggtttcttttcaaccgtagagttcttcggtacttcagaaatgatgggtatgaatggcgaaaaaagaagaatgggaagactattgctgaagcccatgagcgccttaaggttgataatgttgatgcactgaattgctactatgcacacgcagacaaaaactctacatttcagaggcgtatatattggatgcttgatccggcttatgatcacatagtttttgtccactacagagatgttcaagagggcagcatttcagtatcagcactgaatgattcatcaacatccaatcagaatggcagtggtagcagagctgaggctcaaagttcacccggattgactagcgagctatttgccccatgtcttaattcatgcagtccaggatctgcggaagaagttagttcccagattatggccataaacaacgaaacaaatagcgttagtcaacctgattgggttcaacattgtaatcaggcagcgctgcgaaaacttaaggtgcagctgagtctggaagatagggaagatcatgatgtcgatgccaaagatattccatcaaacagtgaacctatcactgtgtatgggattcagaatgaagagccaggcacttgtagaaatcttgcagatgtttttagtggactggagttcagcaaagaaaatcatcctgaagaaaccggactccctttttccagcactattgatgtgctgaaaaattcagacacttggttggaggaggatcagattgaagcaattctgcattcagcatctatgatagtgactgaaaaccaatggttcaatattcgtgaggtttccccagaatggtcctattgttctgaaagtacaaaggttatcattgcaggagacttccttcgtgatccctctcatggttcatgggcaatagtatttggcgatgttaaggtacatgcagaaattgttcagcaaggtgtcattcgttgccatactccatgccttgatgctagaaaagtgacaatgtacttgattgatgaaaatgagaaagcctgcagtgaagcacgacaattcgaattccataataagcctaccaaaagtgtggtttgtgagaacaggaaaccctgcagagaagtacatgaatctgaactccatcagaggcctactgaaagcaacaatgagctattgttgctttttaactatgctcagttgcttttcgatggtcatgtttctgagcaatttttaaagtttggcttgccattcccaaatcttgaatgcggactccaagttagcccatctgaaattatgaagggggcatctgagcggctgaaccgtgacaccgcagtaaattgtgtcatggaagtactgcttaacaacaagtttgaagagtggctgttttctaaatatgaacaaaatagtgaagggaatcattttctccctaggcaataccatggtgttatacatacaattgctgccttggggtacaactgggctttgaaacttctgcttaattcaggtgtacttgtaaactaccgtgatgcaaatggatggactgctttacattgggctgcacgatttggcagggaagagacggtagtgctccttcttgatgcaggtgccgcagctggtgcactgtcagacccaacagcacaagatcctgctgccaaaacacctgcttcagtagcttctgcatatggtttcaagggcctttctgcgtatctttcagaagcagaactaatagctcatcttcattctctcgaatcaaaagaaaacgggtcttctggagatcaaatatcaagagttgtgggcagaatatcagacacatctgcccatgcacaaagtggtagcgatgatcagcttgcactgaaggaatccctaggagctatgcgatatgctgttcaagctgccgggcgcatacaaactgccttccgtattttttccttcaggaagaaacaacaagcaggtcttcagaatagaggtaaccacattatatccattcgtgaggtaggtgctgcttcacacggtatgcttgagaaagccgcgttatctatccagaagaacttcaggtgctggaagaaacgcaaagaatttctgaaaatacgcaaaaatgtcatcaagatacaggcgcgtgtcagagctcatcaacaacataacaagtacaaggagttacttcgaagtgtgggcatccttgagaaggtcatgcttagatggtaccgaaagggtgttggtttacgaggattccaccctggggcaatagcaatgccaatcgatgaagaggacgaagatgacgtagccaaggttttccggaagcaaagagtggaaacagctctcaacaaagctgtttcaagggtatcatcgatcatcgacagtcctgtcgcgagacagcaataccgaaggatgctcaaaatgcacaaacaaaacaaggatgatgatgaaaaagtagaagtttctccagcatctcatgtttatggcagtggcagtcatcacatgtgttggctaagccacaacaacaaagcaatgcactagctggccagtattgccatgtccgaccttgttaaatgatctgacgagcagttggccttatgaagaacagtaaatccttggcgattcactgtgcagcgaatcctgaaaaaccagaggaatttatcgatgatccagtaccatcactggttcttcttgcccttgctctgaaaaaatgtgttttaccttttgtacataagaaaaatcatgtgcaaagctgactcttggccaatattcagaaaaggtgtaccctctttgcatttgttacccttgtgtatatggtaatgaatgtgtggtgaatctttaaagtgaagcttattgcgaatgagagtacccgatcttttgc

SEQ ID NO: 18542 - DNA, 1157 bp, Oryza sativa
  ref <308>: DATABASE ACCESSION NUMBER: AK068933
  ref <309>: DATABASE ENTRY DATE: 2001-12-06
gtatatatcagttactccaaaacttggatgattaagctagcaatgttgctgccaagtaacttactgtcattctcttggctggaaactatggagctgaatgcagtacagggaacctggtgttcttctatggcgcggcttcacactgcaagaatttgcaaatcagtgctttgggaataagctggattatggtaaagggaggcagatgccaatacactatggatcgaaccgtctgaattatttcacggtgtcatcgcctattgctacacagctccctcatgctgttggagctgcgtactccttgaagatggacaagaaagatgcatgtgccatcacgtattttggcgatggcggcacaagtgagggagacttccatgctgcactcaactttgcagcagttatggaagcgccggtgatcttcttctgccgcaacaatggctgggcaatcagcaccccaactagtgaacagttcagaagtgatggagctgttatccgtggtcaagcttatggaatgcgcagtatcagagtagatggaaatgatgctcttgctgtgtacagtgcagttcacacagccagggaaatggctatcaaggaaggaaggccaattttagttgaggcactgacttaccgggtcggccatcactcgacatccgatgattcaaccaaatacaggccggtcgatgagatcgagcactggcgaacagcgcgagatccgatttccaggtacagaaaatgggttcaggggaatggctggtggtgtgatgaagatgaatctgaactcaggaacaatgtgaggcaagagcttctgaaagccattcaggtggcagaaagaatgccgaaaccgccgctcgctgaactattcaccgatgtttatgatgaagttccttccaacctaagagagcaagagcgattgctgagggatacaatcaagaagcaccctgcagactacccagctgatgtgcatatttagttgtattgggtgaccagaggtttccatattgtagtaactattgataatttaggttcatagcattgataaataataacaacaataattcaggcaataaaatgctgatccaacagttataaatcaaatacaaaaaaaatattgttgctatgaatcataaatataaaaggagtatatgagataatggtacagc

SEQ ID NO: 18543 - DNA, 1137 bp, Oryza sativa
  ref <308>: DATABASE ACCESSION NUMBER: AK068934
  ref <309>: DATABASE ENTRY DATE: 2001-12-06
tgactggagttagcgagcactgcgcactgagcacctcgacacggcgcgcgcgcggccatggtgaagaacacgagcaacaagtgcattgctgctgccggcgcgacggcggcggccggcttaggcggtggcgcggcgtcgtgcagcggcggcggaggtgatgggaaggtgacgacggcggcggcagcggcgttggcggtgaggccgtacaagggggtgaggatgcggagctgggggtcgtgggtgtcggagatcagggcgccgcaccagaagcggcggatctggctgggctcctacgccacgccggaggcagcggcgcgcgcctacgacgccgcgctgctctgcctcaagggctccgacgccgtcctcaacttcccctcctccgcctcgtctcgccgccgcctcgacatccaccgggggggcacggactcggcggcgggcgacatgtcgccgaggtccatccagcgcgtcgcggccgccgcggcggcggcattcgacgccgccgccgccgccgtcgtcgtcgacgaaagctgctcgtgcagcgccgaggcgatgtcgtcgacgccgacgtcgggagcgacctcgctgtccacgctgggaagctccggcggcggtgacgtgctggaccacgcgacgacgccgtcgtcgtcgtcgtctgccgcggccaacgtttgctcgccgccgctggagggggaccatgagctgtggacggagctggacgcgttcgcgtcgccgaagttcatggatctaatggccgccggcggcacggcgttctcgtcgccgtgggaggagcccgaggaggacggcgagctgatgaggctgtggagcttctgctagcttagctaggagcctaggaaatcgatcgtgaatccattcgcccatgcaacacaatactaccattgatccaatcaatttctcctctctttgagcatcgaaagctaggttaattaggccttggtccatggcttcagttcttccatagattcttcttcttttctttgataatatcttgattaattaatatggttgtaatttatataagtattttacggtgttacactgtacgggttgttgaatgagactgtgagtgcattggatactggttggatttgttccatttctgttctaatttaatttctt

SEQ ID NO: 18544 - DNA, 1395 bp, Oryza sativa
  ref <308>: DATABASE ACCESSION NUMBER: AK099079
  ref <309>: DATABASE ENTRY DATE: 2002-08-28
gatattggtgatggatgaaattaatatgagaaatgatgaatggatatgatatgcagtcggtgccggtgtacttgtcggagatggcgccggctcggctgcgggggatgctgaacatcgggttccagctgatgatcaccatcggcatcctggcggcggagctgataaactacgggacggcgaagatcaaggccgggtggggatggcgggtgagcctggcgctggccgccgtccccgccgccatcatcaccctcggctccctcttcctcccggacacccccaactcgctcatcgacaggggccacccggaggcggcggagcgcatgctccggcgcatccgcggctccgacgtggacgtgtcggaggagtacgcggacctggtggcggcgagcgaggagtcgaagctggtgcagcacccgtggcgcaacatcctccgccgcaagtaccgcgcccagctcaccatggccatctgcatccccttcttccagcagctcaccgggatcaacgtcatcatgttctacgcccccgtgctgttcgacaccctgggcttcaagagcgacgcgtcgctcatgtccgccgtcatcacgggcctcgtcaacgtcttcgccacgctggtgtccatcttcaccgtggaccgcctcggccgccgcaagctgttcctgcagggcggggcgcagatggtggtgtgccaggtggtggtggggacgctgatcgccgtcaagttcgggacgagcggcatcggcgacatccccaaggggtacgcggcggtggtggtgctcttcatctgcatgtacgtggcagggttcgcgtggtcgtggggcccactggggtggctcgtccccagcgagatcttcccgctggagatccggccggcggggcagagcatcaacgtgtcggtgaacatgctcttcaccttcgtcatcgcgcaggccttcctcaccatgctctgccacatgaagttcggcctcttctacttcttcgccggatgggtcgtcatcatgaccgtcttcatcgccctcttcctccccgagaccaagaacgtccccatcgaggagatggtgctcgtctggaagtcccactggttctggcgccgattcatcggagaccacgacgtccacgtcggcgccaaccacgtctccaacaataagctccaaccataatccgctcacgaatatcgtcgtccatgtctccgtcacgccctatattcttcttcttgtgttcatccccgtgtacagtagatgccttttattagtttgttttgttttgcctagtcagtcttcaatcttaatgtacgtgtgtttcttgtttggccaaattgatcttaattgctgtacctttcactgtcaaagagcgtcccttgttaccattatcacacggaaagattaatcaattaatttc

SEQ ID NO: 18545 - DNA, 914 bp, Oryza sativa
  ref <308>: DATABASE ACCESSION NUMBER: AK068935
  ref <309>: DATABASE ENTRY DATE: 2001-12-06
gcccatggcagccgcgaagccggtggagccgctgccgctgctacgagccggcgcggataccgccgccgccgccgctctccggagattccagcttccgccgcagccaccacgcagtgtcagagccaacgctatcagggcctctcctccttcgaacggcgccgggagccccgacgagctacccgccgcgctcctgcccaacgcggcgcggcggcgggacggctgcgggttcagcctcggcgtggacctgggagaagcacgcaccggagtcgccgtcggcaggggcatcaccctcccccgtcccctcaccgttctgaagctgcgtgggcagaagctggagctgatgctgcttgacatagctcagcagcaggaggcggacgagctgatcgtggggctccccgtctccgccgacgggagcgagacgccgcagtccaacaaggttcggagcgtcgtcgggaggctcgccgtccaagcggccgacaggggattgcgggtgtatctgcaggatgagtacgggacaacgatcgacgccctcgagttcatgatctccaggggagtcaagaggtctgcacgtgatgtcaaatctgatgcgtattctgccatgatgattttggagagatatttctcgtcatcaggtcaaggggctaagattgttcttcctaaacaaccacaactacagagcaaattgttagagaagtcaaggcaagatgctcaagtttaggaagccgtgtacgttctaatctctccaaccatagatagcagacttatcacaacagcgttcttgttgttctaccagctaacttcaattgcgtagtacagtattttatatagtcttgttcgccgtactcatatgattaaacgaagggaggatgacttgttgacattctgccaatttatcaaaattacaagtttcgatc

SEQ ID NO: 18546 - DNA, 1730 bp, Oryza sativa
  ref <308>: DATABASE ACCESSION NUMBER: AK068936
  ref <309>: DATABASE ENTRY DATE: 2001-12-06
gtcccaaacacacaatctcctccttcccactctctccgttgcccacttccttcgcatctcctctccctctccactcctccgccgcggcggcgccggagctgtgcccgccgccgtcggaagcgtagcagcaggggatggcaatgcccccccgggtcaccgatccccggcggtgaatttcagcgggcggggagccgcgccgccgccgtcgacgacgactctggtccgacctcctcactggtcaagctactgcatttgtacagttcgctgaagatcggtagttcgtacaagctgggatgaagtcaaagactaacaggagcatacagaaggcgagaaaaacagataatgtccaaggaggaccaaactgggttcttgttgcgggaggagttttgctgagcacactctcagttaaacttgggtgcaaattgaaacaactatttgatgcgaagcaacgaaatagtaatacttccaaagcccaaagaaggccaggaacatgtgagttacactcaaatctctaccggtttagtgatcacctgagctgctaccattgtaattcagggttttcaggcaatggagtaggagtaaagcaggcacctgcaagtcctgcatcaaaacagatggaaccctcccttccacttgtgaagataccaggaccagaatcaagcaaagagaataatggcgtcatgtggatatcatcacctgatcgacttgaggatcctcgtaaaccatttcagtactcaaacagttctggctctccttgtgtttcagaatcaggatctgacatctatagcaagaaagaggttatacagaagctgaggcagcatctcaagaaacgtgatgagatgatcatggagatgcaagctcagattgctgatcttaaaaactctcttaacatccaggagacacattccaccaatttgcagtctcagctggattccgctaaccgtgatctcttcgaatctgagcgagagattcagcacctgaggaagatcattgcagatcattgtgttgcagaagcactctctcatgataaacctttgctggctgggcattggcagtcaggtgccaccaatgggcatgccaatggctatgctgatagcagcagtgttgatgaccctgagctgcattttattggcctcgacaaaaggaaaggagaggcagaaagggtggagatgctcaagagggaggtcggtgagctaaaggaagttatcgaagggaaggacttcctgcttcagagctacaaggagcagaaggtggagctctcttccaagataagggaattgcaggagaaattctcaagtcaagtgcccaacatcctgtaggatctaaacataatgtcacgttgctgcaacgagcagaagccagaaggtggatcatctctgctccattgaccggggagtttcaggagaagaactgtcagcacagatgctgaacattttcctaggatattttcagaatgttaggttgattgccgtctttcttttcggtcatcgtaatgttaggttgatttgcttcctttccagtttttgtcactttggtatcaaaaaggatatcttttttccccagctgctagtcctagggtagatgaattaatggagatcttgatactcaaggtgttgtacaggttttcgttctgcagacacggctgtgtaatgtcattctttctccaaactacttaagacgcattaagcattcatttagaatgcaacaatggcatctctacatttagatct

SEQ ID NO: 18547 - DNA, 1830 bp, Oryza sativa
  ref <308>: DATABASE ACCESSION NUMBER: AK068937
  ref <309>: DATABASE ENTRY DATE: 2001-12-06
gactagtttagtttttgcgaagtgttcttctccaaatcacctgagaaataggtgtcgattttcagaactagcgtgctagccactagtgtggccatggaagtggtttcttccagccactcctgcttggcatttaaccgaacacctagcagtgcttggaggtttccggggaatggtcttggtccagggcatgcaaagctcactcggccaagaagtgcaattctttgtgtgcggtcagggacagcttcgaatcctgctgattctgggaaagttcatgcgagccatgggttctatgtaagtgatgtcgatgcagctctccaagggatcccgaagaaagtcggtgagatcgagaagatgatcattccgagcttgccagaaggacctgaaagctctctaattagtactggtttctgggaatggaagccgaagctgagtgtatattatgaaaagtctggcatagacaatagcaaggcaccgtctgtgctctttctaccaggttttggagtgggaacgttccattttgagaagcaattgaaggatcttggccgtgattacaaagtatggacaatggattttctagggcagggcatgtcgttgccatgtgaagatcctgctcctaagagcacatcaggagagctagatgaggacacatattggggttttggacaagaattacaaccatgggcggaggagttggtgtattcgatagatttgtggcgtgaccaagttcagcattttattgaagaggttattggtgaaccagtatatattgtggggaactctctgggaggttttgtttctctatatcttgctgcatcctgtccacaccttgtaaagggtgtcacattacttaatgcaaccccattttggggattccttcccaaccctgctacatctcctcgcttgtcgaagatttttccatgggctgggacatttccacttccatcgtttgtgaggaaacttactgaaacagtgtggcagaaaataagtgatccaagaagtatacagggcatactcaagcaagtatatgctgaccactcaacgaatgtggacatggtgttctcgcgtattatagagacaacacaacatccagcagctgctgcatcatttgcatccattatgtgtgctccaaagggacaaatatccttcgaagaagctctatctaggtgccaaaggcagggtattcccatatctcttatgtatgggagagaagatccttgggttagacctatttggggtattaaagtgaaacagcaggtgccagaatcaccgtattacgaaatcagtcctgctggtcactgccctcatgatgaggttcctgaggttccaggaaaaagccttgcctggtggatcactgggcgccttcaggcatcgtaaccccttggggcggtgcgagggtacctctcttcctcggcaagttttctctaggtgaaaaccacatctttgttagaaggtgggcgatggtgccgtccttgatggcgtgacctccgtggtggcatcgttttcgaagtctcgtctttgtggtgttgtcgtgggcctagcggcgatcagccacgcatagcgagggtcgttttggtgctaggcttcactcagtggtttgtgcttttgtggttagcgtgtggttttaggacgtgccctgtggtgcgcatccgtcctcgacagctttctgttgtgttttttcttgtaactttttctccttaatgcattcggatggcctcctttggccttcccggcgaaaaaaagtggcaagacatgttctatgttttttttctttccttttttaatctgtagagttagttcaattttctgcatttatataaagatatatgtttc

SEQ ID NO: 18548 - DNA, 1565 bp, Oryza sativa
  ref <308>: DATABASE ACCESSION NUMBER: AK099080
  ref <309>: DATABASE ENTRY DATE: 2002-08-28
gacgtgtgcgctaccgaactcccgaagccgataagccgcccgcctcctctccttctcgtcgccgtcgccggcgccggctcagcgcctccgccctctccccccacgccgccgcctcccccttcaccctctacccccaccgcgggcgcctcccctcccactgccgccgcctcctcctgctcctcctcctccacgtcaccgacgccggagcttcttcgatccatggcaacggccatttccgtcggcgtcgcagtgccagccgccagcaggaggcgcgaggatggggcagggccgccgctgcttctgcggcggcggtgcctcgtggaaggacaagtgagatgtaggttaccatggttgagaccaatacggcacaatgttagagtgcagacatccaatgtaaatgttggagctggaagctatgaaggtggcgaagcaggtagccatggggaacatttggatagttctgctaccagagattcaaacaaaccaacaaaaccaccttcaggatctcgttaccctcaatccattgctgcagtgctacttctatgtgctctggcatccgcttttattgttttctttaaaggacaaccatctgcagttgtagcgatgcttgcaaagtcaggtttcacggcagcatttacactgatttttgtatctgagattggggataagacatttttcattgctgcacttcttgcgatgcaatatcagagagcattggttttacttgggtcaatggctgctctttccctaatgactattgtgagtgttataattggaaggatttttcagtctgtaccagcacaatttcaaacaacactacctataggagagtatgctgcgattgctctcctggcattttttggtttcaagtcaataaaagatgcatggcaacttccagataatgcaaatggaaaccttcagggaaactctgaatctggggagctggctgaggctgaggagcttgtcaaggagaaggtggctaaaaagttgactagtcctcttgaggtcctttggaagtctttcagccttgttttctttgcagaatggggagatcgctctatgctggctacaattgcgttaggtgctgctcagtctccttttggtgtcgcaagcggagccatagctggacacttggttgcaactttccttgcaattgttgggggagcattccttgccaactacctatctgagaagctggttggcctgataggaggagtactttttttgctgtttgctgttgccacattttttggtgtattctaatatctgaagaatttgtagcttgtaaaggattctgtaggtcaatttaatcctattttaaggttttaagggcaaaactgggccttgtccttgttgtttgtaactagtaggcattatcctccttttcaggagcgattcctttactattggaaaacaaattgacgtgaacacaatcaacacacacgcaagctgagctgcagcacgcaaactatcagctatatgccctagagagacgaattgtatcatatactatagagtatatactatgtttataatgaaatgaataaagtattattctgttttgt

SEQ ID NO: 18549 - DNA, 2979 bp, Oryza sativa
  ref <308>: DATABASE ACCESSION NUMBER: AK068938
  ref <309>: DATABASE ENTRY DATE: 2001-12-06
gaagtgcgaccccatcgcgcgcgcgcccacgcccacgactccaagtacttctccaccaccaagaagggggagatccccgagctcaaggaggagctcaactcccagtacaaggataagagaaaagatgctgtcaagaaagttatcgctgctatgactgttggaaaagatgtttcatctttgtttaccgacgttgtgaactgcatgcagactgagaacttggagctgaagaaactagtatatttatatctgattaactatgccaaaagtcaacctgaccttgccatacttgctgtaaacacatttgttaaggattcacaagatccaaatccactgattcgtgctttagctgtgaggacaatgggttgcatccgtgtggacaaaatcacagagtatctctgtgatcctcttcaaagatgcctcaaggatgatgatccgtatgtacggaagactgcagctatttgtgttgctaagctttatgatataaatgctgagctagttgaggacagaggattcctagaggcccttaaagacttaatatctggcaataatcctatggtagttgccaatgctgttgctgcgcttgcagagattcaggacagcagtactcgtccaatctttgaaatcaccagtcatacgctgtcaaagcttctgactgctctgaatgaatgcacagaatggggccaggtttttattttggattctctgtcaaggtacaaagcagcagatgccagggaagcagaaaatatagtggaacgggttacaccccgtctgcaacatgcaaattgtgctgttgttctctctgctgtaaagataatccttttacaaatggagctcattactagcacagatgttgtccgtaatctctgtaagaaaatggcaccccctcttgttacgcttttgtcagcagaacctgagattcagtatgtagcgttaaggaacattaatctgattgttcagaaaaggcctactatacttgcacatgaaattaaggtcttcttttgcaagtataatgacccaatatatgttaagatggaaaagctggagattgtgataaagcttgcctctgacagaagcatagatcaggttctattggaattcaaagagtatgccacagaggtggatgttgactttgtccgcaaagctgttcgtgctattggaagatgtgcaattaagttggagagagctgctgaaaggtgtatcagtgttttgcttgagctgattaagataaaggttaattatgttgtgcaggaggctataattgttattaaggacatcttcaggcgctaccctaatacgtatgagtcgatcatcgcaacactctgtgaaagcctagacaccttagatgaaccagaggctaaggcatcaatgatttggattattggagaatatgctgaaaggattgactatgctgacgaacttcttgagagcttcttggaaacattcccagaagaaccagcattagttcaattgcagttactaacggcaactgttaagttgttccttaacaagccaactgaggggcctcaacagatgatacaggctgttctcaataatgcaacagttgaaacagacaatcctgatttgcgcgaccgagcttatatatactggcgacttctttctactgatcctgaggcagctaaagatgtagttttggcagagaaacctgtgatcagcgatgattccaaccagcttgattcttctctcctagatgatctgctagccaatatttctaccctttcatcagtttatcacaagcctccagaagcatttgttagccgcgttaaaacagctcctagggctgatgatgaggagtttgctgatacagctgaaacaggatattcggagtcaccatctcagggtgttgatggggcatcaccttcctctagtgctggcacttcttctaatgttccagtgaagcagccagcagcaccagctgctcctgctccaatgccagacctccttggtgatttgatgggtatggataactccattgttcctgttgatgaaccaacagcaccttcaggccctccactacctgttttgttgccatcaaccactggccaaggactgcagatcagcgcacaactagtgcggcgtgatggccaaatattctatgatatatcttttgataatggcactcaaactgtgctagatggattcatgattcagtttaacaaaaatacctttggccttgcagccggtggtgcacttcaggtctctccactgcaacctgggacctcggccaggacgctgctacctatggtggcattccagaatctctctcctggagcgccaagctcactgctgcaggttgcggtgaagaataatcagcaacctgtgtggtacttcaatgacaaaatccctatgcatgccttctttggtgaagatggcaaaatggaacgaacaagttttcttgaggcctggaaatctttacctgatgacaacgaattttcgaaagagttcccctcttctgtcgtcagcagcatagatgcgaccgttgagcaccttgcagcatcaaatgtgttctttatcgccaagaggaaaaactcaaacaaggatgttctgtacatgtctgcaaagattccgcgtggaatccccttcctgatagagcttactgctgcagtcggtgttcctggcgtgaagtgtgcggtcaaaactccaaacaaggagatggtggctctcttcttcgaagccatggagtctcttcccaagtgatacaaaattgaaggatcattgttccttccaaattgatcagttcatgagctattgtaggtttggatgcggcgttgtttcacaggagctggtgtgaattgtatttgttgttctttgtattagattactgtatttaaactgctagtttcctggtttcaaagttttttcacgacgaacactcgacatggccattttgtctgcgtaatttgtatatctcggacctgaacctcttttcatgccatagcatatgaaatataagtagcttgc

SEQ ID NO: 18550 - DNA, 1560 bp, Oryza sativa
  ref <308>: DATABASE ACCESSION NUMBER: AK068939
  ref <309>: DATABASE ENTRY DATE: 2001-12-06
gacttctccaggcctctcagattctcacgaactcacagtagcacttatctctccacagggaggaaggagaagctagctagccgccatggtggccctcgctgactcagcagcggctaggaagctcctcctgcatggcgccgccaccgacgccgccgccgtcggcatgagcttcggcctcgacggcctgtggcagctcatcgccggactcttctccggcctcgtccacctcctcctcctcccgttccaggccatcgcccacggcttccaggccctgggccacgccatccaggcgctcttcgctgggctcgggaccgtggcgcacctgctcgtccaggcggccgtcgccggcattggccatggattcgacggcatgtggcatgccatacagggcttcttcgccagcatcgtcgccgcgctcgccggcgcggcccatgggctcgtcctgccgttcgaggcgttctggcggtggctgcagacggcggcgggcggcaccggctctggtttccaaggattgtggcagaacgtgttggccttcttcgccacgctcgccggcgccgctcacgacctcgtccacccgttcgaggcgttctggaagtggctcaggaccgcggccgccgacgccgccgccgacatcagcttcaggctcgacggcctgtggcccctcgtcaagcgcctctacgccagcctcctcgccacgctcgcgagcgccgcccacgggctcgtcccgctcctcgagtcgctctggcgggggctccgcgccgcggccgccgcggcgctcccctacgtgctagtgatcgccgccgtcctatgcgtcgtcgcgcttgtctggctcgcctggccgttcctgttccccgccgcggcggtgatcgggctggcgctcgtcggcgtcgcgggctgctgcgcgttcttactgctcgccgccgccgtcctgatcgggcgggcgctcgtctacgccgtctgcttcggcgttgtcctcttattcgtcgccgccaaggtggtcggcaaggtgctcgaccgggtcctccccgcctgcgcgcggtgctgctacgacgaccgcgtcaccaccaccgccaccaccatgagcgctccggacgccgccggcatggacatctcgcgagcagcgtacgagtcactcccggagctctacgcccagatactgcgctccgccggccccgtcgtggccgcagccgtcttctgctcgcatcccgtcgcgtgggcgtgcgcggcgccggtcgccgccctcttcctcttccgcgccctggataaacgcctccctccaagcgaaccctgcgtcctccctgcggctgcataccctgacactgtcactgacgtgtcggactcacgttccattggccagcatgtcagcgaagatgatgacatgtccgactcatgttccatagtagacccataccacggcgagcacgtcattctgactatacgccagaggattcacctgcgtatacatgtcgtaaataatgtctgtcccgtgtgtgcgctagcttaacgatggttaatgtaaaccggtgctatcgatcaggtgatcaatgttggtttgttggc

SEQ ID NO: 18551 - DNA, 3657 bp, Oryza sativa
  ref <308>: DATABASE ACCESSION NUMBER: AK068940
  ref <309>: DATABASE ENTRY DATE: 2001-12-06
gggagctcgagctgacggcggacgtgctcgcctcttctccggctctctctctcttctcctcctcctcatctcggcaaaaccaccaccgcattgccggtatatttagttaagccgcgatagaggagggagggatagcgtagagggagagggaacaggggagggtggcgagctcctgaccatctctctccgccctctccgtttcgccgctcctcgccggatccatctccaaaagaggacgtcggagaagatgatgggcggattcctctcccgggtcctcctgttggcctttggctacgcctatccagcatatgagtgctacaagactgtcgaactgaataaaccagagattgagcagctcatattttggtgtcagtattggattctagtagctctgatgacggttatggagagatttggagattttacaatatcatggctaccattttactcggaagcaaagctgatgttctttatatacttgtggtaccctaagacaaagggaactacctacatttatgggactttctttaggccatatatttcacagcatgagaatgaaattgaccgtaatttgcttgagttgagagctcgagccaccgatgtagttgtcctttattttcaaaaggctgctactgtaggacagaatacattctttgacgttttgaagtatgttgcttcgcaatcaccatctcagaggtcaagtcaacaaccttctcaggtactaacatgcttctcttcttcaaagctgttcactgaacaaactcatttgcttttaaccactggaattaccgaattcaccatttctgtgcagtcgctaatgctcaagttttccggtgctcttctaaagcaattctatccatgttgtcttgctagtttgttagctatatgttttttttttatgcaagacgcctttactattactgcagtactgccatcacatgtagacttggtgtctgcagctactttctctataaactatagaaacaggaataatttataagtccattttacacaaccaccaaggtcataggcctttgtactgagcatcggcatgaggtgtgagcatataagctttctagaaaagccaccactaatttgctgagtctgcaagctatatgttggtttatagtaccatgttaaagtttctttatgactgattttagatatgcacatcctagatttttttttatttttatttttgcaattactaagggcccgtttggtagagctccaactcctaaatttaactctaggagttgggtctggaatagagttgtggagcagtctaaacccggctccacctctctagttcattttgtgagagcgttgcacccagctctactcccattttaggtggagttgaaactgtttggctgagcttcagctccaggagaggtggagctggagctatgccaaacatgctcttacacacatcctagttaatggtatggtgacgtaaaaacttcttcctgatttcatcgagctatatatgttctaaaaaatatgtgtgcatatctgggattacaatatacaccttcttgggaacatccatatctaatccttggtaatgcaacaatgtctctttctactgctacataaacacatgtccaatttgaccgggagtattaatatgacaatccatttggcattgtgttggctttggaaatgagtcaattactacttcctccttttcttttcatactctgtacattgtaattagttgaaagtgtgattgtttagtaactgaatttaacgccacctgaaaagacaaaatcttattggaatgaaatatgtgtttaagcatcaaagttttacagcctaacaggtcagcaactgcaaactggcgactagattttcgcaaggtttctaaagggttcggtagcattatctttcaacactagttgggctgtacaatgctcatgagccaagtgagcaaaaggcttagggcatgatagctttttccttttttttctctttttggaggggatgaggggttgtggatgatgggtagcatttggcgtatgaatgtactgaataactgttatgcacctaacatatttacaccttatcatgtgctgagcacttattgacccataacataaacctatcaagtctcaggcttgtcaacaagtttaagtattgctcccggtaacttgagctgttgagccttccaactacacaacctagagttgagctaccaaccatatctcatctgtaggataatcacaaataacactatcccttgacagttgcaacaacaattggttctaaaaaataaactacactattcattatcactttgacttattgctgttatatttccaattttataactagatagagtaggaaagtatatagtgcaaactgtccagtcttaagctgtcgtcatcttatccaaaatttaacgttcctcccgggcaacaaggagtacagttaaatttctctaactatcatctggtgcagttgcctatatttgcattataaatcagaacagtggtgacatcgatctttcttcatttaggagtaattattcagttttggatacaatgataggcttaaaaattcatgtgaccaaaaaaacctccactgtatgggttttcatcgtgtacattgaaagtgaatgactagaaaggagattcgatataatatattgcttggtgaattgttgtcgatacttcattaggatgtatgtacctgaaaagcttctcagttgtcaatttaagagaagccatgcaaatcaatactccctttcatctcatgtcatagaattaaccatttgaagtagaataactaattatccacgtgttccctgctcttgcttctttttctttctctttttagttccagctactcatgtatttaaaaatctgaaatcttgctccgattccctgcaggagccgcaacaaccaaaacaacagcaggcaccagtacagcagcagccgacacaaaaacaagcaccaactgttttgcgcagatcagcatctattgctgctcggcaagctgcaatggcacagcagtctcaggatgccaagacggttccatcttcccccaagatcaagcgtcaacaccaaaatctgatgccgacgcaccaaagaaaaatgaggcggcgccagcttccttgcaagtggcaactccagcaacaaaggccgatgtaccagcatctgaacctagtgctccactccctgaagccgaagaagctgacaagatggccattgacgaggctgatgatgccgtagagggcacagaagagggtgatcctgttccaggtgagacagtagaggagagaccaatggaggagacgatccgtgtgactcgctccaagctaaggaggcgtactgcttctgaggatcctgcaggaaattaacagcaatccattctttttgttgcatgttgtgctgttcattttctttttaagttttagattgtcatgttgtttggtgcatgtgggaaatgtgttggtctaattgatcgttctgttgcccaagagtttgtcatctcgttttctgtgttgctagcatgtttgtgtgcttggaagttgtaaatagcaccgtgcatgtatgtatatatcaattggtggcatggcgaggaatgcctgtatcttgaaacattagacatttcaatcaggtcattacatgagcactctctctgttgtctgtt

SEQ ID NO: 18552 - DNA, 1235 bp, Oryza sativa
  ref <308>: DATABASE ACCESSION NUMBER: AK068941
  ref <309>: DATABASE ENTRY DATE: 2001-12-06
gcttccttctcttcctcctcctcctccacccccaaatcgcctcgacgagcggcgcggcggcgagggcaggagagaggcggcggcggcggcggcggcgggggcgagatgagcgactcgttctgcccggactgcaagaagcacacggaggtggcgttcgaccactcggcgggggacacagtgtgcacggagtgcggcctcgtcctggaggcgcactccgtcgacgagacctccgagtggcggacgttcgccaacgagtccagcgacaacgaccccgtccgtgtcggcggcccgaccaacccgctcctcaccgacggcggcctctccaccgtcatcgccaagcccaacggcgcccagggggagttcctctcctcctccctcggcaggtggcagaaccgcggctccaaccccgaccgctccctcatcctcgccttccgcaccatcgccaacatggccgacagttaggtcttgtggctacaatcaaggaccgagccaatgaaatatataagaaggtggaagatctcaagtctatcaggggaagaaatcaagatgccatattagctgcctgtttgtatattgcttgtagacaagaggatcggcctagaactgtaaaagaaatatgttcggtcgctaatggagcaacaaagaaagagataggccgagcaaaggaatttatcgtgaagcaactggaagttgaaatgggtcaatctatggagatgggaaccatccatgctggagatttcctgaggcgtttctgttcaactcttgggatgaactatcaagctgttaaagcagcccaggaagcagttcagcgttcagaggaacttgatataaggaggagtcctatttccattgcggctgctgtcatttacatgataacccaactctcagatgataagaagcctctgaaagacatatccttggctactggtgtggcagaagataccatcagaaattcatacaaggatctgtatccctatgcttcaaggctcatcccaaacacctatgccaaggaggaagacctgaagaatctgtgcacaccataggaaatttttttcttttcttttttgtcacataacatggaaattagatttgccagagaggagtaatgttgtccttggatgtgagttttactggcccatgtatcactgcacctaattttatgtgcatggacctgttagaacaaagttatctcgaatcgaagctaagttatatgcaaagcttatttaggaatggct

SEQ ID NO: 18553 - DNA, 1976 bp, Oryza sativa
  ref <308>: DATABASE ACCESSION NUMBER: AK068942
  ref <309>: DATABASE ENTRY DATE: 2001-12-06
gggagaagaggaatctgttgctttgctttgcttcggttagcttctttcacagctaaacaacgccttctttttcctcttttgatgatgatactgttgttttacgtgttcagatgatggagaaggatcagaggaagggcgccatgccggtgaagaagggatcatcggccaacgcggtcaccaaaggcatcacgaacagaatccaagcgaggagagagcggaagctcgcactgcagcaagatgtggacaagctgaagaagaagctgaggcacgaggagaacgtccaccgagccctcgagagggcgttcacgaggccgctcggcgctctgcctcgcctgccgccgtatctgccatctcaaacactggcgcttctcgcggaggtggcggtgccggaagaagaggtcgtcaggctcgaggagcaggtggtcaatttccggcaaggactctaccaggaggccataatcttctcctcggccaagaacacgagcctccccggcggcgagggatgcgtgccggcgcagctcatgccgtcgagcccggtgccgaactcagaggtctctccggcaaattgtcattctcctcctactcgaccttcaatgaacggggtcgccggtgcaaagcaaacgccgagaaagccttctccttcggcggcggtggcgcaagacgaccgctccggcgccgggaaagagaaccagtcgtgcagtaacacaccggctagaaattgtcgccattcgccgctgctgcagaaggcatcaaaatccagactgccgacagcagcagcgcctgagaaacgcagggctactgctcagacgattagcacagtgccggaccgtaaaaggctcgcagacactgtcagcaataattcagaaaaagcttcccaagatgactcgagcgtgccgaacagattgtcggaggaactgttgagatgcctgctcgccatcttctcgcagatgggcggttcatcagcaagcggccaagacgaggagcaggcggcattgtctccttcggtttcaggttcttgcgagagctcagaggacgcataccctcaagatccttatggcatactggaattcggcacaagagacgttgggtcatacaagcgattccatgtaatcgacgccacctcgttcgatcagacggccatggagaacgacaccatgcttacccggaaactcaaggctttgatccggaggctttcatcggttgacctgacggggctctcccatcagcagaagctggcattctggatcaacatctacaattcgtgcatgatgaatgcatttctcgagcaagggatacctaccacccctcatatgctcgtggcaatgatgccgaaggcgacaataaatgtgggtgggcgcacgcacagcgccatgtcgatcgagcatttcatcctgcggctgccctacagcgtgaagcatgtgaatcctggtggagtgaccaagggcgccgccgacgacgtgacgatgcgaggcgtgttcgggctggagtggcctgagcccctggtcaccttcgcgctctcctgcggcagctggtcctcccctgctgtgagggtgtacacggcgcggggagtggaggaggagctggaggcggcgaagagggactacctgcagtcggcggtggtggtgtcggcgccggcgaaggtggcgatcccgaagctgctgcactggtacctcctcgacttcgccaaggacgtggactccctcatggactgggtgtgcctccagctaccgagcgagctgcggcagaaggcgatgaggatcgtggaggacggcagaaggggtgtcgccgccgagtcgcgccgcatgcaggtcctgccgtacgaattcagattcaggtacctgctggcctcatgaagagaggccagtgagtagcagcaatcagcgagtgaattcgagggtgttttactgcaccttgtacacaggcttccaataattgtgagttttgttcttcggtgatgtgaatgaatgaaaggaagt

SEQ ID NO: 18554 - DNA, 2411 bp, Oryza sativa
  ref <308>: DATABASE ACCESSION NUMBER: AK068943
  ref <309>: DATABASE ENTRY DATE: 2001-12-06
gagtgtctaggccagtccagtccagtccagtccaggacggtccagtccggtcccgtagagcgccggcgcgtgtagcttcctcctccgctccaggctccagcgagggagggagggagaccaccgtctccgccggctttgagagagaaagagaaagagagagagagagagcggcgagatgcggaagcgggatctgggcatcctcctcctcgccgccttcgccgtcttcttctcgctccagcacgacggcgacctctccttccgcgaggcctggtaccacctctccgatgccgactaccccatcaagcacgacgccgaccgcctcccctctcccctagtcgccgacctcaacggcgacggcaaacccgaggtcctcatccccacccacgacgccaagatccaggtcctccagccccaccccaggccctcccccgacgatgcctccttccacgacgcccgcctcatggctgatgtctccctcctcccctccaacgttcgcctctcctccgggaggcgccccgtcgccatggccgttggcaccgtcgaccgccactacgcccacgccccctccccctccaagcagctcctcgtcgtcgtcacctccggatggtccgtcatgtgcttcgaccacaacctcaaaaagctctgggaggctaatctccaggacgatttcccccacgccgcccaccatcgcgaggttgccatttccattaccaactacactctcaagcatggggatgcaggtttggtcatcgtcggaggaaggatggaaatgcaacatcattcagcagagcttttcgatgaatttatggtgtcagaacacaacagggaagagcaccgtagaagcgccagtgagaagcaggcttctgagacaggcaacacagacctgcgtcattttgccctttatgcttttgctggccgcactggtgaattaagatggagccgaaagaatgagaatatcccatcgcaaccatccgatgcttcagtgctgataccacaacacaattacaagcttgatgcccatgcccttaatagtcgtcatcctggtcagttcgaatgtcgggaatttagagaatcagttcttggggtcatgcctcatcattgggataggagagaggatacttttctgcaacttgcccattttaggaggcataaaaggaaagcactgaagaaaacacctggaaaagctgttgtaaataacgtgcacaagcccagtgaacataatccacctggaaaggatgtttccaataggttagcaaatgtgattgggaaagctgcagatatggctaattcaaataaaatcaagaagtcacaaaggacgctttatgttccgacaatcaccaactatactcaagtttggtgggttcctaatgttgttgttgcccacgaaaaagaagggatagaggctgttcatctagcttctggacgtacaatctgcaagcttcatttaacagaaggaggccttcatgcagatattaatggagatggggttctagaccatgttcaggttgttggtgcaaatggcatcgagcaaacagttgttagtggttcaatggaagtgctgaaaccttgttgggcagtagctacatctggtgtgccagtgcgggagcaactttttaatgtttctatctgccattacaacaatttcaatttgtttcatcatggtgacttttcaagaagttttgggaggacatttgatacaactggcttagaggtggcgactcctattctgctccagagagatgatggtcataaacacaggagaggaagccacggggatatcatctttcttacgagtcgtggggaggtgacctcgtactctccaggtctacttggtcatgatgcaatatggagatggcaactgtcaacaggtgcaacatggtccaaccttccgtctccatcagggatgatggaaaacattgtagttccaactttgaaggctttctctctgcgagcctatgacccaaaacaggtaatcatcgcgggtggtgatctggaggctgtggtgatttctccttctggtggtttattggcatccattgaactccctgcacctccaacccatgcgctggtacttgaagatttcaatggtgatggtttaactgatattattctggtaacatcggggggagtctatgggtttgtgcagacaagacatcctggggctcttttcttcagcacgcttgtgggttgcttgatagttgttatcggagtgatatttgtttcactgcacctcaactcctcgaacagcggtaaacctagggcttcaaccgactataggtgacgacattatgtcagtcgacagaattccttgtcaatattgaggtgttgttatagcatttgatttagatttttcatataatcaactgccaactgggttatgtaaacttgtgcggcgaatgcatttttggcgt

SEQ ID NO: 18555 - DNA, 4400 bp, Oryza sativa
  ref <308>: DATABASE ACCESSION NUMBER: AK068944
  ref <309>: DATABASE ENTRY DATE: 2001-12-06
gattaatttagctctgcctccagaaatttcatctcctcttcctctctcagctcaactgcctcctcctctctctctctcctcctcgcttgcctccgtctcactcctcctcccctcgcctcgcctcgctctcgcttgcttgcggcggaatccggcgcggcggcggacgtagcctctcccctcctttgcttgcttgcgcgcgcgcggacgccggcgaacgcggcgcggaggtgcggtgtgtgtggggttttctctgcttctctcgttctgggacccgccctagcttttgtctctccccagtgcggcgttgtcaccgggggagctcgctggattgaagctaagctggaggcgacgcggatggtttgaatctaattggagattgcaggttatggtttttggtccacttgttaggttacccaagacaggttatgattctggtcttatttctcagaaaggagcatagaagcatttagacagatcaaaaggccgtaaaagatgccaccctcaccctcaacaaggagatctccttcaagggaaactttcctcaggagggtcaacagttttgggaatgctctgcctgctaaaccaaaggatgaggatctcactttgtttgctgatatgcagaaaattgagaacgataatttcttactggaaccctctgaggattttgatgagtcaatctcaaaattgagttatttccctgatgtcaagcttggtgtcaacatccctacacggagagaaagccatgatttgcttgacgttgatggtgacaaaaatgattatgagtggttgttgactcctccagagaccccacttttccgttcattggatgatgaagaagaacagtctgctggtcaggattctaggggcagaactaagagtaagcccatacgaatttcggggtcatccacagtggacaatactcaaaggtctagtagaagcagtgcaagccctattaggcttagtccatcaccacgctccatgtcaaggacaagaccctctagtgcagcttctcgctctagtccaccatttgcattgcaaccaccaacaccatcatggagaccttcaactcctccatctgcaaaaacattaacacctccacggagatctccaagtcctgcctcaacattaacacctccacggaggtctcctagtcctgcctcaaggaggatgagtactggttcaaccccagcgttaaataggacaaggggtccttctccagttaaaactaaccgcatatcttcttcaccaaaacttcaaggatggcattcaaatgttcctggattttctcatgatgcacctgcaaatcttcgaacttctctgccagatcatccattatcccattcaaggggtggatccccttctcctcctatcagtggaagggacatgggttccagaggcagacgccaatcactatcgcctactccatctagaagagcaagttcatctcatagtattgaacgagatcgtttaagctcgtatagcaaagcttctgcaacatcttctggtgaagatgatctggattccatgcagtctctaccagttgcctattccaccagcccagctgtaaaaaagagcttgtctatgatgaagaccagaactattgcttcatcaaagaagccgtccacaactttttccactagttctgtcccaaagcggtcatttgattctgcagtttggttgatggatcatcgcaaagctcccaataatatgttccggccactgctatcaagtgtccctactacgacatttaatgctggcaaaggaaatgttgtgcagcggcctatgttttctcataattcttatatgacaactagcagcaatgcaagctctgagcatagtgccagtttcggcccatatgtggataacgaccaagagcagcatgatcagattagtgaatgggatgataaccatcaagttcatggtgatatatttatgtttgataaattggatgaattgaatgaagaaaccagtcatgaggagactacaaaatttgtggaaagtgatagacaggacattgacatggaaaagggttgggcagctagtcagacttctggtacaaacagttctcatgttggatatggtgaaatggctacttgcaccaggtgcgggaacgttttcaaggttatggatgtggatagacaaggtgactattgtgaagaatgtggtttattgcttagcatatgttctgcaggccctgtgacacaaactttacaagaagcacaccaacaggacgaaataactgcaaattgtaaatcatatgctgaatctggaacttctatagcctcggattgtgtagagtatagggaagaagcatctcttggtcatcaatttaatgatgaacctccagctgattgtataaaagcatgttccccacttcagtcaatggtggacacaaatgaggaaatgctgctggctcatgaggtaatgaatcataccaaaaatataaagccatatcatgttgatgactctctaagaaataacaatgatatttcatttcatccatttaaggtaagtgataaccaacaagcatctgcagaacacgagcatttcagggaccaaattaacagccacagtgaaagcttgccacaatgccttcctgagctaaaccgccagcataatgattccatctctcaactgcctctggtgataattatcaactgggatcaacagcatattcaagtcctaaggtagaaaacactgatgccactgggatatcggtactcttactccagaagtcaagtagcaataaatggcctgttgtggaaggaaggactctgtctgcaacaaatattctttgttcagaaccctattatacaagggatagtatcagtgctatgaggcgtagctttggacgggatagctcttcagcaacttcttccattgatctagggtcatcaaggcaatcagatgtacgttttgagcgtctcaggagtggcaagaggggtgatttcgagaaggctcgaatgagcagtaccatgagccatcaaagtgttgcttcagtgtcagatatgtcaattagtggttcatcagcttcactttgccctcagagtgatgttattggtgacacttgtttcccaattgacacgctggaaaggagtgcatcgagaacaacagtctctattgaagaacatgacagctcttgtatggatgctttatcaagtggtatggagtgttcatctgctgtgcagccgataatcaatgatgaaatccttgttgacttgaacacctcaggttttcataggttaagtgaaacagaagatatacttattaagaaccataatatggaaatggtggctgacaatgatcatttgagcactaacttgtgtttatcagatattgaaatgccaagtgatgccctagaatcttcagctgctgaggaaagttatataccaaaaactgaggaagatacttccaccaaagcacactgctatacaatcagcaccctagagcatccaagcgatgagaacaactttgatgatcttcaaatgcagtctgaagcagttcagtcttcaaatgaggaaaataaatccaatggctgttgcacgcttgctgtctctgaggatgacgtgttggtttctggaacagatactaacataaaggaacttcctaatgatgcagaatcacccgaggcagttgaaggatcgaggaaagaaattcagagatgcttcactttggaagaagctaccgatacaattctcctctgcagttctattgttcatgaccttgcatacaaggcagcgacaattgcactggaccatgagcaggaacgagtacacgcagagcctactcgcccatctgttaccatcgttggaaagtctattccaaaggaggatggtttacttaagctgactcacagacgaacgcctaaccgtaaggttaaaaggaaaagattggaaggtgaaacaaccataaccgaaaatgctgaaaagaaagatgatatctctacagaccactcacccgtgcgttcctcttctggaattacaaggacatctgagagcatgaagcctccaaaactggaatccaagtgcaactgtataattatgtaagttactcaagcatctggtacggcaaaggtgacttgaaatagaggttggaattgatgtattatggtagttccattccacgcgcaatcaagtcgtccacagttggtgagtgacacagggccttaagttagattttttttttttttttgtgatggtgcattccgttttttaggtaacagaagtgcaccccagagctattcttttgtaaattcttttttcccctatgttcctgttttgtcagatcttctgcttgttatgtggtctatcagggttgtccaaagtgtgaatttactagattaaatatctgtatttatagcctgttttgttgcaatgcatgaggcttgttaaattcttacg

SEQ ID NO: 18556 - DNA, 1720 bp, Oryza sativa
  ref <308>: DATABASE ACCESSION NUMBER: AK068945
  ref <309>: DATABASE ENTRY DATE: 2001-12-06
gagtacgcctctacctggacccgcacagtagtctgttgtcgtcctcgatcggatcagctaccggctttccgttgatatctccgcgcttgatggccgccgccgccgcggtcgcctccctcctcggcttcgtcctcgctctccctttctgcttggcggcgccgtccatcacaacgcatggcagcgacggcggcggcggcagctacgtgtcggcggtcggggaccccggcatgcggcgcgacggcctccacgtcgcctgggaggcatggaacttctgtaacgaggtcggccaggaggcccccggcatgggcagcccccgcggcgccgactgcttcgacctcgagaatggcgtggacgagaacggccagccgacgtacaaggtggtgcaccgggtgaccgacgccgacaacaacctccgcgccggcgaccctctcccgggctcgccggcgaacatcacggacgtcgacctgtacgcggcggcgaaggagctctacctgggcgaccggtgccaggtgcccgacagcccgtcgccgtggcagttctggatggtcatgctcaagaacggcaacctggacaccaccgccgccatctgcccggagaacggccgcccggcgcgcccgttctcgcagacctcgaggttcccctgccccggcggcgccggctgcatgaaccagccgctcgtgttccacaaccgcaccgcgctggacgccacggcccggcgcctccgcggcgggctgttcggcacgtacgacctcgacgcggcggacctcggcagcagagaagtgtcgtactactcggtgacgtgggagaaggacatcgggagcggcggcgacggtgggtgggtgttccaccacaagctgcgcactgcgcccaagtacccgtggctgatgctttacctccgctccgacgccaccaagggattctccggtggataccactacgacaccagaggcatgaccaagatggtgccggaatcaccaaacttcaaggtgagggtgacgctggaggtgaagcaaggcggaggccccaacagccagttctacctcatggacatgggcagctgctggaagaacgacggccggccgtgcgacggcgacaccgcgacggacgtgacgcggtacagcgagatgatcatcaacccggagacgccgtcgtggtgcacgcggaggcgcatcgaggagtgcccgccgtggcacacgttccggaacggcacccgcgtgcaccgcaccgacgcggcccgcttcccctacgcggcgtaccacgtctactgctctcccgggaacgcgcgcgccgccgaggagccgaccacctactgcgacgcgtacagcaacccgcagccgcaggagatcctgcagctcgtgccgcacccggtgtggggtgagttcggctaccccacggcgaaaggccaggggtggatcggtgaccccaggacatgggagctcgacgtcggagcattgtcgcaggcgctctacttctaccaggatccgggcacgccaccggcgaagaggaggtggtcgtcgctggacgtcggaacggagatatacgtcagcaagtatgcggaggcagagtggacgctgagtggattcgacattgttgtgccggaggaatgcattgggtcgtcccaaggaggacccgtcagtcgatgtttgtaaagttggtgatcaacgagttaattaagaaacacttatagattcattattggaataatatcgtgttcccttcc

SEQ ID NO: 18557 - DNA, 1331 bp, Oryza sativa
  ref <308>: DATABASE ACCESSION NUMBER: AK068946
  ref <309>: DATABASE ENTRY DATE: 2001-12-06
tgtcctcctccccccctcctccctcctccggttgcctctccggcctcgccaccgccatcgccttcgcctccccgcctcccaaccgccccacgttgcggggagacagctcgccgcgggcggcgatcatggcggcggcggaggtgtactcgccgacggcggcggcggcggcgcagcagcagcagcgggggaaggtggcggcgcaggcgtggcaggcggtggtggggtggatcgggttcctcctccaggtcctgctccagatcctccggggcaccccatcctgcgcccagctcctctccttcgtcgggttccgctacccgctcctctccgggccggccgactccgagcagtcgccgtcggtggccttcatgccgctccgctccgagatcccggccgacacggcccctgcgccgacgcccccgccggaatccctgcagcgcctcacggttgtgcttgatttggatgaaactttagtttctgcatatgaatcatccagtcttccagctattgtacgcacccaagctgttgaagctggattacattgctttgacatggagtgcatatccactgagaaggatgttgaagggagaaacaaagtgaatcatgtcaccgtttttgaacgtcctggtttgcacgagttcttgcagaaaactagtgaatttgcagatcttattctctttacagcaggtttggaaggttatgcaagacctttagttgacagaatagatgtccataatagattcaaactccgtctatatcgtccatcaactgttactacggaatacagagaacatgtcaaagatctttcttgcgtgtcaaaagatttctgcagagttgtcattgttgacaacaacccattcagtttcatattgcaacctttgaatggaataccctgtgttccattttcagctggacaacataatgataatcagctcatggaagttatatttccacttctgaagcatctctctatccagagagatgttagaccagcactatacgaaagatttcatatgcctgaatggttccaaaaacatggcatcccccaaactgatcaggcagtgtaaattttgcagccgctacatgaaattgttttgatgaaggctgaaacgcctgccacgccataagtccgttctcaggggatagcacctgtacattattatttatatattcgtttaggtttcctggatcctgataaaaatcaagtcaaggttcgtacagaattgccatgtctgaagacaaaaggaattgtaatctagcagaatgttagattggtatttgtgtagtggggcatttaaacaccagttgtatatcaccttctgttgtaaaatttc

SEQ ID NO: 18558 - DNA, 2644 bp, Oryza sativa
  ref <308>: DATABASE ACCESSION NUMBER: AK068947
  ref <309>: DATABASE ENTRY DATE: 2001-12-06
gggaagaagagggagaggaggagaagcaaaagaatccttttttttttttttgtctcttcctctccttctccgactccgacgatctttttgccggcgaggtgcggggagcatgtacctgtcggccttctcctcctcggcgtcttcgcacggcggcggggacagcgaggccagggacagctccacggtggtcgccgtcgaccgggacaagaacagccagcaggcggtcaagtgggcggtggaccggctcctcgccaggggcagcgttctccagctcgtccatgtcaagccacagcaaaatgctgaagcaggagcggatgcagagatgcaacagatgttcatctcatacagaggctattgtgctcgtaaagggatgcaattgaaggaagtgatcttggatggcagtgacatctccaaagcaatagtcgagtatgccactagcaacgccatcaccgacatcgtcgtcggggcgtcgacgaggaacacattcatcagaaagttcagaaatcctgatgtgccaacatgcttgatgaagatggtgcctgattactgcacagtgcatgtcatccacaaagggaaggcaatccaagtcaaggcagccaaagccccagcaccctttaccactctccctcccaaacagtactcacagtcaagcatagaatctgatggatatccgagatcaagaggagactggaagaagatttccaatcaatcatctccaaaggcaaacagaccatcggtggaccgactatctggctttgcaaaagctccaaccagggaaaggcctctctctggagctagatcagcacccccaaaggatttcgacgactatatcgacttcatagctcctccaaggccctcggtaacccgtagctccttttcagatgatgttgattttcctttgagcttggagttgccatcgatggacttcggcgattctttggagctttcgctttccgcatcaatgtccatcgaaagcctaagctcagctgggaaggatgtcgaaacggaaatgagacggctgagactagagctgaagcagacaatggaaatgtacaactccgcatgcaaggaagcaattgatgctaaacagaaggctgctcagatgcaccagatgaagatggaagagtccaagaagtaccaagaactcaggaatgctgaagaggaagcccttgctctggtccaaatggagaaggcaaagtgcagagccgcactggaagcagcagaggctgcacagagaattgcagagctggaggctcagaagagactgagagcagagtggaaggcgaagcgcgaagccgaggagaggaagagagcaacagaagcaatgaacaacactgatttaaggtacaggaggtattccattgatgacattgaagctgccacccataagtttgacaaggcactcaagataggggaaggtggatatgggccggtgtataaagctgtcatggatcatactaatgtcgccattaaaatcttaaggccagatgcatcacaagggaggaaacagtttcagcaagagatagaagtgcttagctgcatgaggcatccaaacatggtgctgctgctgggagcatgcccggagtacgggtgcctggtgtacgagtacatggactacggcagcctggaggaccggctgtgccggcgggggaagacgctgccgatcccctggaacatccggttccgcatcgccgccgacatcgccaccggcctcctcttcctccaccaggcgaagcccgagccgctggtccaccgcgacctgaagccggccaacatcctcctcgaccacaacttcgtcagcaagatcagcgacgtcggcctcgcccgcctcgtcccgcagtccgctgccgccgccgaggccacgcagtaccggatgacctcgacggcgggcaccttctgctacatcgacccggagtaccagcagaccgggatgctgaccaccatgtccgacatctactcgctggggatcctgctgctgcagatcatcacggcgaggtcgcccatggggctcacccaccacgtcgagagcgccatcgagagggggaccttccaggaggtgctcgacccgatggtgaccgactggccggtggaggaggccttggtgttcgccaagctggcgctgcggtgcgccgagctgaggaagaaggaccggccggacctcgggaaggagatcttgccggagctcaaccggctgcgctgcctcagccaggagtacgacgcctccaaggtcagcagcaccagcaccacctgctccagctccgctccctacagcttcggcggcgacgacgtctccacgccatgatcagagtctctgctgcctccatcctccatggctgctgcacctgcagctgcaatgtatagatgattaaaaggcactgctgctgctgccttcgctctgtgtggactgcagctgagctgatgatgttacttaatggcgcaacatagtttgggtgattaatcattagcatgtagatgattaagaggagaaaattaaaccatgtaaaggaaagattaaggcaatgcatttctgtatgtaatgtgacatgcccaagatgccaagtgggtgatgagcagcctttggttctcagatcatgttttgcgcatctttgtcatcgccagagaaaacttttggtttgcttctatg

SEQ ID NO: 18559 - DNA, 831 bp, Oryza sativa
  ref <308>: DATABASE ACCESSION NUMBER: AK068948
  ref <309>: DATABASE ENTRY DATE: 2001-12-06
gatgctgaactgaaccccagccagcgaaccaaggcggcggcggcggcggcggcgacatgcagttcctccgaggaggcggcggcggtagcggtggcggcggagctggagggatggcgtgggaggtgctgaagaggcacttctcgcggaagcgggcggtggacgtgcggcggatcaaccccaaggtgcccaaggaggaggccgtcgccatctccggtcgcctcctccagatcttcaccgaccatggccccctcaccgtcggcaacacatggaaccacgccaaggatgctggtatcagtggcctgaatagtaagactcacatgaagatcctgctgaaatggatgacggggagaaggatcgtgaagctgaactgcgttggcacgggcaactcaaagaagttcctgtattccccgtattctgcagatgcagataaatccgaagaagcagcagcagaagagctgagtaaggctgctgcttcacaagggggaaaagctacaaaagggcaacagaagaaacgtgccacagccctacactgattgtcgctcatcacaatcttattgttacgcttctgggattatttttgtttttaatcttagtggttaggcagggcgaaattctgttaagatgattccatccaaaactgtgatgaacctttctcattgatgatgcagttatgctggcaggccagcattttgttgtagtagcactgtctgtatgttcgctaaggagcagcaataatttgatgatgcttctatagtttgagctacggctaataagccctagaagatatgaagcaactaagttatatttatgtgtaaaacttttatacatgtg

SEQ ID NO: 18560 - DNA, 1436 bp, Oryza sativa
  ref <308>: DATABASE ACCESSION NUMBER: AK068949
  ref <309>: DATABASE ENTRY DATE: 2001-12-06
gactcctccctgcatcccccacccgaaccgaattcccgcaagagcacgaggcatcgcggcggcggcggcggcggcggcggcatctccgtcgatctccggcgaacacttgtgcgcagtcgataggggttcatcctgtcctgtccggggtgaggcggggcgccggtgaaccacgaggccgacgacggtcctccatctacacctctgccgtcgccggcgagcttcgcgatgggatacaaccggagacgcggccgtggatcctcctcctcctcgtcgtcgcgccgcaccaagcaggaagccgcgtgggatgatggtcccgggacatcacttccaaggcaggaagacactgaagaagaaccaaaaggtccaaaaattcagcttgctatgtgggactttggccaatgtgatgttaaaagatgcactggtcgtaagctttcaagatttgggctattaaaggagttgcgagtgaccaatggttttggtggtgttgttctcagccctgttggaacacagtgtgtttccaaggaagatcgtcatatcgtgcaaagaaaaggacttgctgttgttgattgttcgtgggcgcgattaagtgatgtcccttttgtgaaactccgttgtggcgctcctcgtctcttgccatggttggttgcggcaaaccctgtcaattatggtcgtccatgtgaattgtcttgtgtggaagctttatcagcagccctcataatatgtggggaggaagagacagcgcatctgttgcttgggaaattcaagtggggtcactcgttcttgtcagttaacagagagctgctcaaagcatactcgcagtgtgaaaatggcaccgagataatcaatgtgcagaattcttggttgtcaagtaactctaatgttccaaagtcacctgtaaacgcggcagagaaatcacaccaaagcacagaggaaggatctgacgctgactccgacgatggcttgccacctctagaggaaaacctgaaccacctgaactttaaccaagatgacgaaagtgaggaggaaagtgaaagtgatgagtaacaaatggcgtcagaagggaacatttggagctgtccagcacttttaaatgtgtacttgagtaagttaatttttggctaagtgctgtgattcgagccaaaataggatcttccgatgtccaatgaaaacaatcttcaatggtcttgaggacagatcatggctcagaaagaatcacagtacccttattgcgttgcgcttgctaaaatcatttgagtttctctgttccaatcttaagtacagacatgaacaaaacgaaattgcaatggacagcagctggtttagtcattgcaatggacaggttagatacctgaaatcactttgtattattccaaattgagctatgatcttacatgtatttttgattgatacataacacctgcattacttttgactcc

SEQ ID NO: 18561 - DNA, 2902 bp, Oryza sativa
  ref <308>: DATABASE ACCESSION NUMBER: AK068950
  ref <309>: DATABASE ENTRY DATE: 2001-12-06
ggtcttccgccccgccccgcccctcccctccacccacgcggagaaggagaggaggagaggagaggagagagggaggcagcagctcgcccgccgccgcccctccctccgtgcccgcgccgcccaccccgccgccgggcaccggccaccatcgtcttcatcatcttcccaataaaccccccatggcgtcctccctctccctcgacgacatcaacgacgactccgtcgacctgtcgaaggcgccggtggcggaggtgttccagaagctgaaatgcgaccggaaggggctcaccggagcggagggagagagccggctgcggctgtacgggccgaacaagctggaggagaagaaggagagcaagcttctcaagttcttgggcttcatgtggaacccgctgtcgtgggtcatggagatcgccgccatcatggccatcgtcctcgccaacggcggcggccgcccgcccgactggcaggacttcgtcgggatcgtctccctgctcatcatcaactccaccatctcctacatcgaggaggccaacgccggcgacgccgccgccgcgctcatggccggcctggctcccaagaccaagctgctcagggatggcaggtgggaggagcaggaggcggcgatcttggtccccggcgacatcatcagcatcaagctcggcgacatcatccccgccgacgcgaggctgctcgagggcgacccgctcaagatcgaccagtcggcgctcaccggcgagtcgttgccggtgaacaagcacccggggcaggaggtgttctcgggctccacggtgaagcagggcgagatcgaggccgtcgtcatcgccaccggcgtgcgcaccttcttcggcaaggcggcgcacctcgtcgacagcaccaacaacgtcggccacttccagcaggtgctcaccgccatcggcaacttctgcatcatctccatcggcgccggcatggcggtcgaggtgctcgtcatgtacccgatccagcaccgcgcctaccgcgacggcatcgacaacctcctcgtcctcctcatcggcggcatccccatcgccatgcccaccgtgctctccgtcaccatggccatcggctcccaccggctgtcgcagcagggcgccatcaccaagcgcatgacggccatcgaggagatggccggcatggacgtgctctgcagcgacaagaccggcacgctcacgctcaacaagctcaccgtcgacaagaccctcatcgaggtgtgctccaagggcgtcgacaaggacatggtcctcctctacgccgccagggcgtcgcgcgtcgagaaccaggacgccattgacacctgcatcgtgaacatgctcgacgaccccaaggaggcacgcgcggggatccaggaggtgcacttcctccccttcaaccccgtcgacaagcgcaccgccatcacctacatcgacggcaatggcgactggcacagggtgagcaagggcgcgccggagcagatcatcgagctctgcaacatggccgccgacgccgagaagaaggtccacgccctgatcgacagctacgccgaccgggggctccggtcgctcggcgtgtcgtaccagcaggtgccggagaagagcaaggacagcggcggcgacccgtggcagttcatcgggctgctgccgctgttcgacccgccgaggcacgacagcgcggagaccatccgccgcgcgctccacctcggcgtcaacgtcaagatgatcaccggcgaccagctcgccatcgccaaggagacggggcggcggctcgggatgggcaccaacatgtacccgtcgaccaccctcctcggcgacaagaacagccaggtgaacggcccccccatcgacgagctgatcgagcgcgccgacgggttcgccggcgtgttcccggagcacaagtacgagatcgtgaagcggctgcaggagatgagccacatctgcggcatgaccggcgacggcgtgaacgacgcgccggcgctgaagaaggcggacatcgggatcgccgtggacgacgccacggacgccgcccggagcgcgtcggacatcgtgctgacggagcccgggctgagcgtgatcgtcagcgcggtgctcacctcccgcgccatcttccagcggatgaagaactacaccatctacgcggtgtccatcaccatccgcatcgtcctcggcttcctcctcatcgccatcatctggaagttcgacttcgccccgttcatggtgctcatcatcgccatcctcaacgacggcaccatcatgaccatctccaaggatcgcgtcaagccgtcgccgacgcccgattgttggaagctcaacgagatcttcctcacgggggtggtgctcggcacctacatggcattggtcaccgtgctcttcttctacctcgcgcacgacacgaacttcttcacggatgtgttcggggtgacgtcgatcagggagagcgagagggagctcatggcggcgctgtacctgcaggtgagcatcatcagccaggcgctcatcttcgtgacgaggtcgaggagctggtcgttcgtcgagaggcccgggttcttgctgctcttcgccttcttcgctgcgcagatggtggcgacggcgatcgccgtgtacgcgcgctgggatttctgccggatccagggcatcgggtggcggtggggcggcgccgtgtggcagttcagcgtcgtcacctacctcccgctcgacgtcctcaagttcatcatccgctacgccctcaccggcggcaaggccggggacagcgcccagaaaaaggcaagctcgccgccgccgacctctcaaccttagatagacttggagatggattttttctttctttttttttttcctcgagaggggaggggaggatatccccctcgtcttatgtatgtatgatgtttaaaaggttattaaaaaatttg

SEQ ID NO: 18562 - DNA, 1222 bp, Oryza sativa
  ref <308>: DATABASE ACCESSION NUMBER: AK068951
  ref <309>: DATABASE ENTRY DATE: 2001-12-06
gattggaacgtattcaagcggatagggatgatccaagcctaccattggtcactgccccatttgggcatgcttcacaggaagttgtgaatttattgctatgtggagaggctgtgtcaaatgtatttgatggcaaggtggactttggtggtggcatgttcctgaatgggataccaaatgatgttgaagttggtttccttacccttctggaatcactaaacttctgcaaggttggtcaatacttaaagtgcccgaaatggccaatatgggtggtaggaagtgaaagtcactactccgtcctttttgccctaaatccaaatgttcaagaagagaatgagctggaagagcgggaatctaaaataaggagggcatttgatgcacaagatcaaagtggaggtggaggctttattagcgttgaggggttccaacaagttctgagggacactgacataaattttccttctgataagcttgaggacctctgtaatgctggcattatagtatggagtgaattctggcagggctgctacaattggataaaagggctggaggcatgaaggatcctacaggccttatgggcaagaagcaattcactatctaccatttcaatggaatcgcgaagtccgtgcttaatgggaatgctaacattggaggttcaacaatacagagacccagactgtgcaagttaaatgtcagtgtcccgccaaggtggactcaagatgagtatctagctgatgttgtaagcgcgtccaccagcgggagcaaggatgacagtgttctttcacttgctccacctgttcaaacttctcagcatgcaccgttggtggactgcattagaacccgatggccacgggcagtttgtagctgggttggagatatgcctagtattgtctgatgccatgccgcgtgctagtctgattttaaagtggctattgcagagcaggctgcttgagcttcaaggccatgagggaaggaagccgcgaaagtgacagctgctactggactcctggtgttatcactgttccagctgatgaatatatgatttttcttggttgcgtgaatgatcctttgatgtaattttatcagggacccgaacattctttttcctataatgacattagctgtatactccattttatgaatatgttttcagttcaagatacattctttttgtacacacacaccttgtggttctattttaaatctgatagagagttggtgactg

SEQ ID NO: 18563 - DNA, 4145 bp, Oryza sativa
  ref <308>: DATABASE ACCESSION NUMBER: AK068952
  ref <309>: DATABASE ENTRY DATE: 2001-12-06
gattcccatttcctctcgctcccaccaagaccaaccaaacccctgtttctccctcaaaacctccctctctttcccccccgaatgctcgagcgctgcgcggcggaatcccctactcccctccgatgaggccctcgccgcctcccgccgccccggcggcggaaccggtgcccccgtggctgagatcgctgcccgtcgcgcccgagttccgccccaccgccgccgagttcgccgatcccgtctcctacatcctcaagatcgagcccgccgcggcgccgtacggcatctgcaaggtcgtgccgccgttgcccccgccgccgaagaaggccaccttctccaacctctcccgctccttcgccgcgctccacccggacgaccgctcgccgtccttccccacccgccaccagcaggtcggcctctgcccgcgccgcacgcgcccggggctcaagcccgtgtggcggtcctcccaccgctacacgctcccgcagttcgagtccaaggccggcgccacccgcaagtcgctcctcgccggcctcaacttccctgcctccaggcaactcaccccgctcgaccacgaggtgctcttctggcgcgcatcggccgaccgccccatcgtggtcgagtatggcagcgacatgtcgggctcgggattctccccttgcgccgcgcagccgcagccgccgccgcagcagcaaccgacggcgcgggcggcggcgcaccttggggagacggcgtggaacatgcgcggcgtggctaggagccccggatcgctgctgcggttcatgccggaggatgtccccggggtcaccacgccgatgctctacgtcgggatgatgttcagttggttcgcgtggcacgtcgaggaccacgacctgcacagcctcaactacatgcacctcggggccgccaagacgtggtacggcgtgccgcgcgacgccgcgctcgcgttcgaggacgtggtgcgcgaacatggctacggcggggaggtgaaccccctagaaaccttcgctacattggggcagaaaacaacagtgatgtcccctgaagtgcttgtggagtcgggtatcccctgctgcagattggtgcagaatgcaggggaatttgtggtcacttttccaggatcttatcactgcggtttcagtcatggattcaactgtggggaagcatcaaatatagctactcctgaatggttgagaatagcaaaagaggcagcaatccgaagagcttcaatcaatcgtcctcccatggtttcgcactatcaattactttacgatctcgcactgtctatgcgttttagggaaccatccaatggtgaaatggagacacggagctctcgaataaaggagaagaagaaatgcgaaggggaacaactggtcaagaagatgttcatccaaaatgttattgaagataatgaactgcttagtcatcttctaaatgacggatcatcttgtattattcttccagcaaatgcccatgatggtcctggtctttctactttgcgctcaacagatcaatcaaatatgaattccagaatatcacataacctatgcagtagggaagaagctccagaagcctcaggatgcttatcgccgaacaggaatggtgataccagaaattgtatttcatcagatacgcataacatggaaggtgataagggagatataatgagcgctactggattgttagatcagggtctattatcatgtgtcacttgtggaattttaagtttttcatgtgtggctgtactcaaaccaagagattctacagcacgatacttgatgtctgctgattctaattcaattaataaccagctttctatttctggagggagtattctggcagatgcgccaacaaatgaaaggaatggtgtcatttctcgtccatattctgaacactgttgcaacgaaataatggccgatgatgcagaaatcgataagaattctgctcttgatctcttggcatttgctcatgggggtcaaccagatcctgaagaagatccactggagaaaatactgaagattgcacatggcattaacaaatcacaacctaatagttcaaataatgttggttgtgttggaacaaagctgtcctcaagtagcacagagcgccaagaaagaccatcttcccagaacgctcattgtaatggtagctcagttatttcaaatggaccgaaaggtgttcgcacgagaaataagtatcaacttaagatggtactttctgaaggttttcaggcaaaggatatctattctgcgaaggaaaagaaggttcaatcagaaccatcaagctcaaaaggggatgttagggagacaattgatgttagtggcacagagaacgatgtcggatgtaaaagcactacaatctctgtcagtgaacacaggggttctacaaagaatatgtattcagtgaaggaaaagaaggttcaatcgaaaccatcaagcttaaaggggactgttaaagagacagttgatgtcagtggcacagagaacgatgctagatgtaaaagcattacaatctctgtcagtgaacacaggggttctacacctatgaccaatagtttagctgcatcaatcgtgaaacctgacaaggattcatcaagaatgcatgtattttgtcttgagcatgctattgaggttgagaagcaactgcatgctataggtggttctaatattatgcttatatgtcgtccagaatatcccaaaatagaagcggaagcaagattgttgggtgaagaaatgggactggtatatgactggaagggcattcatttcaaggaggccaacatggaggacaggcagaagatacaggaagttctgcgggatgaggaagcaatacctacaagcagtgattgggctgtaaaattgggtattaacctttattatagtgcaaatctggccaaatctcctttatataacaaacaaatgccatacaacagagtcatttatagggcatttggctgtgattctcctaatgactcgccagtaatgttcaatacttgcgaaaggaaacaaagccaccagaagaaaatagtggttgctggccggtggtgtgggaaagtatggatgtcaaaacaggtccatccatacttggctcacagagttgaaagccaggaagcggaagaagcagatagaatctgttcttatcattttgatgagaagcacaaagctgagccagttgggaattctagtagagtggaagcctccaaaagaaagagtagcagtttgacagacgtaacagaatcaagcaatagaaggggggaaatacctggtgaggaaacaaacaccaagaggcccaaacattctcaagagaacaatctcagagctttggaaaccgctgctgaagttgtggtgccctcaccagctggaacaggtctccgcgttagctccaggattgccaacagggcaaacaagctaaaatcaaagatggaaaaggaggatgtcccttctagccgtccaaagtctaacataaaggagaaaagcagtcatgctagcggtcagaaatcaaatgttcaagaggcgaatgctaattctgctagccatttgagagcaatgccaccaaaacagaaggctgaagcagaagcaaagaagcaaataagaactccaaaacctccaaagcaagcagtggagtactcgtgcgatattgagggttgttctatgagttttcgtacaaagcgggacttgtctctgcacaagagtgatatctgcccagtgaaaggctgcgggaagaagttcttctcgcacaagtatctgctgcagcatcgcaaggttcacacagatgaccgtccgctaacatgcccatggaagggctgcaacatggcattcaagtggccatgggcaaggactgaacatctcagggttcatacaggcgacaggccctatgtttgccatgagccaggttgcgcacagacattcaggtttgtctcagatttcagccgtcacaagcgcaagacaggtcattctgtcaagaagaagaagaaagcaaagagttgagctcgtattacagcaagctagttatggtagaaccggacgcagtaggaggtagtttgtacattctacttcactagtttagcactgatctctctatctgacggattctgttggcaccacaatcggtgtgctttgtgttagtttatattagttttcatgattact

SEQ ID NO: 18564 - DNA, 733 bp, Oryza sativa
  ref <308>: DATABASE ACCESSION NUMBER: AK068953
  ref <309>: DATABASE ENTRY DATE: 2001-12-06
gtgcagctttgcaaggaccacactgaaaaaaaagctctcaactttctccgttcctcttcccggcggcggcgatggataccaccagcttcccggcggtgtgggcggtggtggggccgggcgtcgccggcgccgtattcggggtcggctggtggttctgggtcgacgccgtcgtctgcagcgccgccgccgtcccgttccttcactacctccccgggttatttgcttcgttcgccgcgctcatgttcaactgcgtgaagagggaagacgccaactacaattactactcgccctacgacgactccgagtggaggttgaaactctggctttttgtttcatacgtggtgtcttttgtttccttggctggggctgttggttttttggtccaagacgcacttacagatacaggtccatctgcatggactggtgttgctggcgtcctacagtctgtgtttgtgcttataagtgggttgatgtactggacttgtcattctgaagattgatttaacaagtatgccaagatagacgaggaatgtaaaggcgattcggaaataaccttgttacgggatatgtgaaattttgtgtcgcactatacagttctgctcatagtttagtaactctgtaaatataattgcataacaagcagctcaagttagtttcactgtgttactttggagtaaacagacctttatgaatataaatagcatatatggatctatatctttttgcgctaacc

SEQ ID NO: 18565 - DNA, 1158 bp, Oryza sativa
  ref <308>: DATABASE ACCESSION NUMBER: AK068954
  ref <309>: DATABASE ENTRY DATE: 2001-12-06
gattccagagctcgaggtggagatcgcggggagaggaagcgaaacaacgataggaggaagcgagacaacgagaggtggtttctcggttgcgggtgagtcgtgttgaagtgagctatggtggcgttggagacgtgtgcgtcgcgctgaaggcccccggcgtgtggcgcgtcgacccggtgttcgccgcggtgggtgaccgcgtcgtcgccctcggcggcgcgtgccagttggcgctgggcgagggcgaggacgcctcggtggtggaggtacacgaaagcggcagctggacggcctgcggtccgatgccagccgagctgcgggagtccgcggcggcgacgtggctctcggtggccgcgacggatcagcgagtgtacctcacagacagatccaccgggtgggcaagctggttcgatccggcgaagcagcagtggggacccacctgccgcctccgccctgacgccaccgtctccacatggggcctcgcccccggccgcggcggcgccgagcggctcgtcctgttcggagcgaagcgctgcggtagagccgagcaagcgaagagcagagtcgtcatccaagcgtgggaagtggacggcgacggcctcgcgctgtcccgtggcgcggcgcacgacacgatgccgggggagatgtccgagaggctgttcccccgtgacgaggacggcgatgaggaggacgaagaggagatgtcgccgtcgatcggggtgtgcggcaacgccgccggagggtacgtgtacaatgcggccgacccgacaatcggagccgtgctctacgagctacgtgacggggtgggcagcgccgtggagcgatgggaatgggtgccgtgcgcgccctcggtcgaggccgagccgttgggacgcttcatcctcgcgtgttcgccggtggggctggacgagctcgcgcgtggtcaaccagccgcatgtacaaccgcacagtgaactcatgactgccgacgcccgtccaaagcaagttaacctcaaaggttgcttttgtaaataaagtcccgcgcagtagcacggctactcgctagcgtacataaaaaattatgttaaattttctttacacatgattttcttagaagttattaatagttatcccgttggcttataacattataaaaagtcaaatattggtttccaagtc

SEQ ID NO: 18566 - DNA, 1141 bp, Oryza sativa
  ref <308>: DATABASE ACCESSION NUMBER: AK068955
  ref <309>: DATABASE ENTRY DATE: 2001-12-06
gatcgattcccccaacatattagggctcacgcctcccaaagtcaaaacagcccagcccgaacaagcatttcctcgaacacttcgccctccaccaccatggcgcgccgccgcctccaccctcgcctccctctccgccaccgcggccgcggccgccggcaagcgcctcctcctctcctccccctcccgctccctctccctctccctcgcctcccgcggccgcatcgccgtcatgccccacctccacgctggcatcctctccgccgcaccgaggagggcggtgtcggcctcggccccggccgcggccaccatcgcggtcggggacaagctccccgacgcgacgctctcctacttcgactcgcccgacggggagctgaagacggtgaccgtgcgcgacctcaccgccgggaagaaggtggtcctcttcgcggtccccggcgcgttcaccccgacctgcacgcagaagcacgtcccggggttcgtcgccaaggccggggagctccgcgccaagggggtcgacgccgtggcctgcgtctccgtcaacgacgcgttcgtgatgcgggcgtggaaggagagcctcggcgtcggcgacgaggtgctcctcctctccgacggcaacggcgagctcgcccgcgccatgggcgtcgagctcgacctctccgacaagcccgccggcctcggcgtgcggtcccgccgctacgcgctcctggcggaggacggcgtcgtcaaggtgctcaacctcgaggagggcggcgccttcaccaccagcagcgccgaggagatgctcaaggcgctctgaagcgtgaacaactcaagccatcctccacttttcatctcaaatctccatagctcggttcgttgcctacttctctcaagtgttcgcttcttttcctgaataataaatcatggcaacaatggtggaccgtgcagagtagtgttgtcgttttgatgtgtgaagcttctatagcgaacatagtgtgcaatttttaggtaacatatatgagtcttggccttgcactgtttgtcaggtagtaacaacttggcacagctatagactgtagtaacagagttcctttcatgttgaatggtgaggctgtgatgtgttctagagctgaataaacgtgctctggtaaatactgtcacc

SEQ ID NO: 18567 - DNA, 1358 bp, Oryza sativa
  ref <308>: DATABASE ACCESSION NUMBER: AK068956
  ref <309>: DATABASE ENTRY DATE: 2001-12-06
gagtggtagtagtaaagcgaaagcgaacaaaaaggggaaaaaaaaaagaaaaacaagagcgctgtgtcggagaccaccgccggaccaccaccgcgacccctcgatcccggcgatcccacagcattggtcggtccccgtcgatccggccgccgtggggtttggtctggtactctctggtggtggtggtggtggtcgccgtcgtgaacgattcctttttctgcttggattttttttgttgcttttggttgttgtgatccctgtggggctcgggttccggccggtgtaggggaggggagatggatttggagtcggtcaacccggagctcgccgagatcgacggccagatcggcgacatcctccgcgcattgcaaaatgggttccagaagctggataagatcaaggatgccaatcgacggagcaggcaactcgaagagctcactgataagatgcgggattgcaagaggcttatcaaggactttgagcgagttgtcaaagatatggcaggaagtaccgatcctgagactgctaggatgcttcatgataggaaacagtcaatgatcaaagaattgaactcctatgttgctttgaagaaacaatatgcaagtgaaaataagcgagttgatctttttgatggcccaagtgttgaagatggctttggtgaagaaaatgtcctgttagcatcaaatatgacaaaccaacagttaatggatcaaggaaaccaactaatggatgagactgatcaagctattgcaagatctaaacagaccgtccaagagaccatcaatgtaggtacagaaactgcagctgctctcaaatcacagacagagcaaatgagcagaattgttaatgagctggattccattcatttctccattaaaaaggcatcacaaatggtgaaagaaattggttgcaactgatcgctgcatcatggccttgctttttctcattgttgctggagtcatagcaataatagtcgttaagattgtaaacccacagaacaagactatccgagacattcctggtctcgctccaccagttagcagaaggctattgagtattgtagaagacatctgaacttcatacatgtgaacaaatcaaccaagagcagcttgtgctgtttaactcgaaggtcgcaactactacttgaacatgatgcacagtgttgtaatactatacccatgggatccgtgtgcgaggtactgtaaaattgtacgagtatgttatgactctgacaagcaggtttgcttgtaagaactgtattctgtgaacattcacatatgtacacgagcatatcaatcttttttaagagtgacagcagcgtatggatcatccaataatacagcgttttttgcaaatag

SEQ ID NO: 18568 - DNA, 2158 bp, Oryza sativa
  ref <308>: DATABASE ACCESSION NUMBER: AK068957
  ref <309>: DATABASE ENTRY DATE: 2001-12-06
ggtaaaaaaaaaaccgcgcggaaaacccccaccccaccgcgcaccgccagggcgagagaaaacgtcgccgccgccgagccgcggaagcccgcggcgctgccccccaacacctcaaaacctcccacacaagcctcctcccctcccccattaacctctcctcccgtcctcccccacctccatctcgcgatccctagctcgctcgctcgctctctcgctgggtgctgatccaaagccctcgatcccctcgactcaggctctagcttagccatggatgaagaggcgcgcgccgccggatgctccccagcgccgccccgcgcgccggctgcttcctgtggcgctgccgccgagctctgcctctgctcccctacaggtgtggagggtatcgagcaggtgcctggatgtccgtgttttgaggacgccggcgctgtcgtggtgagtggagaggcgccggaaggaccgggggttttgtgctctgaggatggcgctgagctcaaattggctgagcagggtgccctggatgtgagattaggttctccggcagtcggaatccatgagcagcagctgttgcatcgtggtacttcaggttccgatgaagctggtgcaatcaatgagatttcacccgttgaggtgtcgccgtcagaggctagttcaaatttggatactgctggggctattggtggctcccctctcatgttggagtccctgccagagaccagtgatacccgaggatgtgaacaagaggttatgcccggtgttgttgtagggtcatctaatagggatgcaagttctgaggtcggtgtcgagtcggagcgtggctcggatgcggacggtcgaaatggccttggtgaaggggaattggtgtcgagcgttgatggaggcggcgccgagaagagctcaaaggtgactggcgtcttgtctgaagaaggtgtggacgggatggaaacagccctggagccgtgtgtggcgtctgttggctccatcacgcaggttgaggaaggtgtggacaggatggagacgagtttggatgactctgaggcttcagacggctcaaccacgcaggattttgatactgacgtggagacggagtcgagcggttcaagtatagaagaacaagacatgggatacggagtgcacatcccacacacggaacaagcgatctgtgaagtggccaggggaaacaagagttcagaggtgaagagctctgacaggatgtcttcagtaaccctaccaacacttatattggcttcaggtgcagcaatgctacctcatccttcaaaggtgctgacaggtggtgaagatgcttattttatagcttgtgacggttggtttggtgtagcagatggagtaggtcaatggtcatttgaaggaatcaatgcagggctgtatgccagagaattaatggatggttgtaagaaagctgttatggagagtcaaggagctccagagatgagaactgaggaagttcttgctaaggctgcagatgaagcacgatcccctggttcttccactgttttggttgctcactttgatggtcaagtacttcatgcatgtaatataggtgattctggattcttggtgataagaaacggagaaatatatcaaaaatcaaagccaatgacttacggcttcaattttcccttgcaaattgagaagggggatgatcctttcaaacttgtacagaaatacacaattgatctacaagaaggagatgccattgtgacagcaacagatggcctttttgacaatgtctatgaggaagaaatagcagctgtcatctccaaatcattggaagccggcctcaagccttcggagattgcggagttcctggttgctagggcgaaggaagtgggcagatcggcaacctgtagaagccccttctctgacgcggctcttgcagttgggtatctgggttactctgggggcaagctggatgatgtaacagttgttgtatccgttgttcggaaatctgaagtttaaactataagcctctttttggcttaagtgaatgcagctcctagattttgccagagctgcgtttgctggcgaatgtccatgagcattccatgtgaggtacccccaacctcacgtgtacatatgataagctgtatgttcctcgtggccatgatcgcagctactaagtaagttgcgattgcgcttc

SEQ ID NO: 18569 - DNA, 2000 bp, Oryza sativa
  ref <308>: DATABASE ACCESSION NUMBER: AK068958
  ref <309>: DATABASE ENTRY DATE: 2001-12-06
gagtttttgtaacacctcttcgattcatatccggattccgatttacaccaaaccctgtccatatatatataagctatactaataacgatcacggagataaacactccacaaatctgggcagccgccgcgccacgagcacgagcacgacacgacacgttatccatcccgccgccgaagatcgccgcacgccggagcgccgatcgatcggtggagatggtgctcgcgcagctgggcgggagcatctcccgcgcgctggcgcagatgagcaacgcgacggtgatcgacgacaaggcgttcgccgactgcctccacgagatcgcgcgcgcgctcctgcagtccgacgtgcagatcaggatggtctccgacatgcgcgccaacatccggagggccgtcaacctcgacgccctccccgccggcaccaacaagcgccgcatcatacagcaggccgtcttcgcggagctctgcaacatgcttgatccggggaagccgtccttcacccccaccaaggggaagcccagtgtggtcatgttcgtcggcttgcaaggttctgggaaaaccactacctgtaccaaatatgctcactatcatcagctgaagggctttaaaccttcattggtttgtgctgatacattcagagctggtgcctttgatcagttaaaacagaatgctacaaaggccaagattccttactatggaagctacatggaatcagacccagtgaaaattgctgttgagggtgtggagaggttcaggaaggagaagtctgatctcatcattgttgatactagcgggcgccacaagcaagaggctgcactcttcgaagaaatgcgtcaagttgcagaagcaacgaaacctgaccttgtgatattcgtgatggatggtagcattggtcaggcagcgtttgatcaggcgcaagcatttaaacagagtgcttctgttggtgctgtgattgttacgaaattggatggtcatgccaaaggaggcggtgcacttagcgcggttgcagctacaaagagccctgttgtatttattggaactggagaacacatgcaggattttgaggttttcgatgtgaaaccatttgttagtcgtctgttaggaatgggagacttgtctggcttagtgaacaagatcaaagatgctatgcctgctgatcaacaacctgagcttatgcagagactgatagaaggaacctttactctcagagtattctacgagctgttccagaatcttcttaacatgggtcctattggacaggttttatctatgatacctggatttaggtctgaactgatgccaaaaggacatgacaaggaaagccaagcaaagattaagcggtacatgactattatggattctatgacaaatgcagagcttgatagcacaaacccaaagctgatgagtgaatcacgaattaaacgggtcgctcgaggatctggcaggaccatgaaagatgtgaccgacatgctggaagagtacaagagaatcgccaaggtgtgtagcaagttgaagaagaagttgcccaagaatatggacaggaatgttatgaacaacaaggacacgctgaacaccattaacaatctcatccctaagcaattgttgaatcagatcggtggtgttaatccgttgcagagcgtcatgaagcaaatgggcttaaagacatgaacgaaatgttttgggagcatgtgctgatgttaattgatatttgcaaatatatatgatgggcttgatgcaaacactcggctaacattgagggcctggttttcagtgggatatcggcatttaaagtattttttttcttcatgctgaatggaggaagtagtaatattaattttgctgaaatttatgtcaattcagtcaatcaatagttagcgtaccctcgtaaggggcatttaaagtattttttttccttcatgctgaatggaggaagtattgggcacaatgtttctcttaaactgacaaaggtcatcgattggtattgatgcgcatttgcgttcgcg

SEQ ID NO: 18570 - DNA, 2465 bp, Oryza sativa
  ref <308>: DATABASE ACCESSION NUMBER: AK068959
  ref <309>: DATABASE ENTRY DATE: 2001-12-06
gcttttcttcctttctctttccctcctcgccgcgccgcctccgcagcagcagagcctctcgaaattttgggcctcgccgcggagcgcgaagagagatcgagggcggcggagctgcgcgtgggtagcaagcggcggcggaggcggaggcggcggagatgacggacggccatctcttcaacaacatcctcctcggcggccgcgccggctcgaatcctggccagtttaaagtgtattctggaggtcttgcatggaagagacagggtggaggaaagaccattgagattgagaaatctgatttaacgtcggtgacatggatgaaagtccccagggcctatcagcttggagtcaggaccaaagatggcctgttttacaagtttattggcttccgtgaacaggatgtaagcagtctgaccaatttcatgcaaaagaatatgggcctctcaccagatgaaaaacagctttctgttagtggtcaaaactggggagggatcgatataaatggaaatatgcttacctttatggttggttcaaagcaagcatttgaagtgtcgctggcagatgtctcacaaacacaaatgcaaggcaaaacagatgttctcttagagtttcatgttgatgatactactgggggcaatgagaaagattcgcttatggatttaagctttcatgtacctacttcaaatactcagtttcttggagatgagaatcgcactgcagcccaggtcctatgggaaacaataatgggtgttgctgatgttgattcttctgaagaggcagttgtcacctttgaaggaattgctattcttacaccaagaggacgttatagtgttgagcttcatctgtcatttttgcgtctccaaggacaagctaatgattttaaaatccaatatagcagcattgttcgcctttttcttttgccaaagtcaaacaaccctcatacatttgtggttgtcactcttgatccaccaatccgtaaaggacaaacactgtatcctcacattgtcattcagtttgagacagaggcagtagttgaaagaaatctggcattaactaaagaggttctggctgaaaaatacaaggacaggctggaggaatcttacaagggtctgatacatgaggtattcaccaaagttcttcgtggtctatctggtgctaaagttacaaggccaggttctttcagaagttgccaagatgggtatgcagttaaatcgtctctcaaagctgaagatggactgttgtatccacttgaaaagggcttcttctttctgccaaagcctcccaccctcattctacatgaagagattgagtttgttgaatttgaacgtcatggtgctgggggtgccagtatttcatcacactatttcgacctcctagtcaagctgaaaaatgatcaagaacatctcttcagaaatattcaaaggagtgaataccataacctcttcaactttatcaatggaaaacacttgaaaataatgaaccttggagatggtcaaggcgcaactggtggggttacagctgttctacgagacactgatgatgatgctgttgatccacatctagaacgaattaaaaatcagggctggggatgaggaaagtgatgaagaggatgaagattttgttgcggataaggatgatagtggatcacctactgatgattctggtggggagggttcagatgctagtgaaagtgggggtgaaaaagagaaattatccaaaaaggaagctagtagttcaaagccacctgtgaagaggaagcctaagggaagggatgaagaaggttcagacaaaagaaagccgaagaagaaaaaggatcctaatgcccccaaaagagcaatgacaccattcatgtacttctcaatggctgagcgaggaaatatgaagaataacaatcctgatttgcctacaacagagattgcaaagaagctcggggagatgtggcaaaagatgacaggcgaagagaagcaaccttacatccaacagtctcaagtcgacaagaaacgatacgagaaggaatctgctgtctaccgtggcgcagccgccatggacgtggactctggctccggcggcaacgagtctgactagagccacacactgacactttggcggttggcgtaatgaagaaatttgttaatccctggaaccactgatgcagtttgggcactgaaatcttctcagctattaaccttgcattgcgctggatgatccgatccatgtgttgcgtacgatggtatcggctgttctcgccgtggggtgactcgatcacaaaccgttactgtctgtgtacgccgacacgagcgatatccctcggaagcatcgtgctgttaagaagtgcttaatttggcgtagcatctatctcgaatgcaagactctgttagcctatgagcttttgtaaaacaggaagaatgatttgtataacaaaaatttaccatggattggttatgttataacatagtgatttaagaact

SEQ ID NO: 18571 - DNA, 747 bp, Oryza sativa
  ref <308>: DATABASE ACCESSION NUMBER: AK068960
  ref <309>: DATABASE ENTRY DATE: 2001-12-06
gggtaatgtacccgcagcttctagaaccctccattctccccacgtataaggccgcgccccgcgatccaagcagcagcagccatagcccccgccagctcgccgccgccgccatgttcggcgtcgtcttcccggaccacagcttcccgctcgacgtcaccgccttcgcgcaggtggcgcccaactcctgggcgctcgacctctccacgctctccctcgccgccgccccgcgctccgccgtcgtcttcctgctcccggcgctccctccgccccccgacgggcagcgcgccgagcgtgtcgcgctccgcgtcggcgagaacctgttcaacttcatgcagtcgttctgcggcgccgacggcggcaagctggtggtgcccacggacatcctcgaccggtggttccgcaagttccaggagcggccaagaaggatccctcgtatctcaagacattcgacttttgagagcgaaggttattttgcagttcattgcaaactgcatgtcggcagaaagggttggttagtagagttttgtatttgtagaccatctatcagttctgtatttctagacagaaattaacttgtcattcagggactggattcaatcatggttgccagttttttttttctttttttttctgtacttctagtactcctagagaagtggtaccaaaagccagaaccacaagaaggtacttgcgtcaaaagatgaaatcgtgttgccaaactgtacagtaatacaattgaactttgct

SEQ ID NO: 18572 - DNA, 587 bp, Oryza sativa
  ref <308>: DATABASE ACCESSION NUMBER: AK068961
  ref <309>: DATABASE ENTRY DATE: 2001-12-06
tgagagcaaacaccaaccggaaggtgaggttaggtagcagcgaaaggacagcctcactgatccattagttagctagtgtttggtgttggtgaggatatggctttggatgccagggccatgctgctgccggcggcggcggaggtggcgaccgtcgatgtcgtcggcgacggcgaggagaggccgtggtccgggaacggcggcaatggcggcggcggcggtggtgactcatcatcggcgatggtgggcgcggtgtcggtggacttgccgacgatgtggggcgacgagaggaggatgaagcgggagctggtcgcctgggcgaaggccgtggcgtccatggccatcagggagtcatgtaactccagatgaaccgtacctacctaattcctgagccctttctctttcacagagcgagacagatatcgatatgtttttcttctttttttttctttttggaagcagctcgtatgagtctgcttcttgatcgattgatcaatcagcttgtacatgcccccttttttttctcctcgaaaggattaagagaatttaatctgatagtagtactagatacacagatgaaattttccggc

SEQ ID NO: 18573 - DNA, 3059 bp, Oryza sativa
  ref <308>: DATABASE ACCESSION NUMBER: AK068962
  ref <309>: DATABASE ENTRY DATE: 2001-12-06
gtggagtttttggtgttcgtcttccctcccgcgcccgcgccttctcgctcgcgcgcccgcggggacgcggcggctagggcgatgcagctggtggacgacgccgacggggccctcgactcgtgggcccgcttctgcgacctctccgacgagctcttcggcggcgccggcgacctctcggcgggcccgcgcctggcccccgtcgtcgcggacctctgcgcccgcggcctcgccgagctgcttcgggaccaattcatccgctccctagagggaatatttagaagcaacgcggttaagaagttctggcagcagtttcatccttattgcaattcctctgcagtggaaagaattaaattctgtgttcaagaaaactggcctgaggatatcttaagtaaagcattggaagacatatgtttggaaaagaattaccaggaaaagtgtgttctggctctagttcattctttacaatcttatgaggataggtcaccacacagaaaatctaaagcactggattgtagttccagcttaatgcctaggtaccagttaatggtatcttcagtacttctgacaacactaccattgagttttcctgagatattaaatgtatacttcaagaagaaactggaagagttaaatatcatgatggctggattggatgggagcgatccatttgataatcatgatctttttgaaaggaacagtacctctgcttggcattctgaaatggacattgatggtcaagaacctgggatttctgaaagtagaaatttggttaagaacattggaaaagttgttcgtgatctaagatatcttggttttacatcaatgactgaggactcatactcttctgcaataatctggcttttaaagtctaaagttcatgaactagctggtgatgattatagaattcctgtacttgggtgtgtcaaaaagtggattcaggccgttcctcttaaatttttgcatgctcaattgacatatctgggggactctcttgacaatgaaagtggatcatctggtctcaaatcacctttggcctcacgcccttcttccttccctgggattggcgttccttcagaagcccttgtgagatggcacatgcgccttgagtattttgcttatgagaccttgcaggacctgcgaattggcaaactttttgaaatcatagttgattaccctgagagctctcctgccattgaagacctaaaacagtgtttggagtacacgggtcaacattctaaacttgttgactcatttatctcatcattgagatatcgcttgctgacggctggtgcatcaaccaatgatatattacaccagtacgtgtccactatcaaggcattacgtacaattgatcccactggtgtcttcttggaagcagtaggtgaaccaattagagattacctgagaggtagaaaggacactatcaaatgcatagtaacaatgctcactgatggatctggaggaaacgcgaacggaactggaaatgctggggacaatcttctggaagaattgaatagagatgctgaaaaccaggaaaatgttgattatgatgaccatacgaacattgatgagaagcaagcatggctaaatgctgaaagctgggaacctgatcctgtggaagcagacccattaaagggcagcaggaatagaaggaaaattgatattcttggacttattgtcagtataattgggtcaaaggaccagctagtcaatgaatatcgtgtaatgctggcagaaaaactgctcaataaatctgattttgatattgattcagatatccgcacgctggaactgcttaagattcattttggggagagcagcatgcagaagtgtgagattatgcttaatgacttgattgactcaaagagaaccaactcaaatattaaaacatctttatcaaagacatctcaaactgtaggaactgtgcaagaggagacagaattgtctcatgaggttcttgacgcaactataatatcctccaatttctggccaccaattcagacagaagacctcacagttcctgcttcagttgatcagttgctgtctgattatgcaaaaaggtttcatcagataaaaacaccacgcaagctactctggaagaaaaatcttggaactgtcaagctggaactgcaattcgaggataggagtatgcagtttactgtagctcctgtccatgctgcaatcataatgcaatttcaagagaaaccaagttggacttcaaagaccctagctacagcaatcggagtacctgtggactctcttaacagaaagataagtttctggacaagcaagggcgtcctgacagaatcagttggtccagatgcggatgaccccacatttactgttgttgatagcacatctgattttaacaaaaacagcaccgtgaaccaactctctgaaaggtttcaaattactgaagaggaaggtgaaagttcgattgcgtctgttgaggaacaacttaggaaagagatgacagtttatgagaaattcatcatcgggatgctaaccaattttggaagcatgacactggaccggatacacaacactctcaagatgttctgcatagccgagccatcatatgataaatcactgcagcaattgcagagttttctttctggtctagtgtcagacgaaaagctggagatgagggatggatcatacttgctaaggaagtaggagttacatggattagcctgttcatctgttagactagatatggaaggaactgaagaatggaggccccatcctgcgccattcacctcactgcgtgcagtaatattctgcactcgctgttttgttccttgctgaggggatgacgaaagtagagaagcacaggaatcctaaagcttttgaatgttgttattgtgcgtatattgcactgttgacgcttgacgacgctctcaacgcgttcggttgttttccgacgtggataaatgcatatcttttcggtctgtaaatgacagaaagaaattcaaccagacttcttggcattaaatggcaggggcaatggccggaatgccttttggctactggcacccttcggtgtcagcttacttatc

SEQ ID NO: 18574 - DNA, 1503 bp, Oryza sativa
  ref <308>: DATABASE ACCESSION NUMBER: AK068963
  ref <309>: DATABASE ENTRY DATE: 2001-12-06
gtctcccacttttgcttactctctccgccctcctaaaccctacgaccatgccgaccctcgccgccgccgccgccgccgcccgccgcgccggcggggcactgcgatacgccgtgctgggcggggttcggtcgctctcatccctccagccgtcatcctcctcctccgccgcagccgccgccagcgaggaggtgctggtggaaggcaaggccagcgcgcgcgccgccgtgctcaaccgccccggccatctcaacgcgctcacgaccaccatgggagctaggctcaataagttttatatgtcatgggaggacaaccctgatattggctttgtcatgatgaagggcagcggccgagcattctgtgctggtggggatgttgttaggttgcaccagcttataagtgaaggaaagttggacgagtgtaaggatttcttcaagactttgtacagttttatttatgttctgggcacatacttgaagccacatgttgccattcttgatggtgttaccatgggtggaggtggaggtgtttccattcccggaacatttcgcattgtcactgatagaacggtatttgcaactccagaagtacatattggcttccatcctgatgctgctgcctccttttatttgtcccatctgactggtcatgttggtgaatatttggccttgactggtgaaaaactcaatggagtggatatgatcgcacttggccttgctacacactattccatgagtgatcggttgaatctggttgatgaacgccttgcaacattgttaactgatgatccatcagttattgatacttcccttacacattatggagatcttgtgtatccagataagagtagcattgttcataggctggaggttatagataaatgtttcagccttgaaacagtcgaggagattgtggatgccatggaaattgaagcagctaggttaaatgaagattggtctaccttggccctgaaacggttgaaagaggcttctcctcttgcgttgaaagtttcactgcgatcgatacgtgaaggtagataccagacacttgatgaatgccttgtgcgtgaataccgcatgtctatcaatggaatctcagagaaattttctcatgaatttcgtgagggtgtcagagcacgtcttgtggagaaggacctagctccaaagtgggatccacctgcccttgagtatgtatcagcggacatggtcgattcttactttgctcccctgggtgaatttgagcctgagttgacactgcctactgaatcgcgagaggcatttgtatgatgactctgcatgacaattccaagtagcgcttttgtttgaagccttatagatttttgagcccacactgtcgaccgttggcagcacataataacagataggattctcaatctattcttgtaccatatatgccttggtgtattgaaaggaactgatctccaaggtgaactcctaccattctcactttcataaattaatgccttcgcttcatttcatttatact

SEQ ID NO: 18575 - DNA, 1010 bp, Oryza sativa
  ref <308>: DATABASE ACCESSION NUMBER: AK068964
  ref <309>: DATABASE ENTRY DATE: 2001-12-06
gaggctgttgggttgctccctctctcatctctagtcttcttccccattcaccaacacaaccagcagccacctcctcctcttcttccccaactttctgcttgatctccacctccactgccgccccgccgcccaatccaccaccaccggcggcggcggaggtcaacgccggccaccctcgtcgacgcccccccacatcagctcaggggtgcagtgcagaggaaggagggcaagtagacaagaatcaccttattggtacctgacgaatttactccaagctttcctgtggttgccacatgctggtcagcccctccatctcctctggctgcctagttagtggtggacaagataaacatgttgagcctgagttgctgttgggttttggtgtgtggaagaatctacaggcatgaatagaggtgccattgttctgtggattgaatgttgtggtgcagctggttgccttgttcctcctctgctgcttggtttgtctaactgatcggcccctagctagctggccttacaatggtgaactgggtcaccatctgttcatggcgatggttaggatgatggcagtggaaggatgaagaatggcactgcgctgcttgcctgcttggctactattgtgctaaataaggaatgtcaagtggcctagcacttgtttgctcctcactggttgagggtggcagcccactcctctcactgtgtggggcttgactaattgagctcaggtgtggctaaggtttgactccttgctcagatgtggctctcttcatcgtggacacaggtgtggcttttgtgcggcatagtttgattggtcagtttgtattctaggcaacatgttcataatgagtaatattaattcgctttagctgtttattgattgatagaagaaattaatggttgattaatcattccttaatacattgatgtatctgtattcgtatatagctttttatagtatgtgtaaattgaacacttactaattacgatggcacttgtaataccgaatctcc

SEQ ID NO: 18576 - DNA, 3440 bp, Oryza sativa
  ref <308>: DATABASE ACCESSION NUMBER: AK068965
  ref <309>: DATABASE ENTRY DATE: 2001-12-06
gagtagatcgactcactcggaattctctctccccccgaccgcgactccacgactcctccccgtgccttctcggaagccgccgcccctcccgcccgccgccgcgagatccgcttcgcccctctccacgtcgcgtggttacagatgaatcagcctgaggttaacggtttgttatgtgttggattgcatcaaacagatgggggtgacgaattgtatgcaactgaatgtctaaaaatgaaccagggttcttcacatgaaacaaacaagttggatgcagtaatgtcagcttcaacaatgcacagtgatcataacaatgctaatgcatgcgtagatgattaccaacatacaaagatgatggcaggaattcaacctatggaggaagttggttttggctgtacgcaaccctttgagctgcaatcacaagggatagtacctgattctgaggaagaaagcttgccatctagccctgaaacttcttcaacatccaattatgatatgcctgatttagctgagcaaaacttggagcatatttacaatgttttgggtgaaatggttgataaggaagggccagttgtacttagtccagagtatgtgatgtgcggcacaacttcgcatgtggaacctcgcttaactttctcagcagacggattcaagatcgaatactgggattcttgtgaaaatgatgagatggcagctcaatattggaaaatttctgatattacctgcattgattgtaaatgggcacagagtgttggatctgtcttaataactctccatgttggatccggcacagaaactggaaattctagtcatgatagaatacagttttgtcttattgattcacagtggccaaggaaacagcaaaacatttggcatcttgcatcaagataccaagaaatatggaacaatattccatcgggtgattttgcatcagagaattggaacattgaacccagtttgtttttccctaagcaatacttttctgacactgaagaatttgaagatgttatctatcccaaaggagatcatgatgctgtttccattagcaaaagagatgttgagctgctgctacctgaaacatttgtcaacgatacaataattgacttttatgtcaagcacttgagcacaagaattgaacccgctgagaagcacaggtatcacttctttaatagcttcttttttcgcaagctggctgatcttgacaaagatcaagggagagctccagaaggtagagcagctttcctacgtgtacgcaagtggactcgtaaaataaacatattcacgaaggagtttctgtttattccagtaaacttcaacttgcattggagcttaattgtcatttgttatcctggagaagtggagacatttaaagatggtgacacaaatatctctgcaaagattccatgtatactacacatggattctctcaagggaagtcatagtggactgaaggatatcatccaaagttatttatgggaagaatggaaggaaaggcatcctgaatcagcatcagattgttcggacaagttcttaaacttgaggtttatctccctcgagctccctcagcaggataattcatttgattgtggcttgttcttactccattacgtggaactctttttgatggatactccgagaagcttcaatcctttgaagattgactcgttcgctaactatcttagtgatgattggtttccacctgctgaagcttctctcaagcgttcattgattcgaaaattaatccataagctgttgaaagagccttctcaagattttcccaaactagtctgctgtagtgagcagctggataaaacacatgggagtgagaacgctgagctagaacaaatgagtgagaatgctgagcgagaacaagctaaagagctcccagctcagatgtgcactgatggtgaacctgattcagttggcaccattcttgaaacacagcaaccatccatatcaacatgtttcaattattctgatgaaaacggcccacctgtttctgtacacaacctacataagttggaggtatcgtctgcaaacaaggatgccattgtctgcttgtcaaatcatgatgagaaaaatgagtcacctcctgcagattcttacaatcatcttgatttgagatcatgcgactcagaagaggctgagacagccaagggatcagctggtgttgtgaaagatccgaatagtcataaggagcctttgctggattctctggataataaccaggatatttccatccaagctggagctgagatgcatgacagtatggactccaagttatgttcgatctccaataatgctgacttaatggctagcgaggaacgttcgttagacaagaacaccaatgaaaatgaggagcacaatcgaacctcagaagatatcgtagaatctgtcatgatgcttggcggcagcaaaagtgacactgaacttgatgcagaaccagaaaggactgcaggtgaagctgaggttcggaattgtgatcattctaaggacatagattatattgcattaggtgatatcaacaaagatgctgctaagcaatctttaaataggaatattgttgaagctgaggacattaaatgtgaaggtactcttgtggatcatacagtggtagaagatgcaactccatataatgtgaatgaaactagtgcaagtgccgacaagatcaatgataatgagcataatgtttcatctgagttgaaagaaggaaataacggcaatggtataaccacttcaatttcctgtgaaatggaagatagaagcattgacaatttaatggtaggtgatagcagaaacggaacagatgaaactcgtgcagatggccaagaagctcacgataactctgcaacagctgagacagttccttgcgaagacaatgcaacaaccagcataactgatgctgagatgccacacgaagatagcacatgtagcgtgaagggtgaagcaatttcggataacacagcatctgatgccaaaagacctctgcctgatagcacctacatagaagatatacctgacgacaagtgcttgcagaaagatgatggcgggggtgatgaagcaaaaacagagcggcactacaagcgacggaagtttctggtctctgaagcaacatcttgagattagattggacctgtgtaggtgctagttttcgctttgtgttatatgtattcatttttattgcctttacgcaatatccttgtcttctataggtgagtccatgaaatttgtaagttatgaatggacatagacctcagagctatatgaaactctgatgcctagctgcctgcatgaccaacttttgttaaaggtcttaacttagatttggaactgaaaattgttgtatatgggcgaactttgtcatgtgctgctaagatttccgataccggtaatcatcataatttataggggctggcgtgttagtgagctaggctcgaagtttc

SEQ ID NO: 18577 - DNA, 2406 bp, Oryza sativa
  ref <308>: DATABASE ACCESSION NUMBER: AK068966
  ref <309>: DATABASE ENTRY DATE: 2001-12-06
ggacgagagctatggttccgcgggctatggcggcaggaagaccgaggaagagagctatggtggtggttctggttatggatatgggaagaaagcccaggaagagagtgaagggacctatgactctggtggttaccccaagccgaagccttacagtcaggaggagacgcagggttcttatgggtatgggtacggcgagaagcctgcgtatgagagtggtggatacaacaagccgagctatggcgggggagacgaataccagggaggctacggccgcaagaaacatgtgagtgcacttccctggtcctctgcattttacctatatgaccattttctatgcttgatgtaatggctaaaagtagcgtacggtgggttttggaagataaggatattcatttgcacaattgtattaagccacactatatattactataggagatagatgatgaattaaaaccattgttgaccttcttggtgtgcataggaaagttatgaattgtatgacattagagaaatggtttctaaaaatagtggctggcataatataggcttgtgatgcttgaaatagttctaggcaatgtagtgttaactcatggaagtgttattcagcttatccatatgtaactatcaactacagaattagatatctttagtgcacaattccttgtgacatgtctataatgctaaatcttcatcaatgctagttagtttattttatcatacaagtgctgcgcaaattgaccagttaaatgtttgtattatctacagaagatggacattactgtactcattcatactaaatatattagtggactggatcttgcataatacggagtactaattactttgatatgccatatctgttacgtgcaaattcaccagttaaaatttttggtatgtctacaacaaatgggcattactgaatcatatcacacaaatgcccattcaggaaccttttacatgtaatttatcaggctaataaagtggtgtactccaaaattatagcagcacttgcgtaagaaaggctggaataactaagattgcgctagtaagttaggagtcaaaccagagactactacaaacttatgcttggatcatggccatctgttagttcaaatatttgtacattgatatctggctccaacctaacctgcagacataacctatggctgtaggatcattcttgatagaagtataggagcattgaattttcattccagtgactgcatacttgtctactagattggtgattttcctgcatatagagttgggcagaccccaactgtttcctctgcatgcctggtttatttggtcatcctcttcttttttttttcaaatatttccacagttttttggctaaaatttttcatgtttgtttgcatctttgaatttccccagtgaaagtgtgctacaacctttagcatcacaccatttttaatcataaaagtagtgaaatatggtataaatggaagctaaaaagagtttttcagggaaatcattattgacatgacacatggtttggatgttaaatagagaaagagggaactgctaatctggtgcctgactgctggcttagtatcattactttttatcatatggcttagtatcattactttttatcatatcctatatgatccccatgtatcaaatatcattatttgtcatcgtattgatgttttcccaagcatataattagtctgttactgtggaagggacaaggtaaaattctctatatattggtaaatttgcatcttaataaggcgtaatggaactcttaaaactcaagaggaacaggggtacctcacaattttattgtgttttattttttcagaaccacttgttagatttatagtatattgtatggttctgtaactaattttctgatgaggatgcaaatttcataggctcagaagagcatttgccattgtgcttctgttgtgcagagctgttctaatgtatcttcaatgtagactttacaccggaggatgagaagtagatggtttctattccgtgctaagtagttcatgctgtctttttgtaggatgacaatgactctgatgatgaaaagaagcagcgttatcagaagcaccaccaccatcgccgccaggagtacgatgattaagcttccggtgcgttatcttctacggggccatcgattgctgctatcacttgccagccatagtactctgcgtgaataaaagatgctcctgctcagtcgtttcatcgttcgtctcatggacactatttgttatccgtctccatgatagtatgatgtcgcttcaacactgataataaattgtggctttgcgcgtgtttttttatgtttgaagcatgtctaaacaatcactctgtcagttatcatttctttgcttgggatgattggtgtatatatgtgcccctgttgcgtct

SEQ ID NO: 18578 - DNA, 1002 bp, Oryza sativa
  ref <308>: DATABASE ACCESSION NUMBER: AK068967
  ref <309>: DATABASE ENTRY DATE: 2001-12-06
gttagtggcctgggcgtgcgacgcggagggggcgggcgatggagagcggcgcgaacgcacggcggcggcggcggctggtggataggggatccgatcgcctcgccttcatcaccggccaagctcagagcctcccctccgatccgtccccagattcaccactttatactgttgatgctgcttcccttcagcgatctgaacgtcagctaaatgaagttggcattggtgatgacatattcaactacataactcagttgcaaaaatcagaatctggtgttcaaccgactagtgaggcccacctggaaactcataaagagaaacaccaaggtaatgaaagtgacctccaaaagctcaagacaagcaatgtggttcctgaaattcagccagtaaatgaaaaggcatttcaaaggcacagtgaggaaaccctcaggaagaagaacagtcatgacagatcggcaagtacacagcctatgagggaaatggaaacaagatccagatatgtgcctccaaatcagtctaatcaatctgatagtgcaggttggtctgtggaaactctgaaggaaatcctgaatttcgcaccacatgagattacccaggccatatcagctacagagtataaccgatttttggcttccgtcatcattggttttctggtggttctttcaaattgggggctggacgttggtggcactatcaccaaagtattagtttgctacaaggccaattctatttcttattgtaacgaacataaccattgtcttcactttgttgatggagaacaaggaccccaacgtgaggggtagaccagctggcagcaaccttggttctgctgataacttaggccaaatgctagagattgggttgctgctacagaaagccctgagcaccctcctgatagactgcagcgtttgcgctgtcatcatgatctgttttatttgattttgaggggtaccattgacagtattttacggaattgcttgtaagaacgccaggtaccattctgtc

SEQ ID NO: 18579 - DNA, 2064 bp, Oryza sativa
  ref <308>: DATABASE ACCESSION NUMBER: AK068968
  ref <309>: DATABASE ENTRY DATE: 2001-12-06
gggtaaccctcacaatcccgttcgtcgagatcgtcgcttcggcgtaacaacaaataaggggagatccccaagtcctaacccgaatccatttccaataatccatttcgccacgatttgttcttggttgtctgagagagagagagagagagatccgtatacattgctgctacttgaggtcaagcccgttcgttcgcgcgcgcgcgcctgtctgtctctgtttgattgattcttctacgtcgtcgacgtacgcctgttcatgatgtcgctcaacctggctcaccagaccggagcggcggccgccgtggcaccggcggcgccacgtacggccgtggtcgcggcggctgcgggtacagtgtctgctccggcggtcgcgccggcggcggcgccgagcctgcagctgcagacgcagactgtggacccggcggcgccggcgcaggggccggacctccccatggccttccaggcgctggtcgagagcctgccggaggagcagcacccggacgtgggcggcgaggagcggcgcaaggtgggcgtgccggtgtacgtgatgatgccgctggacacggtgcgcaaggacggcaacgggctgaaccggcggaaggcggtggaggcgtccctgaaggcgctgaagagcgccggcgccgaggggatcatggtggacgtgtggtggggcatcgccgagtgcgagggccccggccgctacaacttcaccgggtacatggagctcatggagatggccaagaagaacgggctcaaggtgcaggccgtcatgtcgttccaccagtgtggcggcaacgtcggcgactcagtcactataccacttccgaaatgggtgttggaggagatggacaaggaccaggacctggcctacacggatcggagcggccgccgcaactacgaatacctctcgctcggcgccgacgccatgccggtgctcaagggccgcacgccggtgcagtgctacggcgacttcatgcgcgccttccgcgaccacttcgccgccttcatgggcaacaccatagtcgagattcaagtcggcatgggtccggccggtgagctccgctacccgtcgtacccggagagcaatggcacctggagattccccggcatcggcgagttccagtgctatgacaggtacatgctgagcagtctcaaggcggcggcggaggcggtgggcaagccggagtggggcaacgccgggccgggagactccggcgggtacaacgactggccggaggactcgcccttcttccgccgtgaaggtgggtggaacactccctacggtgagtttttcatgagctggtactcgcagatgctcctggaacacggcgagcgcatcctgtcggcggcgtcgggcgtgtacaccggcacacccggcgtgaagatctccgtgaaggtggccggcatccactggcactacggcacgcggtcccacgccgcggagctgacggcagggtactacaacacgaggcaccacgacgggtaccagccgatcgcgcgcatgctggcccgccacggcgcggtgctcaacttcacgtgcgtggagatgcgcaaccacgagcagccgcaggacgcgcagtgccggcccgaggagctggtgcagcaggtggcggccgcggcgcgggagtccggcgtggggctcgccggcgagaacgcgctgccgaggtacgacgagacggcgcacgaccagatcgtgacgacggcggcggagaaggcggaggaggagcgcatggtagcgttcacctacctgcgcatggggcccgacctgttccagccggacaactggcgccgcttcgccgcgttcgtgaagcgcatgacggagtccggcgtgcgggacgtgtgccgcgagcaggtggagcgggaggcgcagggcgtcgcgcacgccaccgggtcgctcgtgcacgaggccgccgtcgcgctcagcaactgatcgatcagccgacctcgcgcgtagaagggtaaaaacgctttacatattttatactcccaagattatttgttgtaatcagcgtcgcgtacgcgtgcgacgacatcgatcgctcaagtgtgcaaccttgatctgcg

SEQ ID NO: 18580 - DNA, 4187 bp, Oryza sativa
  ref <308>: DATABASE ACCESSION NUMBER: AK068969
  ref <309>: DATABASE ENTRY DATE: 2001-12-06
ggtatgcatttcatcgaacaccttgcgatcaccctctcaccaccgctacagatcaccattgtgaggctccccggccggagctggaggttggagggagtggaggaagagccgtgctgccgccgtcgccataggggaagccgggtagccgctggacatcaagaaaagccgtcaagcaccttacgtcgccgctgtctgcccctgtcctgcaccgtgtcgagctccactttgccgcgttttgccatctcgccgtctcgcgaaattgtatatcggttagtcgtgaggcaacgtatgcagctttcaggaggtgaaggttgatcaagatcatatcaagaataagaactatcctaagcagagtattgaagagaagctaggtaggaacgccgtggatctcatcaagacaaatatggtgcttaaagtctttggtggtaatccgtctgaaaccaaaggtgttctaaatgtggaactaacggttggcagcaagactattcctaccacgatttttgtcatcgatgggaagggttcgtacaacttgttgcttggaagggattggattcatgccaattgttgcatcccttcgactatgcatcaatgcttgattcaatggcaaggcgacaagatagaggtcgtgccggccgacaggtcagttaacgttgccagtgccgatttagccctttgggagatggatggccttgattgtttatctggaaaagtctgggatggagattttctaaaagtgtccgattctgatatacagccaatcgaagatggagaacccaagctattactttgagggcgttgtgaagggttcgaatgtctacgctaaggatacagtagatgatctcgatgacaagcaaggtccaggttttatgtcggccgatgatttggaggaaatagacataggtccaggcgatcggccaaggccgacatttattagcaaaaatttgtctccagagtttagaaccaagctgatagagctcctaaaagagtttagagattgcttcgcttgggagtactacgagattcccggactcagccgatcgattgtcgaacatcggctacctatcaagccaggggttagaccacgccagcaacctccgaggagatgcaaagctgatatgctcgagccggttaaagctgagatcaaacgattgtatgatgctggttttattcgtccctgtcgatatgccgaatgggtttctagcatagttccagttattaaaaagaatggaaggtcagggtgtgcattgattttcgagatttgaataaagctacaccaaaggacgaatatccaatgccagtggccgatcaattagttgatgctgcatcagggaacaaaattttgagttttatggatgggaatgcaggatataatcagatctttatggctgaggaagatatccataagacggcttttagatgtcctggtgcaatcggcttatttgaatgggtcgtcatgacttttggcttgaagagtgctggagcaacatatcaaagggccatgaattatatatatcatgatttaatcggctggtcggttgaagtctatattgacgatgtggttgttaaatctaaagaggtggaggaccacatagccgatttaaggaaagtttttgagagaaccagaaagtatggcttgaagatgaatccaacaaaatgtgcttttggtgtgtcggccggccagtttttggggattcttgttcatgaaagggggattgtggtgacccaaaggagcgttaatgcgatcaagaaaattcagcccccagaaaataagacggagctacaagagatgatcggcaagataaattttgtcagaagatttatttctaatttgtctagaaggttggaatcttttacacccttattgaggttaaaagccgatcagcaatttacttggggagcagagcagcaaagggctttggataatattaaggagtatctcagctctcctcctgttttgattcctccacagaaaggaataccgtttaggttatatttatcggctggtgagaagtcaatcggctcggtgttgattcaagagttggaggggaaggagcgagttgtattttatctcagtcgacggctcttggatgctgagactcggtattctcctgtggagaagttatgcttgtgtctatatttttcgtgtacgaggttgaggcattatctattatctaacgagtgcaccgttatatggaaagccgatgtagtcaggtacatgctgtcggctccaatattaaagggacgagttggaaagtggatattttccttgactgagtttgatcttcggtatgaatcaccaaaggcgattaagggacaagctatagccgattttattgtagaacatcgtgatgattcaatcggctcggttgagatagtgccatggactttattctttgatggatcggtatgtactcatggttgtggcatcggcttagtcataatttcccctaggggggcatgtttcgagttcgcttatactattaaaccgtatgcaactaataatcaagctgaatatgaggcagtgcttaaggggttgcaattactcaaggaagttgaagccgatactattgaaatcatgggggattctttgctagtaatcagccaattggcaggagaatatgaatgcaagaatgatacattgatggtttataatgagaagtgcttggaactaatgaaagagtttcagctggttactttgaagcatgtatctcgagaacaaaatcttgaagctaatgatttggcccaaggggcatcggggtataagccgatgatcaaagatgttaaagttgagattgcagcaatgttagccgatgattggaggtatgatgtgcatcagtatttgagtaatccatctcaatcggcttccaggaaattaaggtatagggcattaaagtatacactgttggatgatgagctttattatcagacgattgatggggtattacttaagtgcttgagtgccgatcaggctaaggttgcaatcagtgaagttcacgatgggatttgtggtattcatcaatcagctcacaagatgaagtggttgcttcggtgtgtagggtacttttggccgacaatgctggaggattgtttcaaatattataagggatgtcaagattgtcagaagtttggagcaattcagcgagcaccggcgtcggctatgaatcctattattaaaccatggccgttcagaggttggggaattgatatgatcggtatgataaatccaccatcgagtaaagggcataaatttatattggtggcaactgattatttcaccaagtgggtagaggcgattcctttgaagaaggttgattctggggatgctattcaattcgttcaggaactattactacggatcaaggttcaatcttcgtgtccgatgagtttgttcagtttaccgatagcgtgggtatcaagttgttgaattcttcaccttattatgcacaagctaatgggcaagccgaggcatctaataaaagtttgatcaaattgattaagcgaaaaatttctgattatcctcggcaatgacatactcggttggccgaagcattgtggtcttataggatggcctgtcatggatcgattcaagttcctccttataaacttgtttatggacatgaggctgttttgctatgggaagttagaatcggctctcgacgaacggagctgcaaaacgatttaacagccgatgagtattacaatcttatggctgatgagagggaggatttggttcagtcacgattgcgagcccttgcaaaggttactaaggataaggaacgtgctgctcggcattataataagaaagttatatctaaatatttttcggaaggagaacttgtatggaagctgattttgccgattggtactcgtgatagtaaattcggcaagtggtcgccgaattgggagggaccattccatattcataaggttgtgtctaagggagcatatatgttgcaagggcttgacggcgaagtttatgggcgagcactcaatggtaaatatttgaagaaatattacccaagtgtttgggttaacgcatgatcggctacttttgccgatccatgatagccgatgtgtttacatagccttgagctggccgatattgttatatcgcccttagttatttcataattttattaatgctctcgacattgtaaaactaggggggcatatatatatcagcatgc

SEQ ID NO: 18581 - DNA, 2639 bp, Oryza sativa
  ref <308>: DATABASE ACCESSION NUMBER: AK068970
  ref <309>: DATABASE ENTRY DATE: 2001-12-06
ggcaagaagtggagtactcctaggagagatcagtcgtcctggacgcagaagatggtgggcttgacgggctcggtgatctcgacggtgccctcgagcatcttggcgaccttgcccatggagggcctcatgtcggcgcggtcctgaaggcaccacatggccgtcttgaccatgcgctcgacggtggcgaggctggcggggtcgtcgtcgtaggcctcggcctggacgatgcgagggtcgatgatgtcgtcgatgcggcgctcgacgtagaccttctcgaaggcccacttggggaagtaccagtcctcgctgccgacggagtcctggcggaagccgtagttgcggcggccggagacgatctcaagcagaaccatgccgaagctgtagacgtcggccttggcggtgatgggctcgcggtggatgacccactcgggggccatgtacccgcgggtgccacggatgcgggacatggtcaccttctccttcttgctggtgagcttggacagcccgaagtcggacaccttggggcagaagtcgtcctccagaaggatgttctcaggcttgatgtcgcagtgcagaacccactcgaggcactcctcgtgaaggtacgcgatggcgcgcgccacgcccagagcgatgcggtagcgggtgtgcaggtcaagcagaggccgcttgttgctctcttcttcgtctccttgggtgccggtgcctggagcgaacaggtacttgtccagcgatccgtttggcacatactcgtacaccagcatcctctgctccttgtccgcgcagaacccccacatccgcaccaggttgaggtggtgcatccgcgcgatgatggtcacctccgcccagaactccgcctctcccccgcccaccccgtccagctgcttcactgccaccgcccgccggtccggcagctccccgcggtacaccttcccgtacgccccgcgccccaccaagtccgagaactccttggtcgccgccttcagctccgcgtacgagaaccgccgcggcccgccggcggggaggtactccagccccagcgtccgcgccatctccctgtactgcgagtacttgcgcaggaacgcccagaacgacagcacccccgccagcagctccaccgcgaacagcgccgtgatgatggcgatgttccggatcgtcgtccgcccctgcttcggcggcaccggcagcgccagccgcaccgggcacaccgtgtcgatcatcgtcgtcatccccgtgaagttgttcgggtcgttgttcgactccaccacccgcaggtaggtcgacatctccgtcgccggcgaccaatagccgtccaccagccgcgtgtagtgcaggcacgtccggtccccgcccaacttgtagccgaaggccacgcaagaggcgttggcccggcacttgctctggcagtccgccaggttctgcggcgtcaggctggtcatgtacttgccggggacggacactccggtgtcggcgccaccggagaaggaaacgaaatccatccgcacgaacttgtcgtcgttgcccttgccgctgtagttaagcttgggggcgcagcccaggccctgcgggcggtaccccggcgggcagacgcaggtggtgttgtcggcgccttgggggacgcagatgttggcctccccttggcaggcgccccggatggtgcagagctcctgcaccagctgccataccacccgccactgccctttcttggactgcaggctgtagaggcgcaggttgccgtcgtcgtcgagggtgaggcggcgcaggcggcgagtggagccctggtcggaggcgatgagctgggagggattgccaccagcgagttgcagcgtgccgtcggcggtgaggttgcgcagggcggtgttgccggtgatgttggcgtaggcggaggagccgtgctgcagggtgagggcgttgaacagctggaatctgccgttctgggactgcagggtgatgctggtggtggtggtggtgccgttgctaatgctggggatggcctgcgacgccatcagcgtgtccgtcggctccccgaagctggaccaggcgccgtggtcgaggctccccgagtcgttcagagacaaaggggcactcgtggagttgaagttgcgggaccaaagggtggtgctgttgccgttgtcgctccacgacagcttccccgccgcgtcgatggagagcacggaattggcgtcgccctccacggcggagtggtcgtcgttgtgggcgtaccatatgacgaccggcctggactcgttggcgttggcgctcacccagacggcgaaccagaacttggctggggaggagggggagggccggaatccggcggcgaagtccccgttgttggagacgagggtgcggttgctctcggcggggctccaattggtgtcgttggcggagaaggtccgcatctgctgggcctgggcctgggcggcggcgagggccggtaggaggaggaggaggaggacagcggccgccatggttgtgcttgctggattggggaagggaattggatttcttgcttttggatttgggatcgaaccgacgactctcctcacctcgagtctagtcaacaacactgtagccaatttgcccatcatgtaaattgaatattcattgccttgactgtggactggaatttcttcttc

SEQ ID NO: 18582 - DNA, 2523 bp, Oryza sativa
  ref <308>: DATABASE ACCESSION NUMBER: AK068971
  ref <309>: DATABASE ENTRY DATE: 2001-12-06
gaccggcccaccaaaaaaaatagcgaaaagatagagagaaacaaaaagaaatacgaaaaaagaaaaaaaaaagagagaaaaaactcctgcatctgccgccgagaggagggagtcacgcgccaacctcgggcgccgccgcgcggaggctccctccggcctcgttccccatccctctcctccctccgtccccctccctctcctctctcccagcttccctccctccctctccttccctaccagcctccctcctttcctccatctctcccaataactctcataccttccagtgcgccgggccgtcgtggggaaccccggcgaagcatccctctcagctcgtcctttcggcgccgcccacgaatcccttccttttccttgaggcgggtgcaaaagaagatggcatcaacatctacttattcgggtgtgcacctcagaggtgacataccgcccccttcgccgccagcaattgatgatgtgcttgatgtcttaccaatagcagtgagccccccaccaccatcactgcatcaaactttcatagatcccttactgcacagaacagttatcaccccacctccccctatcaatccagaggcatgcatcacccctgacagtaaccttacattcacacatggccaagatattcctgaagatgttgtccctttgattggcacgatgtttgaatcagaagatgctgcttacagcttttacaatagatatgcacggtatgcaggttttgggattaagaaaggcaagtttgacaatgcccgtcgtgcacgctttctgcattgcacgcgccaaggcaatcacacttacaaaggcgaggaggtaaatagggtaagaaactagacaacaaaacgagttgggtgcaaagcattgataagggtgaagcaagatggtgacatttgggaaatcacaagagcacaactggatcacacccatcatctgtatgtctccccatcaatggcggttttccaacagtcccacaaaaattatgatccatcaatcatgcaatttgttagacaacttcaggaatgccacgtatctcacggtgcaataatgtccttactatcaaaaatgcatggtggcccccagaacattcctttcactaacaaggaccttgcgaatagaaggctgagaacaaggtggaggagaactcagatgatgtaaacaagctgctaatgtttttcaaagaaatgaaagtcaagaacaacaacttctattttgatatccaagctgatgagaaagatgctatccagaacatattttggtgcaatgcaagtagtagggcagcctaccaccattttggtgattgcatcacatttgacacaacataccgaacgaacatgtttaacatgccattggcggtgttcgttggatgcaatcaccacatgcaaagtgtgattctgagtgttgctctccttagggatgaaagagctgaatcatttgagtggttgtttaaaacttttctgaagtgcatggggggcaaagctcccatgtgtattctcacagacgaggacccagctatggcatcagctataagggaggtgctaaagaacaccattcataggctctgccgatggcatgtactaaagaagtacaaaaaacagttaggtgtgctctatgaaatgttcaagcatagaaatttcaaagagaagctgcactttgtgatcaaccatccgctgacaccaagtgaatttgtggctgcatggaaagatcttgttgaagagtttgaacttcaaggttgtgaggtgatggaaaacctttataacttgcgtgccgaatggattcctgcttacttcaaacagatctactacgcaagaatgacatccactcaacggagcgagagtgtgaaccatatggttaaaacaggctatctcaaagagctcactgcactccacagagttgcagctgagataaatagatgcatccagctgaggaaacaaaaggaggactgagaaactaatgctcaagagtgtgagcccgtgttgagcacaagatatgcgttcgaggaacaactgagcaaattgtacacaagggcggtcttcaccttattcaaggaaacactgttcgatagcacggcgtttcttgtcaatgaggtttccaacgccatgggagcctacgtggtgacccatggtaagacaattcgaaagaacccgtggtcgcaacacgctttccaagttactgctgatgtggagtctgggctgtatgaatgcgagtgcaaaacgtggatacacacagtgtgagcccgtgttgagcacaagatatgcgttcgaggaacaactgagcaaattgtacacaagggcggtcttcaccttattcaaggaaacactgttcgatagcacggcgtttcttgtgaatgaggtttccaacgccatgggagcctacgtggtgacccatggtaagacaattcgaaagaacccgtggtcgcaacacgctttccaagttactgctgatgtggagtctgggctgtatgaatgcgagtgcaaaacgtggatacacacaggtcttttctgcccacatattgtg

SEQ ID NO: 18583 - DNA, 1107 bp, Oryza sativa
  ref <308>: DATABASE ACCESSION NUMBER: AK068972
  ref <309>: DATABASE ENTRY DATE: 2001-12-06
gagtgttagtcttagcgaatccagcagcagaagcagcagcagcagctcagccgccgccgatggcgtccacgatcatggccccaacctcccgcgtcctcgccgccaagacccccttcctcggccatccccgcccctccaatgcccccgtccgcgacatcgccgccgccgccaccggccgcatcaccatgagcaaggagctgtggtacgggccggatagggtgaagtacctggggccattctcggcgcagacgccgtcgtacctgaggggcgagttcccgggcgactacgggtgggacacggcggggctctccgcggacccggaggcgttcgcgaggaacagggcgctggaggtgatccacggccggtgggcgatgctcggcgcgctgggctgcatcacgccggaggtgctcgagaagtgggtgcgcgtcgacttcaaggagcccgtgtggttcaaggccggcgcccagatcttctccgacggcggcctcgactacctcggcaaccccaacctggtgcacgcccagagcatcctcgccgtgctgggattccaggtcgtcctcatgggcctcgtcgagggctaccgcatcaacggcctccccggcgtcggcgacggcaacgacctctaccccggcggccagtacttcgacccgctcggcctcgccgacgaccccgtcaccttcgccgagctcaaggtcaaggagatcaagaatggccgcctcgccatgttctccatgttcggcttcttcgtccagaccatcgtcaccggcaagggccccttggagaacctgctcgaccacctcgccgaccccgtcgccaacaacgcctgggtctacgccaccaagttcacgccgggctcgtgaatggcccagccgccattgtagactactctctctctccatcgctcgatgtaccaatgcttgcacagattgtacgatgctgtgatgaatctgatatgatccatccagaattcagaaactgaaaaaagttggggtttgcaacttatgtgtcagctgctgctttaagcttagttaactcttttgatgttttaatttgtacatttgtgtactttgtaatgatccatacgagacctagtgtttgattattgct

SEQ ID NO: 18584 - DNA, 3801 bp, Oryza sativa
  ref <308>: DATABASE ACCESSION NUMBER: AK068973
  ref <309>: DATABASE ENTRY DATE: 2001-12-06
gacttgattggcagtcgccactgaccaactttccaaaacctcgtcgccggcggccatggcctacctcccgccgcacaagcgccactccaacgcctccacgcccgccccgaccccggcccctcctcctccctccctctcctcctccctccgctcgctctccctctcctcctccccacgcggccgccaccaccgcggcgccaccacccgcccttccagcaagatcgtccacgccgccggctgcgtctcccgctggtccacgctcccgcccttccccgacgacgacggcgacgacgacgggtcgctccgcctcgagcccttcccctgcgaccccatcgagcgcaggaccggcgccaagcccctcgccctcgtctcctcctccgccgccgaagcctcctccccctgctccgcggcggccgccgcatccaccgtcaccgagaggttcttgccagacctcctcgccgcggcttggagggcgaaggcgggcgatgtgcctgaggaggaggaggaggtgaagctgagcgtcgtggccagggtggggaaggtgctcttcgaatcgtccggcggcggatcacccgtctccatgaactcgctccgcgaagccgtgaaagcaggagaagagggctcgaggagcaatcttcataaatcgttctataccaatgtgcctagtgagtgcttggatgatatggagcgatccgctgcggagaagatggggctggagtttgattcctccaaagagcactaccatgtgaaggtctttgacaagcgtcaaagtgattctacaataacgtgcaaatgcaccgtgcaagaagatggaaagcttgctatccataaggtgtgcttaactgcttatcgttctaaccttagcctcttaccttttgtcttattaatgttctgcatcatagattcatatgagtagtttgcacattgtattttaattttggctctacttgtgtagattatttttctgagtatgattgctgaatgcccgaaaatagagtgttgggattgttagcattttgacttgtacccatgagaaataggaacaatgaggcttcatctttgtgagatgtatggcataaatcatagctaccggtctatcatagggatcttgattcgtatgagttttttgataaagtgagaagctggctcatataaacttgtctacttcatttgtggtactagatgaagcctattagctactttgtccttccaggtgttgtgattcccaaaatatatgcctttaatcatttttgaggtcgctagttcttactgattggtcttgtggatgcaacattatagtaaatctactaatgatggattagctcgattagctacaaacttccaatactatagactggaagcctacactatcagtaagcaagataatatactatgtgcctctcaaaattccaatgatttgtcatctagcacttactcatagccttttttttttcctgtagtggaacttctttaggatagtaacttctcacaattgaaccttacattgtcagttcgcagtagcactatgcaactctttcatgctaactataattctgtgatgcaatatgtggttttgtttggttcattgagaataagtgccctgtagatgccaaggagttgctcaagtgggctttgaacgttccaaaaggttggaggcccatttacaatgcatacatgtgagaaggagagtacatattctggagtgtatcagtacagggatacttaggaagtttgtgtacagtgtacttacaatacatctgtatgtgcacttacaaagtatgtacagttgaagaggtttagatttgaatgaggctatctgtacatacacttgaagtatgtatatttgaagggatttctgaaatgttcgtgccataaaatctatctaatcatcaccaactttctgaacttaaatttttattttgaaaagctgaaatataaccagtaactagcaagtcctaattatgggccacattgcacagtaatattcaattttccatgttttgttgaattcgatagcctatggtacacagccaatgccaaacactatactccctccatccttaagagattctggccccttcatttggggacggagggaatattttggttgtcaattgtaagaaatttgtatctattagtagaaaaggtctggtgccttttttccttcattgaaagagtcatcttttgtgtcctttgctaggagtacagtagacctagcatatctttccttggatggttgtatctgagttctaatgtaatccgttcttgattcagccttgaactattaccaggttacattatattttgtttagatgacgattgaattgacagcaatcaaatcaggcctgtgttaatgtgatcatgtcctatgtctattctactgaagaaatttcatgacagtggtttttgtttcttcagtttttatgaactgcaaattttatgttaaaagcatctcatataattaattggtaagtttgttaaatgcaaattttacccgtgtaggataaataaaactttgtgtgcgttgctatatccttaaaatatatattattcaatagaagaacgaactctttggcttaacatgtttgttttacactgtcatacttttccatgcaggttcagttgaaccaggtacgccacttggtggaagatatatcctgtctgttcaaggatctggacctgaggctgatgttgtctaccaaaagaatccttaagaacttagatgtgagttgggttttgtttgaaaattctgatcctttatgttatgagacatttttggcaaagttatttggtttttgcaggctgaagtgaaaaatgcaataaattgcttggtatcttctgctgttattgatcctgatgtcaaaggtggacttagatggcctcttgggaaagaatcgattgatgagaggttcagcatagttggagtgtggcatacaaactacaaagctttcagaaatgagaagttgaggctcaagctaaggcatgctgaccggtttgaccatcgaagctcaactggagaggtttctaatgaagttacctttaaactaattggcatatctgcaagtctggaggtaagtaaaatctgctcgtaagttaatgcgtatgtgctgttcttcagcatttacacttcagtttacattcctaataaggctatgatccaaagtccgcctccgctgtgtactgcatatcaattatcatgttaatatctaagatcccattttaccgacatggggtcaaccagaattggaatatgtggctaataatttctggtcaactgtgcagcaaacggcattatgagttaatgacctttgtaagtcttgttgttttccaggctgttgatcaggaggcgaattctctgcaggagatgctggagtctgtggtaggaatgatctgggagagcggtttgagctacaagaaggcgccctgagcacagttatgccgagtggcgacaagtagacaatgctacaagagcttcttgccgatgttaccgtctgactaccttctaccctggagctaacgggcgttgatctcagcccaccccatcatgtacagtttcagttagcctgtctctactgtagtgtcagtgtgtcattctggttagcaggttaagtagtagtgagtagtctatgggcatggtcgcatggtatggtaggttttccacttacttccttgctccttggcgtcataggttgatcgaaccacctacatgagacgctaaattcaagtgaagttgaaatgactatgcaattatgcattcttctgttaaacgagaatggcatattttataatataactttgagt

SEQ ID NO: 18585 - DNA, 2160 bp, Oryza sativa
  ref <308>: DATABASE ACCESSION NUMBER: AK068974
  ref <309>: DATABASE ENTRY DATE: 2001-12-06
gtctccagggtatccctgatccctcttctcgtgagttcgcccgccctcgccctcgccctcgccctcgcctgggccgatccccatacatcccgcgagcgcgagcgagccgacgcgccgccgttcgtcctgctgcttccgccgcgtcgtggtgagcacatcatccgccgccgccgccgatccccatccatccttgcgagcgatcaggggcgccgtcgtgttcgtcctgctgcttccgccgcatcctggttcgacagcattgtttgaggttcttttaaaagtgttctcaccatggatcttcgccattcacaaactccatccagtgatgacgagacaagggcacttaatgcattgcttgatgctttcagttctgccttttcgcttgatgatatagctacggcatattgcagagcaaatggtgatgtcaacagagctggtgatctattgactgaacttgaacatcctatggccaagagcaatgaagttgactcaagtgttgggactattcatcccccaagtggtaaggcaattgaagaaaacagtacagagagttcaggccaagcaaaatctcgggaaaaaatgcagaagtctagtgcttcatttggcactgtatccagtatgttaggaaagggatcgaccagggctacagtacctttgatgaatagagcatcaggaaaggaaaaacctccaatggttgagttaccagagtacatgcgggacgattttaatgggaaagttgataaatctgattctgcaccaaagagagagactttgaataatagagatatagaggaatttctattttctatgcttggagaaggattcaagctcagcatggacatgatccgtgaggttctaggcagctgtggatatgacattaagaagagcatggaggaactgatgtcagtttctacaaaagatacaagcaagaaggcagaagacaaacattatatagcacaggatgcagcagtagaatgctcttctacaaagggaagctgcctagaatcacaatccacctttaggaatggcagtgcctattctttgcgaggcaagagacatagctcaagtcagatttctccaggagagttgctagtgtcaatcttcactgtacctgaaagatccgaggaggaaccaataggaaaacgatatgaactgggtgcaaatcgaaacagagtaccagatcagaaaccagttgtagaaccccttgaggacatctcatcagaaactaactgttatccagtgaaagttatccttagcaaagaactagttgcacataatgaggaagattaccagaactatcgtagggctgcgaagcagcattgggatatgatgaagcaatactatgagaaggctgttgatgcttttagggagggtaaccagaaagaagtcgagtatcttcttggggaagggaaacactattacatgatggctcgactggctgatgaaaaatcttctgcggagattgtcaagtcgaaaaaagtagagtcaaagaatgagttgtgtcttgacctgcgtggacaagatccagccaacgtagcaaatctcgtgagacttcatcttagacagttgtctaatatcccatcttttgagtacttgaaagtcattactggtgctgaggatggcagtttcaaatcggcacaaagaagaagaaaggtgatgaagtatctggagaagaaatcgattgtgtggactgaagaggaatccaaccctgggaccatcctcatcccaattaatcagaagcaggatcagcaggattaggttcatgtacaaaggtggtggctctcagtgacaaactgacagaagtcgatgttcatagctgcggcatcattgatgtccattttgaaccttactacagtagttctttcccttctccttttgggtatttgaactgtggaagttacgtgcactgcattcgttttgtctgcacattgcagacatttcgaactcattattgccacctcgctagtgccagaaggaagaaagaactgaggccatggtccgacagaaatgcagcagtactagtactagtagtaacattcttgtcatctctagcatcgtgtcactacttaacagcgtccgctcggcagatgaatggtctcacttgtttaacactgatgtgcgcaaaatggcatgctgcatctctgcaaaatgagtcatcgattc

SEQ ID NO: 18586 - DNA, 3401 bp, Oryza sativa
  ref <308>: DATABASE ACCESSION NUMBER: AK068975
  ref <309>: DATABASE ENTRY DATE: 2001-12-06
ttggggattaccaaatcctatttcccgtccactcggcgtcggctcctcgtgagttctttcgccggccgccgccgccgcccgcgccgatccccatccatcccgcaagcgcgcgcgcgagcaggggccgcacatcgcgttcgttccgctgcttccgccgcatcctgggcgctgcaatttcggttcagaattctccgcctcacatatgcttgacgatgctgcgtgctaaggagacattcaggaagatgtactcggttgccaagaactactgcggaggagggttagctgcgtcggatgcgctatcagtatctgctcttgggcgttctctgaaaccctcgcggaaagcatcgaggcatgttgtcccgtgcagggcgcgctcgtttacgcagtgttccctagggggtggttctgcggaccaggagattgtgattgcactgggcagcaatgtgggggatagaatcagtacgtttgacagggcattgcgtatgatgaagaactcgggtgtaaatatcaccaggcatgcctgcttgtatgagacttccccggcttatgtgactgatcagccgcggttcctgaactctgctgttaggggcacaaccaagctggaacctcatgaattgctcaagaagctaaaggaaattgagaaggatatagggcgcactgacgggataaggtatggtcccagaccgatcgatctggacattcttctatatggcaaatcacatattagtactgagaatctaactgtgccacatgaacgcatccatgagaggccgttcgttttagcacctcttgttgaccttctaggctcatccactgatgataacgtggaaaaaagttggcattctcttgcaaagtgcactggtgggttctttgaatcatgggataaacttggaggtgaatctataattggaacagaaggaattaaaagggtattgccagtcggaaatcgtctgttggattggtctgagaggactcttgtcatgggggtgcttaatttgacaccagacagcttcagtgatggtggtaagtttcaggaagtggaagctgccattgctcagaccaagttattaatatcagaaggtgcagacatcattgatattggtgctcaatccactaggccccttgcaagaagattatctgcagacgaagagcttgagaggttggttcctgttctagatgcgatcacaggaattcctgagatggaaggcaagctgctctcagtggatacattctatgcagaagtcgctgctgaagctgtgaaaagaggagtacacattgttaatgatgtatctggtggacagattgacccaagaattcttgaagttgtagctgaacttggagttccatatgtgactatgcatatgagaggagatccatctactatgcaaagtgaacagaatctactatacggtgatgtttgtaaagaagttgcttctgagctatataaaagggtgagacaagcagagttgtctgggattcctttgtggaggatagttcttgatcctggtattggattctccaagaattccaaacataaccttgaagttatcatgggtttggaatctattagaacagagataggtaaaatgagtttaggtgcttcacatgtgccaattttacttggaccctcaaggaaaagatttttaggtgaaatatgcaatcgtgtcaatcccactgagagagatgctgctaccatggtcgttgctactgctgggatattgaatggtgctaatatagtaagggtgcataatgttaaatatggcgtggatactgcaaaggtctctgatgcattgagcaaaggcagaagatgattataccaccttcggaaaatagatcatactccagttttgtactagaaaataatgatcaataatagtaactcggccataatgttggcttctcagataataccatagggcgagtatcatcatagaaagcatgtgcacacaactgttatgtgagcttgagatggaatttttctttttgtcacatcatttcaataatcttctgaggtaacggttatacagatctctagagttttgacctttcaggattcacaaattttctacaggtctgatttgtttggaactttgggccataacttgaagttattctccatgtattttagatctgcttgcctgctatggaacttctccatgtatacagatccctaaagttttgacctttcaggattcaaattttctacaggtctgatttgttgggaactttagatcataacttgaagttattccagcttgcctgctatggaacttctccctgtaattccttttatataagacggaccgtcaaacgttagacacagaaatacacaaatgcacttaaaatgggacggagggaatagctttttacacatgatgatgtttatcatgctaggtttatacggtagtcttctcttctttttatcttccaatggaaatcggtagcttcattataatcttttttttattcttccttctgtctgaaagggaattttgtatctacaatttattttactagaaaatctctcatagaatatttagaagcagttatagtatcatataatataattacattatagtacaatataagttggatttaattatgttgtcacaagcaaaaagttctgtagcgcaatggtgaacggctgcatacaataccaggaaccacgacattgagagttctgttgcctgttcatctatcgaagcaacatctgctttggtatggttatgatcgcaagaatggagtccattctctctgccctgctatttggtcaaaacatcggaaatggttgatgatgtcaatggtttgcctcaatccagtagcttgtgattacagcaagtggttttcttccattatttggtgggttgcttcaagctcatgggaaatacccaggagaaactagagtcagcttctcttgcaagaataagcaaggcaccaagttcactcctatgtttcaatggcctgataagtctctgtcatttggagttactcaagccttagcatggaaaagagctggtctcatggtgaggcccagtgtgcaagtcagcggtcaaggatgaactgtcataattgcattgtgatgtggatcaggcttaaagcaaggaatgtcccaacaaactaatttgacatttggagcagctgaacttgaaagccgagcagggaaattcagatggattttgccatttcggcaacacgaggaagacaaatccttttgactgttctctgaatgaactgtcacagtggataagcctttctgtactcagtcgtctgtaaatgtaaaagagctgcaacaatcttctgaaacatcattgaacctgtgttaatttgatttaatgatgacccaaactcctcttcaccttgttttgtactctctttgtcctataaaaaactaaactagtact

SEQ ID NO: 18587 - DNA, 2019 bp, Oryza sativa
  ref <308>: DATABASE ACCESSION NUMBER: AK068976
  ref <309>: DATABASE ENTRY DATE: 2001-12-06
gtgaacacaaatcacttgcaaaaccaacacaaacacaacacaagcaacacacacaagcttctccttccaaaatactcctcaactagctaagtctaagcttcatcgatccaagcaagctaagccatggtgctccaacacagtgatcgcatggacagcctcttctccccacagacgagctgggtgagcggcccgatcatcgtgggcgccgggccgtcggggctcgccgtggcggcgagcctgcgggagcagggcgtgccgttcaccatgctggagcgcgccgactgcatcgcgtcgctgtggcagaagcgcacctacgaccgcctcaagctccacctccccaagcagttctgcgagctcccgcgcatggcgttcccggcgcactacccggagtacccgacgcgccgccagttcatcgactacctcgaggactacgccgccgcgttcgacatcaacccgctcttcggccacaccgtgctctccgcgcgctacgacgagacgtccggcctgtggcgcgtgcgcgcctcctcgtccgccggcgccgagatggagtacattggcagctggctcgtcgtcgccaccggcgagaacgccgagagcgtcgtcccggacatccccgggatcgatgggttcggcggcgaggtggtgcacgtcgccgactacaagtccggcgaggcgtaccgcggcaagagggtgctcgtcgtcgggtgcggcaactccggtatggaggtgtcgctggacctgtgcgaccacggcgcacgcccggcgatggtggtgcgcgacgccgtccacgtcctcccccgggaggtgctcggcaagtccacgttcgagctcgccgtgctgctcatggcgtggctcccgctctggctcgtcgacaagatcctcgtcctcctcgcctggctcgtcctcggcaacctcgccaagctcggcatccgccgccccgccaccggcccgctcgagctcaagaacaccaccggccgcaccccggtgctcgactacggcgccctcgccaggatccgctccggcgagatcaccgtcgtccccggcgtcgcccgcttcggcaggggcttcgccgagctcgccgacggccgcgtcatcgccctcgacgccgtcgtcctcgccaccggctaccgcagcaatgtgccccaatggctccagggaaatgacttcttcaacaaggacgggtacccaaagacggcgttccccaacggatggaagggtgagtcggggctgtacgccgtcggcttcacccggcgcggcctctccggcgcctccgccgacgccatgcgcgccgccaaggaccttgccagggtgtggaaggaggcgacgaagccaaccaagaagagcacggcgtgccaccggaggtgcatctccgtcatcttctaagccgccgccggccaccgttgctactgctactcgatccatcaatccccttggttaaattcgttgttgattaagattggttctttctttctttcttgaagaattaaattaaattaagctaggagagtgtgatcatactacgttgctaggttagtgatattgtaggacacagcagtgagagtgggagagtataaaaaaaaataaggttaattatttgagagttgaaaaaaaaagaaagaaaaagagagacaaggtggagccctctcgtcagtgggaagtgagagccctaggggatttttactgcagctagaggcgtctggtgtacagaagaagtgagcttgccagttgatggaagatgaggctcttgtcattgacctattgtttcttttgttctatatatgtatgtataatcttatataatatcccctactagtagtatgtagtggccttaattaatctgatgatgatgattagtagtagtagtagtagtaagcacctcttagtttagttgttactgcctctccagtgacagttcttttgtaatctttgcaatcaccttttgtaactccctttgtataacaactctttacttgagagttgagagtgaatatatatataactagtgtaatgttttgcttg

SEQ ID NO: 18588 - DNA, 1732 bp, Oryza sativa
  ref <308>: DATABASE ACCESSION NUMBER: AK068977
  ref <309>: DATABASE ENTRY DATE: 2001-12-06
ggcttcctccttctcgcgcgatgaacttgcgctgaccatgctggactcgcgctcctcctcgccccgattctcctcgccccgcctcagtccaacggtgctccagccgatgctcctcctcctccaccctattcctcctcgcattccccgttcgcgccgccggagggtcgtccccttccgccgacgccgccatactccaccgatgccctcgctggaaccgatttcttccccttccgccggcaccgcaatccacatcacaggttcacaggtcctcgccggaaccgatttcttccccttccgccgtgccaccgtcgccgcaatccacttcacaggttcatcttgcgccgattggttcccgtcagatttgagtaggaactaaaggaaccatcactattcccctgaaccctaagttgatcctgtgcagcccctgtcaatggatttgtatcctttctttcttctgaacttttcagatcactggaggctctaaattttgcttgtaatacagatgattagcactactcactgtgaagccatcctactgttcttgttcgtagttactgaaaaatatataaagccatcctactgttctataggagaatctaaacccagtggcaacatcacatgcaaaacacctccatatgaaattaatccttctttttcttcctatttccttgcagatcttcaaatttgtggttccccgagtatatatatgcccaggttgtatgcttgaaggttgtaactcctagcgatggacggcattcctaaattaactgcaaatgaattaagaagacaaagagaccgagagcggtacgcggcactcagcgttgaggagaaggcagcacgagttcaaaagaaccgtgaaaataggaagaggaagaagtctgcatctacatcgggcacaggtgtgcttggcgatattaaaaatttgagtttgcataatggaagccaaactgtagattgtcagccatcatttcaacctgtgccttcctccacacccgtgtcttcctgcacacctgtttgcagaaaccgacaaacctaaggaagtactttttgcggcacacttgccgtatactgctgcatgcagctcaggcaatgtcacagttatcatgcaggctcccaatgaagtgctttccaagtaccactgaaatggtgaaattggtgtagttatcatgcatgctcccaatgaggcttgccccagtctctctcgcggcaatggtctgcgtgtgctacaatctgcatccctccacgcctgagtaatcccctccgttcccatgttgaccgacgcggccgccgctgtctcctccaaagcagcagcggtcctagccgaattggccatccccattgccaaacaccatcactggcgccggcagcctcaatccgcgtcgagtttttgtctccaccagcatagtggtctctacacatgaggcctcgagtgacaaatcagagcagcaatcatgctttgttgtggcttttatctctgccgatctcacggcaatctatcgacatgcacatttgtattttgtagttggataaaaaaaaagtagcaatagttgccatctttttctctaggaaaaactgatttgtttatatgctttctcagtttatgtcagagaaaatggttagttgagcttgtctcctatactgaatgtgcttggggttaactgggctttcagtcagtaagcatggtaacagactcttcattgagttaagtagtccaataattattttttaaagc

SEQ ID NO: 18589 - DNA, 1598 bp, Oryza sativa
  ref <308>: DATABASE ACCESSION NUMBER: AK068978
  ref <309>: DATABASE ENTRY DATE: 2001-12-06
gggagtcagattgcgcgcgccgtcctcccccaccgccatggcgccgccgtcacggcatgtggacgcggtcgccgccgttctccctgtcctcctcacgatccttctgccttccgccgccgcaatcggcgtcaactacggcaccaagggagacaacctgccgccgccggccaccgtggcgaagttcctcgcgaaccgcacccgcatcgaccgggtgaagctgttcgacaccaacccggacatcgtcaaggccttcgccggcacgggcatcacggtcatggtcaccgccggaaacggcgacatcccgacgctgggcaccaaggacggcgccgccgcctgggtggcggcgaacatcgcgccgtactacccggcgacggacatctccctcgtggccgtcggcaacgagatcatcaacacggcggacaacgccctcatcggcggcctcgtcccggccatgcgcaccctcagggcggcgctcgtcgccgccggcttccggcgcatccgcgtctcgacgccgcactccctcggcatcctgtccgtctcctcgccaccgtcggcgagccggttcctcgacgtcctcgaccgcaccttcttcgcgccgatgctggagttcctccgcaagaccaagtctccgttcgtcgtcaacccgtacccctacttcggctacaacggcgacacgatcccgtacgcgctggcgcggcgccccaaccccggcgtgctcgacccgggcacgggcatcacctacaccagcatgctcgaggcgcagctggactcggtgttctcggcgatgaagaagctggggttcgaggacgtggacatcacggtgggggagaccgggtggccgaccaaggcggagcccggacaagccggcgtgagcgtcgccgaggcggcggagtacaaccgctacctcatcggagaggccagctcggggtcggggacgccgctcatgccgaagcggacgttcgagacctacatcttcgcgctcttcaacgagaacctcaagccgggtcccatcgccgagcgcaacttcggcctcttcaagcccgacctcacgcccatgtacgacgtcggcctcatgaaagacacggggaagtcatcagcgtcggcgccggcgccggcgaagggcggcaatgccagcggcgccgccgtgacgaagcgtgactcggagtcggaggccgccgcgccggctgatgaggcgagtgcgcccgcgccgtcgtcggtggggaagaaggtctccacgaaggccaccgcgccggcaccgtcggacgacggctcggcctcgccggagccatcggagggcgaatcggccgacgagaagaatccggaggaggaggaggaggaagagggggatgatgccgccgcgacgacgacgccggggggcgacggcgactcgccggagacggaagccgcgggtgatgatgctaaagagagcgagggaaaaaacaacccccatggccatggagattcttcagaagctatcagtgttatgttctctgtaccttccatgcttacaattgctctgtctgcaatacttcttcatctctaacttctcctcaactcatggtgtaacaatagtgcaaatactaacattggtttttgcc

SEQ ID NO: 18590 - DNA, 2175 bp, Oryza sativa
  ref <308>: DATABASE ACCESSION NUMBER: AK068979
  ref <309>: DATABASE ENTRY DATE: 2001-12-06
gctcagcccattccagctcctttcttcgattcttccccttccccctccccaaacggcggctggcgattcgcgacgcgggggcgaggcgggcagcaggcggcggcggcagggcagtgcgctgtgcgctgacgcgccgacgccagcctcgtggtgctcgcggccgccgtggcggtggcggcggcgttgttcttgtccctggactcccggtcccggagcgacgacgtgctgatcaccgtggactccagcggcgcggttgggccggagagcgtggcgttcgacggcgacggcgacggcgacggcccgtacacgggcgtgtcggacgggagggtgctcaagtggtttcccctggagcgccgatgggtcgagcactcatccgccgtcatcgagccacaacagtctgaaatatgaaaagaaagaaggtcctgctattgatttgaagtgtttattttgaaacagttgccgcaaagaaaaagactcaaaatgaaactcgggatcaggccaatctggatccttcttccaatgatatgttgaacaagcatcggaaagttgtcctctacattttattgtcaggcccgaaactatgaagaagccctgttgctttttcatagcatgaagagatcaagagttgttcctgatcaagtgattattgctactgtcctttcaacttgtgctcatacaagaaacttgagatttggaaaggctatccactcatacatgttggtgtcagatactcttattgatgctcaagtcagctgtgctctcatgaacatgtatgctagttgtgcagacatggaaatggctgaaaagctgtacaatagggtgtcagaaaaggaaattgtattatcaaccaccatggtgtatggatacgccaagaatggaaaagttgagattgctcactccatattcaatggaatgccagcgaaggacgtggtatcttggagtgctatgatagcaggatatgctgaaagcagcaaacctatggaagcgctgaatttgttccatgatatgcaacggagtggtgtcaaacctgatgaaattaccatgctgagtgtaatatctgcatgtgctaatgttggtgcccttgaaaaagctagatgtatccattccttcgtggagaatcatagcatgtgtaagatattacccatcggaaatgctcttattgatatgttctccaaatgtgggagtttaactcttgccttggatgtcttcaatgcaatgcctcaaaagaatgttgtcacctggacaagcataattactgcatctgctatgcatggtgatggaagatccgccttaaccctttttgagaacatgaaaagtgaagggattcaacccaatggagtgacatttcttgggttgctctatgcttgctgtcatgctggtttagttgaagaaggccgtttattgttcaaaattatggtccagcaatacaggattgagcccatgcatgagcactacggttgtatggtggatcttttgggaagagcaaaacttcttggacaagctgctgacctgatacagtccatgcacttaagaccaaatgtggtcatttggggatctttgttagcagcatgccggatgcatggtgatcttgagctcggcacgtttgctgcaaagaaaattttggagttggaccctaatcatggtggagcacaagtgctcttatcaaatatatatgcagaatatggaaactggaatgatgttaaggaggtaaggggagtaatggaagtccaggggacgtggaagaagaaaggttgcagttggatggagctgaatggcagtgttcatcagtttgcagttggaggtgaaaaaattttggaaatgaaaggatccttctgaagcttgatgagataactgcaaaataaaggtgtgtggctatgctccgaaggttaacaatgcttctgttgatttgtgcaaggaaaatatcagagaagctgtctggtgtctactgttcattgggaagcttgcccctttcatttaggatggtcagttgagagagttttgcttgaacattgtatagaatagaagggagtttttgagggctgagattcttccgtgaagtctgtggaatttttagttgtatattattcttccgttaagttttcttgtttatggatattatagttgtgtattattcttcttgttttatgcaatttatatgtaaaattttgattggag

SEQ ID NO: 18591 - DNA, 952 bp, Oryza sativa
  ref <308>: DATABASE ACCESSION NUMBER: AK068980
  ref <309>: DATABASE ENTRY DATE: 2001-12-06
gaatctgtggtcacgccctctggaagccgagagcccgagaaggcggagaccccgggagcagaggggagagcagcgcagccgccatggaccgcgtgcagctcgtgctcctcggcctccccatcctcctcttctgctccgacctcgtcacgctcttcgggccggagcagctgcccaccccgcagcccgacctgccgccccaccccagccccgacgcggcctccgacgccgtccagcccgacgacatcgccgccgatgccgccgcttccgcgcagattgctgagccgcaggtggatgggcctgcctccggcaccaccgtcgagttgaagttctgcgcctcctgctcttataggggaaatgcagtcaccgtgaagaagatgctggaaacctcatttcctggtttggaatggttccacctccatggtactactcgctccgtgctaatagatttggaacaatggcaacaatctggctgtttggcaatttcgcccagtcatttctacaaagttctggtgtctttgaagtttactgcaatggacaattggttttctcaaaattatccgaacagagatttcccagcgagtttgagctacgggagctcattggcaacaggttaccagattctcaattcgggaaaaatctggaaaaggtttggtcatagatgttgatgtcaagagagcccacttcatttacctgctatttaattgatagaaccgcttgaaagtttacgcctaattgtcaatcacatgctatttgtcttcttcttttgtgaaggcaggtacttttctttttgttgtaaataatgttttaccctcgcaaagaaagtgaaggagttctgtggctatgttagtttgttagaactgtcatatttactcaaagaggatgtgaaccataacgccccttctcgagtattcctaattaattatcagaaataattactctgactttggattgg

SEQ ID NO: 18592 - DNA, 2228 bp, Oryza sativa
  ref <308>: DATABASE ACCESSION NUMBER: AK068981
  ref <309>: DATABASE ENTRY DATE: 2001-12-06
gccctgcgcccgcgccgatctccatctcgcgagcacagcagccgcgccgtcgtcctcgttaactgtctgaaatggacttctttaccgagtatggtgaggggaacaggtataagatagaagaggtcataggaaaagggagttacggtgtagtatgctccgcgctggatactcatactggtgagaaagttgctatcaagaagattaatgacatttttgaacatgtgtctgatgctactcggatacttcgtgaaatcaagttgctccggctactgcgacacccagatatcgtggaaataaaacatattttgcttcctccgtcgaggagagaattcaaggacatttatgttgtttttgaactcatggagtctgatttgcaccaagttataaaggccaacgacgacttgactccagaacactaccagtttttcctctatcagttgcttcgaggattgaagtacatacatacagcaaatgtgtttcaccgagatcttaaaccaaaaaatattttggcaaatgctgattgtaagctcaaaatatgtgattttggccttgcaagagttgctttcagtgatacaccaactgccatcttttggacggattatgttgcaacaaggtggtatcgtgcacctgaactttgtggatcttttttctctaagtacacaccagcaatagatatatggagcatcggttgcatatttgcagaacttttaacaggaaaacctcttttccccgggaaaaatgtggtgcatcaacttgatataattacagatcttttggggacaccttctacagaagcaatatctaggattcgaaatgagaaggccaggcgatatttgagcagtatgagacgcaaaaagcctataccatttactcagaagttcccaaatgcagatccacttgcattacgtttgttggagagaatgctatcttttgagcccaaagataggccaaatgctgaagaggctcttgccgatccttatttcagaaacatagcaaatgtagatagagaaccttcagcacagcctgtgacaaagctggaatttgagtttgaaaggaggaggattacaaaggaagatataagggaactcatctatagagatattctggagtatcatccaaatatgttgagggaataccttgaagggactgagtcagctggtttcatgtaccctagtgcggtagatcattttaaaaagcagtttgcatatcttgaagaacattatgctaagggatcaacagcagctccacctgagaggcaacataactctttaccaagaccttctgtgttatattcggatgaccgtccacaaaacacagccaacatcgccgaggatctttcaaaatgtgtacttggagataatacacaaaaaatgcatcaaggttctgcttctgtttgtgcgaatagagttcctcaaggtggtgctgcaagacctggtaaagttgttggttctgcgcttcgatatggtaactgctcaacatctactgctgagcaatatgagcatcgacgaaccgatagaaacccagcattggctactaacactgtttctccccgaggctcttacccctgaagaaatccatcctgcaagactgaaacaggtgattctgaaaggatcgatgtgaaccaagctgggcaaccaaagccatacataccaaacaaactacctgctactgttgatggccggagcgcccactggtaggcaacaaggtatgtgtgcgcaaatgaaacagcaaatcctttgccttaccaaggttccgaggcatcggcgcggattaccatttctaagttgttacatgctgacacattcaaagatactattctgtacagagttgtattaattacagatcttggtatgctctagaagactgaagactaaagtactatagaaatatatttcatatcctgcgtgataggctgctagtttccgttctttttggatcggttgcaaaaatacccacagcagaagcttacacggtatctactacagttcatggtatacgcatagattacaacttctgacttgactctgtagttcatcactttgttcttaaagctggtgacttcacatcgtctgattgttgattaaacgtggaagttttgaagccctggagtatcttggaatgcttctagtaagctgtcattcaaatgtaatatttaactatatcattttgtagacttttcaacactattagctgggaagattatgttaatttgagatgcttttctctcc

SEQ ID NO: 18593 - DNA, 1454 bp, Oryza sativa
  ref <308>: DATABASE ACCESSION NUMBER: AK068982
  ref <309>: DATABASE ENTRY DATE: 2001-12-06
aagagcatcagcatgagccctcagagaagaagtgcgagaagaagtaaaagcaggagcccactccgagagaagagcgtcagtatgagccctcgtagaagcatgagcaagagtctccctagaagtgtaagcagaagccctgttgctcgcaggagcaggagtcctgttaaagctcgaactagaagcatcagcaggagctcagctaggtctttgcagcgcaggagtcgaagtaggagtctggaaagatctcctgtacgtaaaagtgtcagccgaagccctccaactatggacaagggaagaagcattagccgaacctctggaagattaccattgcgaaggagtattagccggagcccagataggccttataggaggattccaagcagaagtcctcgaaagaacactcgaagaagcatcagcagaagcccagttagactatctaaaaggagtatcagccctgtaagaggtggtcggtctcgcaggagtgtcagcagaagtgccagcccacctcgcagggcaatatcacctgcacaaaatcatggtaggagcccatccaggagtccctctcctgatgggtcaaagcgggtaagaagggggcggggttttactcatcgttactcatttgcaagacaataccgctcaccttctcctgatcattcattccgttatggtggaagaggtgatcgtgacagacacatgagttatcgaggctcccgtcagcgatcgcctcctagacggtatagaagcagcccacttagaggacgagcatcaccaaggcctaacaggtacaggaggaggagccgaagcatctcacgaagtcctgtttatcgagacagaggaaggggaggtggacgcagcaggagtcctgtgcgcagccgctctcctgctggtgggaaactaaggtcgcatggtgatcgctcgcgttcaatgtcaaggagcaggagcctgtctgggtcaagatcaaggtctccaccaccaatacacaatcgctccccacttgcttccctgtccccaaagcgagagagtaatgcaaagtcccggtcaccctctgccagttctgaagggaagaaaggtttggtttcgtatggagatggttcccctgattctgctgggaagtaggaatccatgaatgcatgtacaagctttggccgttgctcaacccatctgcattgcagtattgggaagctttggccgttgctcaacccatctgcattgcagtattgggtttgaaatgctacggttagagaagctattttgaggtgctgcagaagctgtttttgtcatcttagagatgttatatatttatggatggttgtgagttggttgaatcttgtctagacgatcataagccgaggttagctaatggtttcttaaacttgcaacacagtttttctggctgtaattcttgtgcgccgtggcagttaatgagttaaaacctatcgaggtacttttgttgg

SEQ ID NO: 18594 - DNA, 1250 bp, Oryza sativa
  ref <308>: DATABASE ACCESSION NUMBER: AK068983
  ref <309>: DATABASE ENTRY DATE: 2001-12-06
gatttcccccacgcctacccacccctccctccctcccgacgacgtccaccctaccaaccccggattccattgcgcgcgagcgtgcgagctatggagttcaacaaggtggtctccagctacagggccgcctcgcccgcgcccgtggggatggcccgcgggggaggagggccggccagccgcgtggagttcgtcccgtcgtcgcggcgggcgcggctcgcggccaccaacaactccgtcacccccgtgaccaaggaggagaaacagaggatagatcaaagtgaaatactgaccttggacaacattagaacctccttggttaggcaagaagacagcatcatattcagcctcttagagagagcacagttttgctacaatgctgatatatatgataaaaatgctttccatgtggatggatttgatggctctttggttgaattcatggttagagaaaccgaaaaactacatcaacaggttgggagatacaagagccctgatgagcacccattctttccggaggatctgcctgaaccactgttgccacctctccagtatccaaaggttttgcatcctattgctgattctattaatatcaacaaggagatttggaaaatgtattttgatgagcttcttccaagattagtgaaagaaggaagtgatggtaattatggatccagtgctctttgtgacacgatctgcttgcaggcgctctccaaaagaattcactatggtaagtttgtggcagaggctaagtttcaagagtctcctgaagcttacatgcctgcgataatagcacaggactgcgatcaactaatgcacctcctcacctatgaaacggtggagcgtgctattgaacatagggtggaagctaaggctaagatctttggacaggaggtggatttaggcgctgaagacaacggcgctccaccaatgtacaagataaggcccagtttggtggctgaactgtacagctacaggatcatgccgctaaccaaggaggttcaagtagcctacttgctgaggagattggattgattgtttacgattgtaaactgccagcttcggtttcctggcatcaaagaataaattaggggaaagacaaccataggtatccattttgggacaactgaaagaaaatattttattcgggtttacactatattttgtggcaagaacaagcagaagcaggatatcacatgaaatgatatggagatgttgcatataatataatagatttataccatcttttttgc

SEQ ID NO: 18595 - DNA, 877 bp, Oryza sativa
  ref <308>: DATABASE ACCESSION NUMBER: AK099081
  ref <309>: DATABASE ENTRY DATE: 2002-08-28
gatccagaatcagatccacaaggcagcagctgcagcagcatcgaccatggcgatggcgcgatccatcctcctcctcctcctcctcgccgccgccgcctccgcctccgccgacgcgcccttcctcgtcgcgcacaagaaggtttcgctctcccgccccaagcctggcgtcgagcgcctcgccgtctccctcgacctctacaaccagggatccgcaactgcctatgatgtgagcattaatgatgatacttggccaaaggaggcatttgagcttgtctctggagagatgtcaaagacattggaaaggcttgaccctggtgtcactgcttcgcatgcatttgtcttggagaccaaagtacagggcaggtttcaaggttcacctgcggttattacctatcgtgttcccacaaaggctgcgcttcaggaggcctattcaacccccatccttgcacttgatgttcttgctgagaggcctccagaaaagaagtttgaatgggctaagaggcttgtggcgaagtacgggtcgctggtgtccgttgttggcttggttggagtgtttatctacctggttgcaagcccgtcaaaatccagcggtgcaaaagcaagcaagaagaggcgttgatatacttgcctaccatatataaggcagtgtttgttcttttttattaaaaagaggaagagatggtggcaggttttttagattgatagcgcgagagctttaaggctgccgcatccttgaactgtatgaattttctctgtttgtgtttttggaagttgaaaacctaacccagagaattggagagtagattttgtaacagatgaaatctcaatgcatcattttgaagttgcctgatacagatacctattcattgcatttggc

SEQ ID NO: 18596 - DNA, 1798 bp, Oryza sativa
  ref <308>: DATABASE ACCESSION NUMBER: AK068984
  ref <309>: DATABASE ENTRY DATE: 2001-12-06
gaggtggttccttgctctgcgtcttccttcaaaccgtatcctctctctaatctctctcccagccataaaccctagatcctcttctcccgcagtgcaacggctactacgcaccgacctccgcgcgcgtctgccgccgcgactgcttcggctttttgttcctcactaccgccgccgccgagaggaagtcactacaacaatgttcgatcgtgaggagaaatgtctggtttaggatctcttgactatcatcgaatcaggaagggcggtgtgctaagatctcaaacatacagcatcctgatggtaaaagatgggaaaggattagcatcataacagaaaccgtgaaaattactccaaaagctgttgtactgggaactcaccaagtgaccatatatcagatttgtaaccataaggtttaagccataccgtcgatgcaaggtcctccatgagcaattttgctagcccaaaatcagctgttttcaagaaacaatgaatattcagcacaggagccaagggcatgttaggtgatgctgatacctgatgaatcgacttgtgtggatagggacaatgttcatttaccttgaggtcacggtggagcacacggttgcagtgcagatagtcaagggccaagagcaattgtgtgaaccatcggcacaccctctttgatcatacaagtaccaaatcagcgagaaaaggacaccccttgccttcttgatcctctctgccctgtgattccgatgtcagtgactttggaggttggagcaccaatggaagtaacttgtcacaatgcatgccgaggtcccctgcaaccatcatcgaagaagagaaaaaaggacaaaactttagaacccttgattcgaaggaatgcaaattactcccagaactgaattaatgcgtggaatttgtacttcatcaacccaaccgtccttgtactcgacgatgtacgggttgctgaggctcgccatcagggacatctgtgcagcaaacagcaagcaaagcatcaaaatcaaatcatcaaaccaaaccatctgtcccgtcctcccaaacattcaatcagggttttgcagacgcaacagcaaacaactcatgggtgcaacatgtttgctcaagtgtggggaatgaacaagaactaacgagggtttcgatctggtttacctcctggtacgccgtgcgctggaacttgtcgttctgcttggacagccggatcttcttcatcacgtacctgcaccatcatcgagccaagaaagaacagaagcatcagggaagcctgaagaagacgaaggaagaagaggaaaggggagcagaggaaggaggagaacctcttgcgctcgcccttgtggacgacgagtatgcggagccgtaggcgccccggccgatctgctccaccacctcgtactgctccatggctctggctctggctctggctctgctcccaggcctggaggactcaactgtccatgccgctacctctacctagaaacaaacagggtttgatttctcgtctggtagctggtggccatggctcgaggttatccaccgatgattatgcatgccctactcccactggtacgtgtttgttggtgagccaatcaaatcactcatgactaatcaaacaattcgacaaaccaccttgttgttatgcccttaattatccttccttcctcgttacaccaccacatctgcccaaataattctgccaaacagtactactagctagctaggtatggcttttgataggatttgggttaaaaagaatatcaaggaaatatttttttcctggaaaatttgattggagaagtacact

SEQ ID NO: 18597 - DNA, 2055 bp, Oryza sativa
  ref <308>: DATABASE ACCESSION NUMBER: AK068985
  ref <309>: DATABASE ENTRY DATE: 2001-12-06
gttattaacaaacgcttcgcctgcccccaattcctctctcttcctctcatcagtcaagagcggaagagctcgacacatctctccgatccccatttcgccttctgctccggtgagctccgatctgactgcgcgtggggggaatcgatggggtccatggcggcggcggcggaggcggcgcaggaggaggagacggtggtgttccggtccaagctccccgacatcgagatccccagccacctcaccctgcaggcctactgcttcgagaagcttccggaggtggccgcccgcccctgcctcatcgacgggcagaccggggcggtgtacagctacggcgaggtggaggagctctcccggcgcgcggcggcggggctgcggcggctcggggtggggaagggcgacgtggtgatgagcctcctccgcaactgccccgagttcgccttcaccttcctcggcgccgccaggctgggcgcggccaccaccaccgccaacccgttctacaccccgcacgagatccaccgccaggcgtcggcggcgggcgccagggtgatcgtgaccgaggcgtgcgcggtggagaaggtgcgcgggttcgccgccgaccgcggcatccccgtggtcgccgtcgacggggacttcgacggctgcgtcgggttcggggaggcgatgctggacgcgtccatcgagccgctcgacgccgacgaggaggtccaccccgacgacgtcgtcgccctcccttactcctccggcaccaccggcttgcccaagggcgtcatgctcacccaccgcagcctcgtcaccagcgtcgcgcagcaggtggacggggagaacccgaacctgtacttcaggagggaggacgtggtgctgtgcttgctgccgctgttccacatctactcgctcaactccgtgctgctggcggggctgcgagccgggtcggcgatcgtgatcatgcgcaagttcgacctgggcgcgctggtggacctgacgcggaggcacggcgtcaccgtcgcgccgttcgtgccgcccatcgtggtggagatcgccaagagcccccgcgtcaccgccgacgacctcgcctccatccgcatggttatgtccggcgccgcccccatggggaaggacctccaggacgccttcatggccaagatccccaacgccgtcctgggacaggggtatgggatgactgaggctggacctgtgctggccatgtgtctggccttcgcaaaggagccattcgaggtcaagtccggctcgtgcgggacagtcgtcagaaacgcggagctgaagatcgttgaccctgacaccggcgccacccttggccggaaccagtccggggagatttgcatccggggagaacaaatcatgaaaggttatctgaatgacccggagtccacgaagaacaccatcgacaagggcggttggctgcacacaggagacattggttatgttgacgacgacgacgagattttcattgttgaccggctcaaggaaataataaaatacaaggggttccaagtacctcctgcggaacttgaagctcttctcatcacacaccctgatatcaaggatgctgccgttgtaccgatgatagacgaaattgcgggtgaagtgccggttgcattcattgtacggattgaaggatctgcaatcagcgagaatgagatcaagcaatttgtggcaaaggaggttgttttctacaagaggctcaacaaagttttcttcgcggattcaattccgaagagtccttctggcaagattctcaggaaggacctcagagcaaagcttgcagccggcatccctaccaatgataatacacagttgaaaagctaaatctgataatattttttcctctttatacaccagtttcaaaaatcatgtaatattctttatgaaatggcagaaatacgtatagaagggccatatggttcaattcttttagatggctaagttatactttgtttgtatgcccgttatgtgtaccgtgtcatgtatagataccttttttttttctttttgaattttgacaacaaggctgattataatgtataccacgtttcaatt

SEQ ID NO: 18598 - DNA, 1082 bp, Oryza sativa
  ref <308>: DATABASE ACCESSION NUMBER: AK068986
  ref <309>: DATABASE ENTRY DATE: 2001-12-06
gcgcaccacacaggcagccacacacacaccactccatttctgagctcttctagtttgagtgagagagcagcagaagggagtagtgcaagatgccgatccgcaacatcgccgtggggagccaccaggaggtgtaccacccgggtgcactcaaggcggcgttggccgagttcatctccaccctcatcttcgtcttcgccggccagggctccggcatggccttcagcaagctgaccggcggcggagcgacgacccccgccgggctgatcgcggcggcggtggcccacgccttcgccctgttcgtggcggtgtccgtcggcgccaacatctccggcggccacgtgaacccggccgtgaccttcggcgccttcgtcggcggcaacatcaccctgttccgcggcctcctctactggatcgcccagctcctgggctccaccgtggcgtgcttcctcctccgcttctccaccggcgggctcgccaccggcaccttcggcctgaccggcgtctccgtgtgggaggccctggtgctggagatcgtcatgaccttcggcctcgtctacaccgtgtacgccaccgccgttgaccccaagaagggcagcctcggcaccatcgcccccatcgccatcggcttcatcgtcggcgcgaacatcctcgtcggcggcgcgttcgacggcgcctccatgaacccggccgtctccttcggcccggccctcgtcagctggtcctgggagtcccagtgggtgtactgggttggcccactcatcggcggtggcctcgccggcgtcatctacgaggtcctcttcatctcccacacccacgagcagctccccaccaccgactactaagctcatcgccgccgccgccgcttgtccatgatcgcctcgtctccgactccgatccaaccgtttagtttctcgcatcagtgcatcatcaaacctgtttcatttgcttggatcagttgtacgttgaacgtactgtaagtgtggacctttgggaacccgttgctttgcttctgtaaaactgtgcatgcatttgcctgagttcattcgttttttcctagtcaaattcgatcgctattcgcaacc

SEQ ID NO: 18599 - DNA, 2081 bp, Oryza sativa
  ref <308>: DATABASE ACCESSION NUMBER: AK068987
  ref <309>: DATABASE ENTRY DATE: 2001-12-06
gggtggctcctgattcgtttcctccgtctcactcctactcctcggctgcccccattcttctctggatatttttctttttcatcttctttgagttggagggcttgattttaggggggactgctcgatcggcagggttaattccgatctctttaaccttcccggatcagagccgggatcagtattaggctttttgctagaagcacaaaacaaaaggaatgctggaagatgtgcttctatgatagagagctaccttgtgtgggaattggaaaggtagctcaaaatatttatgctttgtgtgctcttgatgatagtgaagtacgggtttatgcacagcaagtgctccttgtgcatttgcacgatggggctagatgtggcagttcaaccatcatgttagattaccatcttgttggggacggttgaaattatttttcatttattgcctctctcatctgatactccctcatcaatcatcatcactaagttacatgattagtgctttctgaatacataaggcatttgataagatggtagaacaaaaggggaatattttgatgaagagatatgagataggaaaattacttgggcaaggaagtttcgctaaagtttaccatggccgtaatattaagaattcacaaagtgttgcaatcaaggtgattgacaaagaaaagatattgaaatgtgagcttatggatcaaataagaagagagatttcagtgatgaacctagtaagacatccgtgcattgttcaattgtatgaggtgatggctaccaaaactaagatatattttatcctagagtatgtgaaagggggagagttattcaacaaggttcgacgtggaagactaaaggaagaagttgcacggaagtactttcagcagttaattagtgctattgacttttgtcatagcagaggggtttatcatcgtgatctaaagccagaaaaccttcttcttgatgaaaatcgaaatttgaaaatctcagactttggtttgagtgcacttgcagaatgtaagagacaagatgggttgctccacacaacttgtggaactcctgcatatgttgctccagaagtgattaacagaaaaggatatgatggtgcaaaggctgacgtatgggcttgtggagtgattctttatgtactattggctggttatctcccatttcaagataaaaatgtgataaacatgtataagaagatatgcaaagcggaattcaaatggccaagttggttttcttctgatatccgaaagcttttgcgacgtattcttgatccaaaccctgcgacacggatctcagtttcagaaattatggaagatccttggtttagagtaggtcttaattcagatctacttaacaagaccataccaacagataaagttgataaagttatgcatgttgacatggattcaacatttggtaatttaagcaacaatataaatgaaggaaaacaagaagcagaaaatcttactagcttgaatgcttttgatattatttctctttcatcaggatttgatctttctgctatgtttgaagatgaaaacagcaaagaggaatcaaaatttacatccactaacacagctacgacaatcaccaaaaagcttgaggatgttgcgaagaatttacgattaaaattcttgaagaaaaatggtggtttgttaaagatggaaggatcaaaacctggaaggaaaggtgtaatgtccatcaatgctgaaatatttcagatcacaccagattttcatttagtggaatttacgaagataaatggtgatacacttgagtatcaaaaggtcaaacaagagatgagaccagcactaaaggatattgtatgggcttggcaaggtgagcagccacaaccacaatcattgaacgaacagtcttaatgttaaatattttgacaagtgaaatgacagtagagattgtggcaatgtgttgatgtgttgtatgtgctattagtaatcaataatgtacttttctaaaaaagtttgtcatttgatttttcattatcatgtgttcagtatgaaacgataattgtattgaccatttaattgaaaacatgttttattcactttgccatgtgttct

SEQ ID NO: 18600 - DNA, 1140 bp, Oryza sativa
  ref <308>: DATABASE ACCESSION NUMBER: AK068988
  ref <309>: DATABASE ENTRY DATE: 2001-12-06
ggtcgtcttggtcacttggtctccatctcctcttcttcttccacctcctcatgcccatggcggcttcccattgatcccttcaacaccgctctattttaccatccaattagcaattagcgctagttgagtatcatctccactatttattctaatccagtgtaatcatcctcctttcttctcccaaaaacaataccaaagaaatccaagcaccgccgcctctctctgctctacccccatctcaccaccaagctcccccctccattttgatactaaaaattcagcaactcgccagggagagcagggtcgatccaagaatcgattgctgttcggttcttggattggagagacgggacgggagaagaagaagaagaagaaagaaaagattgcagtcttttgtgttgttgaggtagaaggagaagaggaggaggtgggggaaagatgtcgcgaggaggagggagctacggggaggtggggcagaagatcgactacgtgttcaaggtggtgctgatcggcgactccgcggtggggaagtcgcagctgctggcgcggttcgcccgcaacgagttaagaggccatgctgacaagaacattgttattatgcttatcggtaacaaatctgatctaggcacgcttcgggttgtaccgactgaggatgcaaaggaatttgctgagcgtgagaatctcttcttcatggagacctctgctcttgagtctaccaatgttgaaaatgctttcatgaccgtacttacggagatttaccgtattgtcagcaagaaaaaccttgttgcaaatgaggaggttgattctagcggaaactcgagcttactgaaaggtacaaaaattgttgtcccaggtcaggagccagcccctccaaccaaagcatcatgttgtatgtcctaggcatagcattgtactgtgttgtttcggagtttactcctgccatatcaacactgaatagctgggattcctgtgagtaaagatgaaaaggtctacatgtggacagttaactcacatatgttgtaattttatgaatcactcttttttgtatctgattgtgtgatggtgtgtgtagtcatttagagcattctcagatataattggcccaatcttatctgtttgctatatcattcttatccaagc

SEQ ID NO: 18601 - DNA, 1400 bp, Oryza sativa
  ref <308>: DATABASE ACCESSION NUMBER: AK068989
  ref <309>: DATABASE ENTRY DATE: 2001-12-06
gctccgcctccgcttccgctcgcccggacccgcctgcgccggccgcacaagggatgcgctccctcacctcccgccaccggccggaaccctaaggaggcgcgtgcccacctgcggctgcctccggcttcggcgatggggcggccgggttacctgacgctgccaatcctctcggtgctcgcggccatcgggtacgtctactacaccacggtgttcgtcgccgtggcccggtggctggggctcgccacggcggccggggccgcgaacgccgcggcgatcaccgccctcgccgccgcctgcgtcgccacctacgccgtcgccgtgtgccgggacccgggccgcgtcccgccctccttcgcgcccgacgtcgaggacgccgagagccccctccacgagatcaagcgcaagggtggggacttgagatattgccagaaatgtggccactataaaccccctcgtgcacaccattgccatgcttgcaaaagatgtgttctaaaaatggaccatcactgtatatggattaataactgtgttggacatgagaactacaaaatattttttatctttgtattgtatgctgtaactgcatgcttctatgctatgattcttatcatagggagcgccatgtacagtgttcctgtagatgaacattcaagcaatgattcttctaggacatcgattatcatttgtgggatcattctatgcccgctgactttggctttgacagtgctctttggttggcatatctacctcatattacagaataaaactacaattgagtatcatgaaggtgtgagagcaatgtggttagcagaaaagggtggaaatctttatcatcatccgtatcatcttggtgtctacgagaatcttatttcagtgctgggacctaacatattctgctggctttgtccagtatcgactaatacgggaaatggcctccgtttccgtacatcacatgatattccattatctacaccatcgatgtgattaacacgagatactgttatttatttattcattagataatctgtcaaggtcttgaagctcctttatgaaatgtgctataagtgtaacgtacaggacctccccacggctccaagttaggacatgggctaggctgctcctttgttttcgtggtggttattttacatacttgatgaggcagaacatgctgcctcgcctgtaatttagtgtagtctctgattgcgtttattaggagatttgaatgtagtcaattctgttgtagatctccccggcaggaaaaaatggggggctgctgtaaatccaacatccatactttgttctcttaaagagccacttatggcagcgaaaggccacgataggaatcatctgagattgttcgcatacatgtttattaagaacagaacttatatttatttgtc

SEQ ID NO: 18602 - DNA, 1833 bp, Oryza sativa
  ref <308>: DATABASE ACCESSION NUMBER: AK068990
  ref <309>: DATABASE ENTRY DATE: 2001-12-06
gagctcaccaccagcagcagcatcagcagcaatgcagcctcccatcctcctcccgcttctcctcctcctcctcctcctcgccgccgcctcgccacggccggttctctcccgccgccacgcctcgccgccgctcgccaccgagacgctcgacgtcgccgcgtcgctgtcccgggcgcgggccgcggtatccgcggaggccgtgccgctccaccagtccgccgccgccgccgtgtccacggaggtcgtcggggaggagcacgaggaggggcgcctggccctgcggctccactcccgggacttcttgccggaggagcaggggcggcagcggcacgccagctacaggtcactcgtgctggctcgcctccgccgcgactccgcccgcgccgccgcggtgtcggcccgcgcggcgatggcggcggacggggtgagtcggttcgacctggtgccggccaacgtcacggcgttcgaggcgtcggcggcggagatacagggccccgtggtgtccggggttgggctcggcagcggcgagtacttctcccgcgtcggcgtcggcagccccgcgcggcagctgtacatggtgctcgacaccggcagcgacgtcacctgggtgcaatgccagccgtgcgccgactgctaccagcagtccgacccggtgttcgacccttccctctccacctcctacgcctccgtcgcctgcgacaacccgcgctgccacgacctcgacgccgccgcctgccgcaactccaccggcgcctgcctctacgaggtcgcgtacggcgacggctcctacaccgtcggcgacttcgccaccgagacgctcacgctcggcgactccgccccggtctccagcgtcgccataggctgcggccacgacaacgaggggctgttcgtcggcgcggcggggctgcttgccctcggcggcgggccactctccttcccgtcccagatctccgccaccaccttctcctactgcctcgtcgaccgtgactccccctcctcgtcaaccctccagttcggcgacgccgccgacgcggaggtgacggcgccgctgatccgcagcccgcggacgagcacgttctactacgtgggcctctcgggcctctccgtcggtggccagatcctctccatcccaccctcggcgttcgccatggacagcacgggcgccggcggcgtcatcgtggactccggcacggcggtgacgcggctgcagtcgtcggcgtacgcggcgctgcgcgacgcgttcgtccggggcacccagtcgctgccgcgcacctccggcgtgtcgctgttcgacacgtgctacgacctgtcggaccggacgagcgtggaggtccccgcggtgtcgctgcggttcgccggcggcggcgagctccggctgccggcgaagaactacctgatcccggtggacggcgcggggacgtactgcctggcgttcgcgccgacgaacgcggcggtgtccatcatcgggaacgtgcagcagcaggggacccgcgtcagcttcgacacggccaagtccaccgtcggcttcaccaccaacaagtgctaagtcattagcagcgatggcttaacttaattagccagatcaaggagtgattagtggtggtaaatggtaattaagcgcgagagtgtgtgatgtgggggtggggcccagtgccaggctctgtgggctttgggagagacgaaaggcgaggacaaatgccagcctgtcctgctctctgcttgtcgatggatgggggggcccactctcttcttctccggtgctttgctgtttcgtctttgatgtctcggcaaagacgaattaaaatgaatccattccaatctgttcatgtgttc

SEQ ID NO: 18603 - DNA, 803 bp, Oryza sativa
  ref <308>: DATABASE ACCESSION NUMBER: AK068991
  ref <309>: DATABASE ENTRY DATE: 2001-12-06
ttggtttcggctctcccatttgtctcgcgctcgctgtctcgcgtcagcggcggagctctctagaaggagcagaggagtcccccccaagcgatcgattcgatcccctccgccgccgatcgcctcgccgaagtctccgagaaacacttgagggatggctgaagaggatatccagcctattgtctgtgacaatggcactggaatggtcaaggccggttttgctggtgatgatgcacccagggctgtctttcctagcattgtaggcaggccacgccacactggtgtcatggttggtatgggccagaaggatgcctatgtgggtgatgaagctcagtcgaaaagaggtatactgacattgaaatacccaatcgagcatggtattgtcaacaactgggatgacatggagaagatatggcaccacaccttctacaatgagctccgtgtggctcctgaagagcatcctgtattgctgaccgaggctcctatgaaccccaaggcaaacagagagaagatgacccagatcatgttcgagaccttcaactgcccagcgatgtacgctgccatccagacaatggcatcgcatcagggcattcctaatgtatgcaatggattgttgtgttgggtttcaccgggcaacaaggatgtttgcccgtgcagtttgaaagctttttgtttcgaattttctactagccgaattgcgggtcttaatgattgtacctctagttttgttttctctcttgaagataacttatttttgtgtacgtagtaaaggtttatttgtatttgaacgacttgtagtgttttgg

SEQ ID NO: 18604 - DNA, 1707 bp, Oryza sativa
  ref <308>: DATABASE ACCESSION NUMBER: AK068992
  ref <309>: DATABASE ENTRY DATE: 2001-12-06
gggttgctgtcccaacacgatagccccttgagtgctataaattcagccccagattacagctgcatatgctacacgcattgttagtttgcatgcaagcttgatcgatcagcttcagagtttggatcaccaagaagttcagaatcctcccaattcgttcttcatttgcagcagtaattcattattcatccaccaacatgtctgctaatcccaaccagtcgttcgacgatttcaacaagcaagcctccagcaatttcaactccttcctagccatcgtcgtcgtgctttcagtggtgagcattgctggatcagtcgccattgtttacctcgtgtacagatgtgtcaagaagaatggcctcccggccgtcaacatcaacaccaacccgacggcggcggcggcgatgtacgccgtggtgcccgactcccagatacgcgacgccaccgtcgagaggtttctcaaagagatcgccggcgagaagcccatccggttcacggcgcagcagctggccggattcacgaacaactactcggcccggctcggcgccggcggcttcggcaccgtgtacaagggcatgctcccgaacggcctcacggtcgccgtgaagcgcctccacgtcggcggccatggcgacgggtggtcgacgtcgcaggagcagttcatggcggaggtgggcagcgtcgggaggactcaccacatcaacctcgtcaggctgttcggcttctgcttcgacgccgacgtgcgcgcgctggtgtacgagtacatggacaacggggcgctcgacgcctacctgttcgaccggagccgcgccgtcgccgtcgcgacgcggcgcgccatcgccgtcggtgtcgcgagggggctccgctacctccacgaggagtgccagcacaagatcgtgcactacgacatcaagcccggcaacgtcctgctcgacggcggcctgacgcccaaggtggccgacttcgggctggcgcggctggcgagccgcggcgacacgcacgtctcggtgtccggcatgcgcggcaccccgggctacgccgcgccggagatgtggatgcaggcgggcgtgaccgagaagtgcgacgtgtacagcttcggcgtgctcctgttcgagattgtccgccggcggcggaacctcgacgacggcggcgcgccggggagccagcagcagtggttcccgatgctggcgtggagcaagcacgaggccggacacctcgccgaggccatcgagggctgcgacgccatggacaagcaggagagggagacggtggagaggatgtgcaaggtggcgttctggtgcgtgcagcagcagccggaggcgaggccgccgatgagcgccgtggtgaggatgctggaaggggaggtggacatcgacgcgccgccggtgaacccgttccagcatttggtcgcgtcgccggcggctgcgcttaggtggacaagcactacagattcagctgaaagtgataactcattgagatcagggtctcgtcagtctgcagaggtgatcattccaattggatcattacattgttaagagcaggtacaatagcaggctataattcagctataaacatattttaaatagataaaggaagagtgagaagagcagtgggttacagatctgtagccagctgcagcacgaactctaagacgtaatgtgtgtatgacaggtaggactgggtattaatagtatagtaagcaactattgtacg

SEQ ID NO: 18605 - DNA, 2406 bp, Oryza sativa
  ref <308>: DATABASE ACCESSION NUMBER: AK068993
  ref <309>: DATABASE ENTRY DATE: 2001-12-06
ggctaggttaaccgatccatcttctggtactgaaatggagtgcgagaacggccgcgtttctgccaatggcatgagtggtctctgcgtcgcggcgccccgcgccgacccgctgaactgggggaaggccacggaggagatgacggggagccacctcgacgaggtgaagaggatggtggcggagtaccgccagcctctggtcaagatcgagggcgctagcctgaggatcgcgcaggtcgccgcggtggccgcggccggcgaggccagggtggagctcgacgagtcggcccgcgagcgcgtcaaggccagcagcgactgggtgatgaacagcatgatgaacggcacggacagctacggtgtcaccaccggtttcggcgccacgtcccacaggaggaccaaggagggtggtgctctgcaaagagagctcatcagattcctcaatgccggcgcgttcggcactggcaccgacggtcatgttttgccggcggaggcaacccgcgcggcaatgctcgtccgcatcaacacactcctccagggatactccggcatccggttcgagatcctcgaggcgatcgccaagctgctcaacgcgaacgtcacaccgtgcctgccgctccggggcacgatcaccgcctccggtgacctcgtcccgctgtcctacattgccggccttgtcactgggcgcgagaacgccgtggcggttgcaccagatggcagcaaggtgaacgccgctgaggcgttcaagattgctggcatccagggcggcttcttcgagctgcagcccaaggaaggccttgccatggtcaatggcactgccgtgggctctggccttgcatcgaccgtgctctttgaggctaacattcttgccatcctcgccgaggtcctctcggccgtgttctgcgaggtgatgaacggcaagccggagtacaccgaccacctgactcacaagctcaagcaccatccaggacagatcgaggccgccgccatcatggagcacatcttggagggaagctcctacatgaagcatgccaagaagcttggtgagctcgacccactgatgaagccgaagcaagaccggtacgcgctccggacatccccacagtggctcggccctcaaattgaggttatccgcgccgccaccaagtccatcgagcgtgagatcaactccgtgaacgacaacccgctcatcgacgtctcccgcggcaaggcgctgcacggtggcaacttccagggcacgcccatcggcgtgtccatggacaacacccgcctcgccatcgctgccatcggcaagctcatgttcgcgcagttctcggagctcgtgaacgacttctacaacaacggcctgccatccaacctgtctggcggtcgcaacccgagcttggactacgggttcaagggcgccgagatcgccatggcctcctactgctccgagctgcagttcttgggcaacccagtgaccaaccacgtccagagcgccgagcagcacaaccaggacgtcaactctcttggactcatctcctccaggaagaccgacgaggcaatcgacatcctgaagctcatgtcctccacgttcttgatcgccctctgccaggccgtcgacctgcggcacatcgaggagaacgtcaagagcgccgtcaagagctgcgtcatgacggtggccaagaagacactcagcaccaactccaccggcgatctccacgtcgcacgcttctgcgagaaggacctgctcaaggagatcgaccgcgaggcggtgttcgcgtacgcggacgacccgtgcagccacaactacccgctgatgaagaagctgcgcaacgtgctcgtggagcgcgccctcgccaacggcgcggccgagttcaacgccgacacctcggtgttcgccaaggtcgcgcagttcgaggaggagctgcgcgcgactctgccaggtgcgatcgaggccgcacgtgcggctgtggagaacggcacggcggcgattcccagcagaatcaccgagtgcaggtcgtatccgctctaccggttcgtgcgcgaggagctcggaacaaagtacctgaccggcgagaagacacgatcgcctggcgaggagctgaacaaggttcttgtggctatcaacgaaggcaagcacatcgacccgttgctcgagtgcctcaaggagtggaacggcgagcccctgccaatctgctgaactagtgaaccgattagctgaataacagtggagtgtggaggcgtgcggtgttgtttttatctggtgaatattttatttttacacttatctttgtgttactcaaaagaattcttcgttgcatagcggcaagcatgcaacagcaaaacttggtacgagtggcaggtttcaaaagcaactagtgttgtaacatataagttttggatatcagagtgttgcaaatcattaatttt

SEQ ID NO: 18606 - DNA, 3363 bp, Oryza sativa
  ref <308>: DATABASE ACCESSION NUMBER: AK068994
  ref <309>: DATABASE ENTRY DATE: 2001-12-06
gaaaggatgggagatttgctctcccttatctagtctctctctgatctgcatctgggttttctcctctcatctcacctctcttcttcttctcttcttccttgcatgctctaacaaggaagcaaggaaggattgtttgtgttgttgttgtccatgtgaaaatggatatatatagtattattgtatatgtgtcctgctggtgtctgtttggttggccttgtctcctggcttgaggaagtggggaaaggttggaatcttttcttggattttggaggctctctcccccccagcccagcccagctggtgatacggttgaggtctcttgttggtgacgcaacctctgtgtgtgtgtgtgtggcctttctcctctgcctctggcgttagataaagatgaactgaatcggcttggcagtcacacttcgattttcttggcagctgcagaagaagaagaagaattcctcatccaccatcgcttcacaatcgtctcttccaggttgtggcgacctcttttttggagcatcttggccgtaacagataagtttggcaatacgggagacttggtctgcagatattgtcatcctgattcctgcactggtttacatctgaacatttcggatgggaacgaaagttgaaagcaagacttatcttccaggatacttcaccatggcagattctagtgtaaattccaacggcaattggttgtcgtatcatgaggagagcaaacccagcgggcatgttagtgacagtttcacaataacaaccgcgaatgcatctccagattatgataaggaaatgctaaagcggacaatgctggtgcatgaagcaacattccggaaacaggtatatgagcttcatcgattgtataaaaatcagaaggacctaatggcacaattccaaagagaagagtgcaatggatatcctagatctgcagacatgttacaagcaaggtcttattcatcacaggcaacatcacgggatgtaaaaagagtctggcaagttatgcctcctacatctggaaatgatattaagcaatcatctataaattttgctaagggatcggagtatgctcgaaatggagctcctttgatgaataataataatggcaggtccacaaagaaaatgttggaccttcagcttccagctgatgcgtatgccgatgatgacgacgacgatgatgatgatgtggaaatactagaggagaagcctgcaaagattttgccaagaataaatggctccgttgttggtgggattgttaagctcaacgtcggaaatagcgagggctcttcacacatggagaagagctggatcgctggtttacatcctcaacatgtctctacagtaaacgttttaaataaagcagtggaagagtcttctagcatgaaaatgccagacttccttggtgtgggaacctccacttctcaaagccaacgttattcatcgggcagggtgaacctgaaccacctaagtttggaagacaccatgaaagaaaagcgtattggtgaagcatctggttcaaacttttttggtgcaaatgaggaagtaaagcgtaacagttcattcaacaataaaacagattatcaaaatgtcagcatgggatggttcaaacaagagccaaatggtattaatttctctgctgcgcattacctgcctagatgtaatcccttcaatcaactaatcgacgcaccgaccagctccaacgctgcagtcaagtctccgtggcaaagcagcaacacaagttacactgctaatggttactatggttctgtttacacgccctttgctcagaatggtttcttcaacggcttctcagtggattctatcaatactccaatggcaactaatcattatcataaccaacgttcttcaaagtttccaggagaacctcaatatcaaaagcattccccactccatggtgtgaatctgaatgatacccctcaagatgtcactgctattcaggaacagggaagtgagaattcaccggttgatatatcttggctcaggaaggaccctgtagatctgatgaagtcacaagtgcaaccaagttgtgcaaatggccaatcccagatttcattaggttccacagcttattcagaaggtagcacaagagtactcggtttccctatcaatgcagccgctgaaagaaacaccgaaccattgatcaagcgcgaagctgacatggaaatgcacaagaaagatgatgcaaatgcgaggaatctcattgacctcaatgccgcgccttccatggatgagccagacattgatgtccatcagtcagaaggtggcactgttcctcagcaaccagatgatccttctgaggactctcttgctagaactgcagcagagagcctagtagccttgtgtaaagatgtctttcaagcagggtctccccttgctgacattttgcattggttcgctgacctcgctattgcatcgaaggaggatgcagtggtctgtagtagcgaaagtgacagcgatgatgaatttgaagctttgacactgcagctagaagaaaccaaaggctatgagctctactcaacaccgaaaacaccagtagagcataagagcaatgaagaccatggctctgttgcagcctcactgcttcagacaaaacctcgaagaggccgagcacgaaagcgtccccagaagaaagatttccagaaggacattctaccaaacctcgcttcgctgtcgaagcacgaggtgtcagaggatcttcacacccttggaaggtcaacgccatcgaagcggggaggtcgaaacggatcgcagtccagggggaggcgccgagcaagaagcgtggctatcgctgttgaggaagttgaggtaagcccacctccagctccagcgccgccacctcctcccccagctgacttggacgctaatgctctcggcataactgggtggggaagaacaaccaggcgctgccgtcgaccgagatgccctccggcgaacaatgcgtcattgcgtctagcttgagagagaattttaggtgccttagctgacgggaaatgatcttgaaactgtatttttgggtggagttgcagagaaatttgtgtccttggtagcttgacagtaatcaatcaacattgtacatgctgctcagcccctaatttggggctccagaaacctgcattggataaaaaaacatggtgtacatctctttgtttcggtataaactctgattctagatagcaatgcacctgaagaacaggccttgtgaaacctggaatatcagttgtaattagatttagctccttgaatatcagtctgtgatgtcatgttctgagttcagaatataactgaaacaattgctggaactgggtgacctgcagatttactaatgctcactgatgatgtcaagtgatc

SEQ ID NO: 18607 - DNA, 2815 bp, Oryza sativa
  ref <308>: DATABASE ACCESSION NUMBER: AK068995
  ref <309>: DATABASE ENTRY DATE: 2001-12-06
ccttcttccaaccccacacaaagcggcgcctccgcacccgtgtgtaaagaaaaaaaaatcggaggcgaaaacctctcaaaccctaatcccctcgtcccccccatggcggagtcggacgcggcggcgccgccgccggaggtagtcgcccccgtggaggagcagacggcccccgcggtcggcgcatccacgctggaagaggccgagcccgccgcggccgcggccccggccgccgagggcgagggcgagcacaagaggaagctcgaggaggtcgacgccgcccccgacgcgaacggcggcggcgaggacgacaagcggccccgcgtggaaggcgacggcgaaggtgtcgtgcagagcaacgagtcctccgcgaaggtcgatgagccggtagctacagagaacagtgacgctgcccctgctgaggcatctgttgatgctgtgaatggcaaggttcctcctaccgaggattcgcagatgggctctggggagaagcctgcagcagaagcagcagtgactgaagccccgccgcaagaaggtggtggcgcaccaggacaggagacgtctcggataatcaacgtgcccaataacaaggtcggagtcctaataggaaaatctggggaaacaatcagaaacttgcaaatgaactcgggcgcgaagatccaaatcacaaaggatgctgaggcagatgcaaatgccccaactcgttctgttgaactagttggaacccttgagagtattgacaaggccgagcggctgattaagaatgttatagctgaggtattccacgtgctaaattaattagccgtgatttccatactagtttgagctgtattttcatccaagcaacttaaacttgtgacattctttattacttccacttcaggctgatgctggtggttcgcctgctctgatcgctagaggttttgggtctggacagtcaggctctgagcagtttgagatgctagtccctgataataaggtcggtttaattatcggaaaaggcggcgagaccattaaaaccctccaaactaggtctggtgctcgtattcagttgattccccaacatcctccggaaggtgttacattgacagaaagaactgtacgtattactgggaataagaagcagatagaagcggcaaaagatatgattaagcaagctatgagtcaggtaatgtgattctgtgtttcgctttcaactgttccttcatgctgtaaataactagtgatattagatgatgctgtgatcacccaatgattgtgcaattcaatcatgctgtgaagaactgggcgatgctatatgatgatgagatgctaaattcctactttatgcgtttccattctattcatgctgtgattattttttcattgaaactgaatttctgttacctgctctggaatcatggtgtgtattatcgaacctattgtctctagcatgaccttactatcttcgtattatatgattggtataatccaatatgttttcctgttctccctgataatagaggtcttagaaatatagaaggtgttttttggttcttgttgagtaaacctgtgatttctttcaatcagcttaattaaatctgtgccctcttatggtttgtgtagatgttattttattgataccttctagaactggttccagcatttgttcatttcatttttaatagttttcatctccgcatcttataaacttgaagtaaatttcttttacacaaaaacgcttcaatgcaaatgtattttgttgaatgaaacacaattttactgcgtcaatggggtgctggatttttcctcgcttattaaatcttaagtgtataaactaatgtcttttctacaatgggccttgtatgaagtaccgatcttgaaatatagcagtgcctaattggactggaaggtaagttcttcttaattggtgataagttttagtgtctttgttgctaagtcaatgagatgccacatccttgagagtattatgtatggttatattaatacttaatttatacagaataatttgtctataatatttcatgagttataatctcctcgtggtcaattatttttttgtgggaatatttgtcatcttccatataattcagtatcttgccttgctgccttttcaatggcaaaatttattccatgtccatgaattttaaggtttttgcattgtcttaaattacaaatgatgcatatgtttagtttcccatgaaaatgttgttcattcatggattaacgatatggaacatggtgtgcatgatcatcaatgttaactatgaatgaagttagaataaatgatttgactctgcaatggatagcttttgaggatttgtgagatatattcacgttgacataaaaagatagtttagtctcggtggcttgatagttcttcatagttcgtctagaagcagaacttaccttcgtgtatgatagtgtggttggacttcagtacttgatcgttaaaaccttggtgctgtcacatgatcaatgaacaattactgtggtactagtttcaatctttagtcggctagtcttttgagttttggtaactgcttactgctagatgagatctgattatgtttcctacataagaagtcagaactgactcatcaaggttcctctcgcttccagtttccatgatttattttgtttgaaggtgccaatttggagttggttgggtatcctaatgcagatacagctaggctttcatcatgggctccacatccttcatccattacatgcacagaagagggatattgaccattatcccttgcccttgcatggtttgtgtagttggtaactggtaaggctgcttattgctgaaatg

SEQ ID NO: 18608 - DNA, 1208 bp, Oryza sativa
  ref <308>: DATABASE ACCESSION NUMBER: AK068996
  ref <309>: DATABASE ENTRY DATE: 2001-12-06
ggggttcccctaacctcgcgcgccacctctcctctcctcgtcctccgcctccggacgcgcagttcacgggcgccctaatggcgaaaaagggcaaggcggcggcggcggaggccgcggcgcccgacgcgggggtatcgagcccgcagggcggcggcggggagaaggagggcagcttcctgctgggctcgccgacctgggaggacgccgggggcgggcggtggcggtgcaaggagacggggcacgagctgccggagcgggagaaggaggcgtacgggcggtcccgcgcgtgcaggctcgcgctcatcgaccaagccgtcgcgcgcaagaagccgccgctcaacgccttcaagcctcaccccgagcacaagtcgaagcttatatgcaatattactggggacattataaacaagtcggaggaacacatctggaagcacatcaatgggaagaggttcctcaacaaactagaaaaactagaagaaaagatggcatcaggtgaaatggccgaaggtgaagctgaacagtcaaatgaaggggaaaataaaaccaagtcaaggaagaagaaggacaagaagaaagctgctgttgttaacccttctttgccacgagaacctaaaccagagattgatgattcagataattctgatgatccagatttctgggtgcctcctgttggaagtcgttgggatgatgatgatggaaaagaccgatggacctcctctccagtgaaggataaggatgatgcagcagaggatgaagatggtgatgacgatggtgatgacatggctgacaaggatgacaaggagacaagagaaattgcttcaagcaggacaaagcgactgtcagtagaagcagttggcccaagtagcttcgcttcaaggaagaaaaaaaccaaaaaggagcagtaaaggttggtccacagcttatcatcgagttcaatgaagaacttatttgatctttctgtgtggacgaacaaagtccatctttgattcctcttggctggctagtcaggtgcgggttttgtattaattggtttgcttttagttagtgcttctctgtgtagccctatcgctgcacctttcagtggtatactattgcatgacaattctctatacttgcattagttaattcctgtgattttgatgtgagaatgaactgtgctacttgtcctatatttattcttgctatataacttcatatgtttcttttgt

SEQ ID NO: 18609 - DNA, 1328 bp, Oryza sativa
  ref <308>: DATABASE ACCESSION NUMBER: AK068997
  ref <309>: DATABASE ENTRY DATE: 2001-12-06
ttgctgatttggagtttttgatgtttccaagagagctgcaactttcaggggagtcagccaagttagtgaagcttggggaagcagtttcaaagggaactgttaataatgagacacttggttacttcattgggagggtctatcttttcctaacacgtttgggtattgataaaaaccggctacgcttcaggcagcatctacctaatgagatggcccattatgctgctgactgttgggatgcagagattgagtgctcttacggatggatagaatgtgtgggcattgctgacagatctgcgtatgatttgcgagctcattctgacaaaagtggtgttccacttgttgctcatgaaaaattctcaaagcctagagaggttgagaaacttgttatagtgccctcaaagaaagacctggggcttgcttttaaggggaaccaaaagatggtggttgaagcattggaggctatgagtgagaaagaagcaatggacatgaaagctgctcttgaatctaagggagaaacaaatttccaagtgtgtactcttggaaaggatgtggtaataaccaagaaaatggtatcgatcagtatggaaaagaagttggaacaccaacgagtcttcaccccatcagtcattgagccttcatttggcattgggaggataatctactgtctatttgagcattccttctacacaagacctagcaaatcagaagaggaacaactgaatgtcttccggttccctcctattgttgctcctatcaaatgcactgtgttccccctggtgaagaatcaggagtttgacgacgctgcgaaagttattgataaagcattaacaacagcaggcatctcgcatattattgacactactgccatttctattgggaggaggtatgcaaggacagatgagatcggtgttccattcgcggtaacagttgactctgcgacaagcgtgacaatccgggagagggacagcaaggagcagatccgagttggcatcgatgaggtggcatcagtggtgaaacagctgacagatgggcaaagcacctgggccgatgtttcatttaagtatcccagccatattggtccccagggtgatcaggagtgaaaatcctgaaccctgttccaaagaagcaccccaaatggccgttgattgacttgaggagaaatagttcttcctcgtttcatgcaatctggcaagaacaaagtttgtcatacacaaatatacaactcttggacgcccttacatctctccattgttctttttgctctctttcaaaagtttcacctgatttacatgttcacaatacagaacatagcatttgattttctgctg

SEQ ID NO: 18610 - DNA, 1325 bp, Oryza sativa
  ref <308>: DATABASE ACCESSION NUMBER: AK068998
  ref <309>: DATABASE ENTRY DATE: 2001-12-06
ggtttttgcgacttaaaaccctctccttgttcttcccaacttcgcaagacgcgattcaatggtggacgagattggagcggcaaagaaggggtgaagaggtgaatcgcccctctcttttcttgagttcttggtcaggttcgtagtcagtatgcctgaatcgagctcagatcctaacaacgggagaggaaagtcatccaagaggaatctcccttcttggatgggttcgaaagacggggaggaaaatccaggcaagaagaagcacatggccacccacgagaaggtgcagaaaggatcggatttctccaaacttttggatggggtggtctttgtactttcagggtttgtgaaccctgaaagaggcacattgcgctcccaagcattggatatgggagccgagtatcgacccgattggacatcagattgcacacttctcgtttgtgcatttgccaatacccccaagtttcgacaagtcgaatcgaacaatggaaccattgtctcgaaggactggatcttagaatctcacagccaaagaaaacttgttgatattgagccttaccttatgcatgttggaaccgtggagaaaaaataaagagctagttgaatctgacgaagatcagaagaagccacataaagagcatcagaagcaagttgatcgatctcgtatcaagacatctccctctgcaggcatagaggcaaaacattcagatgttactagtaagcaattttctccaacaaaaataaaacaatgggcaaagaatgatttagcacagacaatatcatggttagagagccaagaagagaagccagaaccaaatgagttgaaggcaatagctgctgaaggggttatcacttgtttgcaagatgccatagaatctctcaagcaagggaatgatgtcaagggagtggcggagcagtggagctttgtcccccatgtcatcaatgaactggcggaacttgatggaagaagaaaagagggatcgttatcgaaagaacaactctcccggctagcaatcaaatgcaaaaagatttatcaggctgagtttgcccacatgcatgataatgacaagaagcatcagagcaagcctagatcagatgatgctcagtatgacagtgatgacaccatcgaaatgacggaagaagagattgatctcgcatgcaggcaactccctggggtatgcgggaggcagtagttttaggtccgttcttcagaagatgcagtaagaatactgaatatccatctttcccaatggtgtatgtgtctgggatctggatagctgcatgtgtaaactgaacaaaatatggttaatctagatcaaaattgcacc

SEQ ID NO: 18611 - DNA, 496 bp, Oryza sativa
  ref <308>: DATABASE ACCESSION NUMBER: AK068999
  ref <309>: DATABASE ENTRY DATE: 2001-12-06
gatcacactgagagggcggtgccacggctttagtgactcaccgcatggtggcggcagcaggaggcacctcggcggacgccatgatcgacgggaagcaccttgggcgcggggtggcggcgagtacctcggcggaaggcggcggccggatctgccttcgctggccccgcaacggccggatccgcaagcaccggccccgcgaccgccgacgacttcatcgggcgctcgagtagcagcgggcgtggcgggcggtgcctcgggcgcagggcagcgttgagcggctcggcggacgatggtgaccagatccgccttcgccatgcccgcgacgaccagatccgcaggcgccggcttgatccgccggcgtcggcgctgcgaccaccggacccgcatcgctgccgccgtgattataggctgggttttgttttttttattttatttttcctggatttttatttttacgtgcggatgcgctacctttacatataaatcagatttttgc

SEQ ID NO: 18612 - DNA, 1275 bp, Oryza sativa
  ref <308>: DATABASE ACCESSION NUMBER: AK099082
  ref <309>: DATABASE ENTRY DATE: 2002-08-28
gtgtgtccgtctccttcctcatctccaactcaggagatcatagaatccgaaacgaaccgttgcagcagctgatcgtcaggccatgtcgaacgccgacgtggaggccggtgggccggcggggagggaggcgacgacggggatcaagccgccgccggggaggtacaacccgagcggcaacgggccgaacgcggtggcgccggcgccgccgccgttctactactacgaccaagcggcggcgcaggagcggcaccaccggacgtgggtggtgccgctggtggtgatagccaacgtggccatgttcgtggtggtgatgtactacaacaactgcccggccaacggcggccgccgcgactgcgtcggccgcagcttcctccgacggctctccttccagccactcagggagaaccccgtcctcggcccctcggccgccacgctgcggaagtacggggcgctggactggtacggggtggtgcacggcaaccaggcgtggcggctggagacgagcacctggctgcacgccggcctcatccacctcgccgccaacatgatcagcctcctcatcatcggcatccgcctcgagcagcagtttggattctggaaggtcgggctggtctacctcgtatccggcttcggcgggagcgtcctctccgtgctcttcatcagcagaaatggcatcaccgtcggcgcatccggcgccctcttcggcctcctcggcgccatgctctcggagctcatcaccaactggaccatctacagcaacagatgtgcagccatggtgaacctgatcatcatcgccgccatcaacctggcgctgggtatactcccccgcgtagacaacttcgcgcacattggggggttcgccaccgggttcctcctcggcttcgtgctgctgattcagccccagttcggatggtcggagcaggtttccagcgccaagtccaaatacaacgcgttccagatcattctcctgactctctccgtggccttgttgatagcagggtttgcagctgggttggtcagtgttttcaagggagtggacggcaacgctcattgcagctggtgccactacctcacctgcgtgccgacatccagctggaaatgcgacaaatgaacaggagatcagtgacgcattagcatgccatgcctcccacttgtcactgcaggggagagaatgccaccctgcttaagagggaacaatcgagatacaatagatattgtttctgtttgagaccacactgtaaaatttttacgctatatagaacttcaatattgtcc

SEQ ID NO: 18613 - DNA, 1894 bp, Oryza sativa
  ref <308>: DATABASE ACCESSION NUMBER: AK069000
  ref <309>: DATABASE ENTRY DATE: 2001-12-06
gtccgatccccatctatcccgcgagcgagcacggggcgccgtcgttcgccctgccgcatcagtttgggggttcaactgaaccaccatgtcctatgttagatccgcctgaattttcgggagaagcttacttgattgagagatgtcacttggctatgccgagaagctatcctaccgagaggatgtgggaaatgtcggcatgcctgagatcttcgactctcctgaactcctccacaagaagatagaagagcttgcagtcatggtgcgagagagtaagcatttggtggtgtttactggagcaggcatatcaacttcatcaggcatacctgacttccgagggcccaaaggcgtgtggacactgcagcgttcaggaaaaggtgttcctggtgcatcactgccgtttcaccgagctgttccaaccttgactcatatggcactggttgaattggaaaaaacaggacgattaaagtttgtcataagccagaatgttgatagcttacatctccgctctggcctcccaagggagaagctggctgaattgcatggaaattctttcaaggagatctgcccaagctgtaaaaaggagtaccttcgtgattttgaaattgagacgataggactgaaggatactccaaggcgttgttctgataagaactgtggagctagattaaaagacacagttcttgattgggaggatgctttaccccctgaggagatggatgctgccaaggagcagtgtcaaaaagctgatcttgtcctatgtttaggaactagtctgcagattactcctgcttgtaatatgcctctgttgtcactgaagaatggggggagggtggctattgtaaatcttcaggcaactccgaaggataaaaaggcaagccttgtcattcatggacttgtggataaggtcattgctggggttatgtatatgatgaatctgcgtatccctccatatattcgtactgactttgttcaaattagtctccggaactcggtcaaaaaaaaaatgcgtgagatggactctccgagtaacaagcattcatggcttgcgagcacctttgccatttcttcgatcagttgaggtttcctttcctgaaagacctgacatgaagcctgtagtactaaaggagcaaccattttctttgcagagagaaacatcaatgaatagaccgtttgtcatgctattgacattcaactttagtgatggttgcggctgttcgagctcttccattgaatggcctgttgattttctgaagcaaaaagacagctttgtcagggatagaagtctagtcctgcaagagttgcaacatgctgcagagcatcgatcacgtgcagggcagcatgcaattctggagagggagggtgtgccaagagctgaaacgtcaattcatgcacttgtgaccaacatcgtcaggtatgatactgaagatagcaaggcggcagttcccatggctacatggatgaacagcaacggcagcctttcgaaacggcatatggatgccattggttgcaacccagcatcgtcaaaaaagcagaagttggttgctactcgtcatcggcgaaagggcttgaaccctgctactcagaaagtttgatggctgtttgttctagttgtcagactagagttaggatagatgcatgagatgttcacagtagctagagtaaggtgttaacaacttctagtgcatgtgaaagctggtagaattttaacttgacaagcccaacgtaattcagcaaccatctcaaaagaaactggttgtggggcttgatggtatgttttgtaaagctcgggaagatgaacaaacctctaaatcattaaggatgatctgaggaactggaggtaaagtgaaccgtacaaagaaaataaatggaaggcgagacaattttttattgctgc

SEQ ID NO: 18614 - DNA, 1814 bp, Oryza sativa
  ref <308>: DATABASE ACCESSION NUMBER: AK069001
  ref <309>: DATABASE ENTRY DATE: 2001-12-06
ggcatatggcctctgactgatcgttgatcgagtgcttgctatggctcaacaagcaaaggaggtaaacacaaacagaagtaggtgtggaagtagcatcagcatgcgaatggaaggagatagaaatggtgccttggcgatgctttcgatatcctcctcctcggcaagatatggaaatgatcaccaagagcttgcttctgctgctgctgctttcagagagtcggcaggtgatccgaggaaactgtcgtcgggaatgagtagcaggctgttgccagcacggagcatgaggtctaccggcgctggggacgatggcgaggtggcggcggcgccggtggctggcgctcggtcgctgtccttctccaagctcttcagcttcagaattgcaaatgctgcgcgttgttcgtcgtcgctggattttgatcatccgctaccttcagatgcagcaagcagtgatcacatttctgcaaacgatgagacgacggcgacgaagacgaagacgaagacgaaggcgaagcacgcgagtgaccacatgaacatcagccgctcacagtccgtgccaatgagcaccctgtcgagattcagctccaaggggggaggaggctccaagagagtggcggactcgagctcccttcgtattcacgacggtggcagcgtgcggttcagggtgtcggtgataggcgcctctcctcccgacggcaatgcggacgccgccgccgccgccggagaagaggaggacgacgccggcagcgtggaggcggaggaggaggcgctggtttgccggatatgcatggtggcgctgtcggaggacggcgccagcggcggcggcggcggcacgctgaagctggagtgccggtgcaagggggagctcgcgctggcgcacggcgactgcgccgtcaagtggttcagcatcaagggcaacgcgacgtgcgacgtctgcaaccacgaggtgctcaacctccccgtcacgctgcgccgcgtccacgaccgccagcagctggtctatgaggcagccgcggcggcggcggccgccgccgccgcagcggccggtgacgacatcgccggcggcaaccggcgaggagggtacagctacgggcgcgtttggcgcggcacgaccatcctcgtcatcgtcagcatgctggcctacttctgcttcctggagcagctgctcgtcggcgaccacggcacggcggcgctggccatctcgctgccgttcgcctgcgtgctcggcctcttctcctccctcaccaccgccaagatggtgtccaggaagtatgtgtggatctactcagctgtgcaatatctcttcatcgtgcttttcacccacctcttctacagatatgtgcgattgcaagcggtgattgccatcatcctgtccaccttcgcgggctttggcgtggccatctgcgccaacgccatcctcctccagatcatcagatggagggccaggcgggcatccatgtcagcagcacaggaagaagaggaagctcgccgtgctcccacacaggcggacctcgagaacgctctacctccaccctagtccagcttggcagagcccagtcacccccacctccctttggtttggtttgtacatatatggtaacatacaatttaatacacatagtagcatgcgtgtatattacttgttaccatatagtaccccctccagtcaagtgtatttgacattgggagtatatatatataatactcccaacgtcaaatgtgtacgtgaccggaagaagtaaaataggtagcttgtttgtctaaatatatgcctggccagttttgttagtattagaattgtttgtttttgtctttgc

SEQ ID NO: 18615 - DNA, 1288 bp, Oryza sativa
  ref <308>: DATABASE ACCESSION NUMBER: AK069002
  ref <309>: DATABASE ENTRY DATE: 2001-12-06
tgagagtgtggtgaatacaagtgcagtagtgtgcgtgtgtgcatttgctggtgcagtgccgagacaaattctccatcgtgtgtgtgtgatcttgtgttctagctaacagtggtatcagagtgtgtgatcttgtgatcttttaagtttggggggagtggcaccaacttaaaaggggaggggtccctcacctcatgagctagcttttggggtgtagaaagactttctcccggttaggccaacgtttcccggttttgggccatcaagtggtatcagagctgggcccacaatctctctaagtgccgtgcacactcgtgtggtgtaagcccgaagcccagtggaccgcgggtgtgaggcccgtatgtgcctatgtgttgggccggtcagtggaccgcgggtgtgaggcctgtatgtgctcgtgtgtggagcccggtcagggctaaggggcaccaatgtgtgacgggggagattgttgggaatagtcccacattgaaagtttagggggagtggcaccaacttaaaaggggaggggtccctcacctcatgagctagcttttggggtgtagaaaggctttctcccggttgggccaacgtctcccggttttgggccatcactgccgagtccgagcacgtcgacagttgccgcgccgccgccaccgactactccgactccttccccgaagtcgacggcgacgccaagtcctgccaccgagatcacctctccgcctcccccgacgccaccgcttgcgacggcaaggctttctccttccaccgcgccagcgacttcctcttcgcctctcgtcgactcaccaccaccagcgggcacggatccttctcccgcgtcgactgactccgcgcagacatcgtacagagttctgggcggtgctgtcgccatcattttaggggtgtggcgatttactacatcgtcacctagcactggaccggacgggaagccgatcgaactgacgactgcgacctctgtcaatcaaagggacatcgaactggttcttactcgtcttcatgttgctatctaattttttttcttcatctgcatttgtgttccatttctgatgatttctcttttgagatagctgctgattagtatgtctgcgttttggttctcccctaagctgaagcagacaattcattactgcagtatttgcctctattcatatgttggcacttggtattcagaaaattcatgagcctagtagctctctgtgtttgtgctttaactttttgtgacgactatgcatcattttctggataaatggagctacaatttgtctcc

SEQ ID NO: 18616 - DNA, 2761 bp, Oryza sativa
  ref <308>: DATABASE ACCESSION NUMBER: AK069003
  ref <309>: DATABASE ENTRY DATE: 2001-12-06
tgatggcaccggccgccggtgagcccagtgcagccgcgggcggcggggagggagacaccgaggcgcatgcggtgatcgacgtcagcagcagcgaaaccgactccgaccccgaccccggcttcggcggcgccgggaagaggccgcggcgtgtggtggcaacggctggcagtggccgggaggcggagaagagggctaggattctggccgccgccgttccaccgggattcctcgatccgctaccgcggccttctgcccctcctcctcctcctcctcctccgcgcgggaggaggagggtgacgaggcagttctggaatgccggggactacgacggcaagccggacctgctcggcggcgacccttcgctgcgatccgattcgggaatggaccacattcgcgtccatccaagatttctacactcaaatgcaacgagccacaagtgggcactgggggctttcgcggagcttcttgacaactctctggacgaagttgcgaatggagctacttatgtgaacattgacatgttggagaataagaaagatggaactcgaatggtgtctgtggaagatgatggtggtgggatggacccagataaaatgtggcattgtatgtctttgggttattcagcaaagagcaaggtgaaagataccattggacaatatggaaatggtttcaagacaagtacaatgcgactcggtgctgatgtattagtcttatcacgtagttgtggtaatggcggaagaaggcgcacacaaagtattggcatgctatcttacacattcctgagagagaccaggaaagatgatattattgttccaatgattgattatgaaaagggacaacaatattggaaaaggatgatgaggacaacatcgattgactggcagacaagcttagcaacgataatagaatggtccccttattccagtgaagcagaacttcttcaagagtttagctcaatcaaggaacaagggactcggattattatatacaatctatgggagaatgaacagggagagttggagcttgattttgatactgatgtaaatgatattcaaattagaggtggtaaccgagatcagaaaaatatccagctggcaaagcagtttccaaactccagacatttttttacatatagacattcactgcagagctatgcatcgattttgtatcttcgagttccatctgtattccaaatgattttacgaggcaaagagattgaacatcataatattattggtgacatgatgatgaagaatcatgttatttacaaaccagtgatgactgatggatttccgagggatatcgatatgatgactgatgttacaattggttttgttaaagatgcaaaacatcatattcccattcaaggatttaatgtttaccacaagaaccgcttgataaagcctttctggagagtgtgggctctacctggaattcaagggcgtggtgttataggtgtacttgaagtcaactttgtagaaccagctcatgataagcaggactttgaacgcacaaatagccttgcaagactcgaagcacgattaaatttaatgcagaagaaatactggtctgataattgccatcgaataggttatggtggcaattctgctaacagaaaatctgggagagaatataaaggaccaacatcagatcaatctcctgaaggctgtagaagttcgaattatttgcaaagaaaaagaagttttggaagtccatattctggatcaagtaataacaatagcaaaactggaataacatccttgaacacaagtaaaataagtcttcctgagagcagattctctttaagaacaacagctcagcagacagttgagaagaccaaaaggaccttaagatatacgagaccactactgcacggtctatcacatacaagtaatgatagtgatgctcagacttcaggcaccccatcaagatcaacttctcatattctaaagacacctgaaaaatcatgccacaatgagaatactttgcctttaattccatctagtgaagcaataagaagtgaagggacaacaagatatcagtcagaggaaagaaatgtaacaaataatggagatggacaaactgttgataaccctgagacagttatcaaattgttgaccgatgaaaattcgtcattaaaagaaagtatcatgaagatggaggaatctttgtcaagagaattacatatcgaacgggacaagaataagtctctcattgaaaggttggagaatgttcagaagcaacttggaactgcaaacaaggagcaagaagcattggtagatatctttacagaagaaagagcgcgtcgagaccaagaggtggagaaccagcggacgaaactaaaggaggcgtcgtccaccatacagaacctgctggatcagctgaatgctgccaggagctgccgcaagaactagaaatggaatgaagaagatcaattacctcgttggtccattgtggctatcgccgtaaaataagtttcccttgtacatgttagaataagctatatatgtcccagatggttaattggtgctagaacagctagctgttggtatgttttatgtgcaaggtatgcagtgctgcattttccagtgctaacaaagaagggtgagtcgaccaccactctaaactcgaaaatgtgggagatcgaccatatcggtttcagaccttcagtatcattcgatgcaatactttgtctaaacttgagcagtatgtaaaactgtagttctaaaactcctatcataatgttagtctggttaatctt

SEQ ID NO: 18617 - DNA, 2298 bp, Oryza sativa; identical to SEQ ID NO: 18524
  ref <308>: DATABASE ACCESSION NUMBER: AK099083
  ref <309>: DATABASE ENTRY DATE: 2002-08-28

SEQ ID NO: 18618 - DNA, 1501 bp, Oryza sativa
  ref <308>: DATABASE ACCESSION NUMBER: AK069004
  ref <309>: DATABASE ENTRY DATE: 2001-12-06
gatcttcgattcctcctccccaaacgcaaggcactttccttctcctctctctctctcgacgcatcctccaacttgtgcacgtcttcctcctcgatctccatggccgagttccttcgccggccggagttttgtctgcccatgcacatatacacatcacgcggatcgaagatgggatgaacgtacgtggagcggtggaggtgcaaccggcaggcacggtggcatctcgatcgatctatcgatcgatgaggaggccacggtggcgtctcgatcgattcgcgacatgttcgccgagatctatcgatgaagaggccggatcccgaccgtgatgcgcgtgcgggcgtgcggcgtcctcggcggcgccgatatgctttgtggtcgggtatggatgttccgtctcaacgtcaacatatcgagctaattagtatttctttggacaataatggcgatggagatctgtgctgaagctttccctctctcaagattcccaacgctggagaaatcttactgcgcagactcgagagacaccgaacgctcgcacaacactaattggatcactgaagtgcatttttcaaaccgaggaagcaataaactttggatctctgaagtggcaaaaattaaaaaaagaattcgttctctcaatctcagaaagagtcttgggcaagcaaggttctctagctcaaccggatgtatacatgaacaactactcaagttttattcgctcaactatatccatgctggactttctgcagaatcattgccgttcccatgtttgttgaagaaactatcgggactatgtttcgccatactcctatacacacgttttgctggatatataagaaaagggacatgtcagttatcactttgcaaaggattcagatggtcttcggcctaggaagtttcccaaacctctcagtaaggttgtcatggtctcttggccacatcctacgaggaatcggactgcagtcactggagagatctcacacccgggtcgacagtttgatgagttaagcccagtgaatcctttgggttttacaacgatgctgtctgaggttcaaattcgatcagaacaaggaagctccggggggcctttgctgaatggtcaggttcaagttacgggcctcttgcatggtggcaatggcagtttttcattcttcatttctcttccgaatggggattccttgtatgatttgctggccctgattcaacattgctccgccccctttacctctttctggatgctgtgtgtatgggtgaacatgctgcgacttttttgagatagttgcaacttgctctacgtttgcgatgatctatgaatttttggtagaacctactttacctgtctgttcctggtaaagatgagaattttgtacctaagatattttccttaagctcaaagattcctggtcctgtttgaaaatgatcggatacggttatatcttaaagatgagaattttgtatctaagatattttccttaagctcaaagattccttttcctgtttg

SEQ ID NO: 18619 - DNA, 2221 bp, Oryza sativa
  ref <308>: DATABASE ACCESSION NUMBER: AK069005
  ref <309>: DATABASE ENTRY DATE: 2001-12-06
ggttggcagatttgcagtgtttcggttttttattgtttcgggggtctaaatgatgttttctgtgaaagtgtataactaggaattgtagaaaattcatagatctatcttctgaccaaagggcgtgattttatcttaagtggtttagtctatatgaatttttgagtatggctattgtttttatgtcataatctggacattagtagattgaactgtttttggaggggttaaacagtggaatcagtcaggacacctatagacaaagttgtagagttttctctaagctttccatattggtaaagtacactttgatcggatgagtagaactccagatatagttgtttttgtgtgtaccctctgaaattctggacagattctgaaacctgttttcaagcgcaaaatagaccatttaaatggcagaataaaaatatgctttctacataaaagttgtaggtatagttctgtagatttccaaaatgtatttatttgcagtcatagcctatttatattttgagatataaatgtttgaatcagcagtgttgtttatagtccgagcggcgttccttgtatttgcatgttaacgggctggggccgtaggggcgtattatttatttttttatatgcatgtttgagtgtatattctgaggttgtcttgtgaataggtggtggtgcttcggattatgcttggtatcgtctcttcgttgttagagatcatggctcgccatcgatatcccaggcttgctcagaggacgccatagggttctggaagcccttcctccaccagttccaaagacaggaggctttagtgagaacatgattcctactgtatgattcaatatgagaaaggcaacaaaagttaatgtcacaataaaattgtgggatcttggagactccggagcatatgtgggagagatattgttgtgaagtttctgcaattgttaggcgagagcataactgccctcctaattgttcctgatgattcacgcagaatgctaagtcatccaggattattgggacgggaacattaatgtggaacaatttttgtagtggagaaagatttcactgacgagaatgtcacatttgagaactcacctccccagcggtaagggcatacagatgtagtttgagtaacaacagatagatgtgccttctacaattgcagaatggacgaatcgaacattccatagttcacgttaggtgatttcgaccctaactacgtgtcgaggtcattcccaactggtgagtatgatgccaccggatcggctccaacaccaccagttatggagccaccggcgggttcagaagcatccggcactatgagtgggagtgcatcgacgaacaccggctcaaagagatcaagaacttccggtgtttggcaacatttcgatgaggtggccatgacaggccctgatggaaggcaggtaacattcgcgagatgtagaatatgcaaaaataagttatctgcaaaatcatctggtggaacaggacatttgaagcggcatgccgaggcttgtgcaaagaagcaaggaatccaactacgacagcaacaactactactaaatcctgatggtacgtttcagggagatcgcttgcaaagacccccacctgtccctgcagcaggtaagaaaaaattacagtggagcagaatttggggcggttcatcttctagccatggtggtggtaccagttcatcagcagcaagtggggacgctagatcgcatggtcctgccgaagagttgtccaactatttggatagcgatgccatcaggcatgaaacgtcagacttcaacgtactcgggtggtggaatgatcataagatgtcatatcctgtgctatcaaaactagcacaggatgtgttgacggtgcccgtatcttcggtatcctccgaatcagccttcagtctatgcggaagaattatcgaggataggagaacaagtctgagcagcgatcatgtggaaatactattaagcgtcaaagactgggaacttgctgcagaacatacccaatacactgctgacaaccaagaattggccgcacagttcgagaacctttatttagatgacgaacaattagggtagctagtttatattttttaagtattgacctgttggctgtactcttttctttgtcatggttttctcaaatatgagtttttacatgacaaagtttttaacgaggcagcatgtatcatgtaaacatcaataaaggtcattactcttttttt

SEQ ID NO: 18620 - DNA, 1994 bp, Oryza sativa
  ref <308>: DATABASE ACCESSION NUMBER: AK069006
  ref <309>: DATABASE ENTRY DATE: 2001-12-06
gtgtagggaggtgagatggatcgtgacgaggaaatggggcacggagacagatcgctgctgttcaccggagatgaggacgacgatctcgaggcggaccgcgacggcggctccacgccgtcgtccgacccgggctccttctccgaccggagcgaccctcccagcgtcgacgacatcgacgaggacgacgacgatgtcgtcggcgatggccgccgcgcgccccgcgacgacgacgacgaccagaggggcacgtggccacagagcttcaggcaatcgattgacatgatgagcgccgtgccgtcgccggcgatgagctcgatcatcacggcggcgagcccgaatctggggaggttggcggcggtggggagctccctcctgaagcgagccacgagcagcgcggtggggcaggagggctcgtcgctgccgctctccaggccgctgctgccgccgtcgtcgctgtcgcagctgtcgacggcttcggggccgccggtgagggactcggcggacagcttgccgccgcgcgcgcggccgccaccgccgccgctgcagggggagtccgtggtgccgccgccgctgccgaggccgtcgtcggcgtgcctgagatccaactacatcgacctgccgccgccgtctaccaggtgcgggcagaagcaagccatcctcaatgggcttaatgttctgtgtggagttggaattctcaccacaagttacggaatcaaacaaggtggatggttaagcctgatcctgctgcccttgttgggttgctgttcttgctacaccggattgcttctgaagaaatgcatagacagttcaccgagcattgacacatatccagatataggacaagctgcgtttggtatttacggacggatattcgtgtcggttgttctttatctagagctatatgcatgcggtgtggagtacatcacgctgttaggtgacagtttgtcgtcagtatttccgtctgcagatctagcttttggtggaatctacttgaacgcgcacaatctcttcgccatcacaatggccttggcaattctaccatcagtttggcttaagaacctcagactcctctcctatctttctgcgggaggcgtgattgcgacgacgacagtaattgtttgtttgttctgggttgggattggggaaggagttgggttccaccctggtggaactgcactgaatctgacccactttcctgtggcacttggcctgtatggatactgctactcagggcactcggtttttccgaacatatattcgtcgatggaggaacgcccaaagttcacctttgtactgctgttctgcttcatagtagtcacgtttgtatatgctggagtcgctgtcgcaggatttctgatgtttggcgagtccacaatgtcacaattcactctgaacatgccacagcaatttattccctccaaaatcgccattgggatgacgattataaacccatacacaaagtatgccttgacattaacaccggtcgccctgtcgatagaggaggctctacctagaaggatgcagacttaccaagttggaatgtgtgttaggacagctcttgtcgcctcaactgttgttgtagctttgacatttccatactttgcactggtgatggcgttgcttggatctgtcttcacaatgctcgtggccctgatcctcccatgcgcatgctatctctctatcaagaagggttcaacaccattgtgggaggttgtcttatgcataacaatcatactgcttggcatcctgtgcgcctgcgttggatcgtacacttctgttagccaaatgataagcagatagtaggacgcacgaatgatccattttgtagctgttacagattcttttggattggaccggcatttttcgattcctttgtatttgttccttatttttggcagtaaagctgtatggatgatggttttactgtaagatggtatctgttgttgtccagaatacgtaatagcgacaacagtccagaacccagttctcattcc

SEQ ID NO: 18621 - DNA, 2061 bp, Oryza sativa
  ref <308>: DATABASE ACCESSION NUMBER: AK069007
  ref <309>: DATABASE ENTRY DATE: 2001-12-06
gagattggcttcggctccttcttccatcgccgtcctgttcaacgttcaaacccttcctcctcccgtcgcctagtcgccattggcgacctcctcctcctccacctccacctcccctcccttaaatccctcctctccccgccccacctccctccccatccacaccgcaagcaagattcccaagagaaccatccatcatcttggaatccaagaatcgcccgccaagaacagccaagaaccggaggatttccgcgagggagggagctccaggaccctatcaatcggggattcggtgaggggggaggaggaggcgggcgagatggtgaggctgccgtacaccacggcgctgacgacgctcttcagctacgggctgctcttcgcgttcggccagctcagggatttcttccgcaagctcatcgattggttcaaggccaagaacgtcaagggctacgcgccgatctgcctcggcctggaggatttctacgtgcgccgcctgtaccttcggatccaggattgcttcggtaggcccatagcaagtgcaccagatgcttggtttgatgttgttgagcgctactccaatgacagtaacaagacattaaagcgtacttcaaataccacaagatgcctcaacctaggatcctacaattaccttggatttgcagcagcagatgagtactgcactccacttgtgatcgagtctctcaagaaatactcacccagcacctgcagtgttcgcgttgatggcggcacgaccaaacttcacactgagttggaggagttggttgcacgctttgttggaaagcctgctgctatcctatttggcatgggttatgttacaaactcggccatcattccttgcctagtaggaaagggtgggctgataattagtgactcactgaaccataactcaattgtcaatggtgcaagaggatccggtgcaaccgttcgggttttccagcataactcccctgctcatttggaagaggtcctgagagagcagatagctggtggtcaaccacgcacacacagaccttggaaaaagatcattgtcattgttgagggtatctacagcatggaaggcgagctgtgcaaactacctgagatcatagctgtatgcaagaaatacaaggcttacacttatctggatgaggcccatagcattggcgctgttggccagtctggttggggtgtttgtgagctccttggggttgatccagctgatgtggacataatgatgggcactttcactaagtcatttggatcatgtggtggatatattgcagcatcgaaggagataattcagcacctgaagcttagctgcccagcgcatatttatgctacctccatgtcaccaccagcagtacaacaagttatttcagccattaaagtgatccttggagaggatggctccaacagaggtgcccagaaacttgcacgcatccgtgagaacagcaatttctttaggtcagagctcaagaagatgggttttgaggttctcggagacaatgactctccagttatgccaataatgctctacaatccagccaaaattccagctttttccagggagtgccttagacaaaaggttgctgttgtcactgtggcattccctgccacacctctgctccttgcaagggcgcgcatctgcatttctgcttcgcacactagggaggacctgataaaagcccttgatgttatcagcagagttggtgatcttgtgggcatcaagtacttccctgcggagccgccaaagattgctgaagctgatcacgataagctggagtaaatgatgaactgggttgccccattgaatgctcaagttgctggaatcttgtaaacaaggcgcatgttgttgattggtttcatcggtttgacttgggattttgttgatacctgagaatccagagcctgtctcattagctgactactgttggttgtacaatttacacttctaaaatgtgtatagctggtcgaagtttgattgttctattgttaatcgattttcttcatgtaatacttgatagacacaatataaattaaatttatgatagaacatttctattg

SEQ ID NO: 18622 - DNA, 1880 bp, Oryza sativa
  ref <308>: DATABASE ACCESSION NUMBER: AK069008
  ref <309>: DATABASE ENTRY DATE: 2001-12-06
gatcacggtgcacatatagcacagcaaaacgtgtgcgtgtgcgtgtgcatgtgcgagtgcatgacgtgctagctactagctaagtactagctagccagtcagctccgacgatgagcagctgcttcaacggcggcgccggctggccggagccggtggtgcgcgtgcaggccgtgtcggactcgtgcggcgcgacgatccccgagcggtacgtcaaggcgccgtccgagcggccgtcgtcgctggacggcggcggcggcctgaacaatatcccggtggtggacatgtcaatgccggacggggaggagaccgcccgcgccgtggcggcggcttgccgggagtggggtttcttccaggcggtgaaccacggcgtgcgccccgagctgctgcgccgggcgcgcgcggcgtggcgcgggttcttcgcgcggcccgcggaggcccgcgaggcgtacgccaactcgccggcgacgtacgaggggtacggcagccgcctcggcacggccaagggcgggcccctcgactggggcgactactacttcctccacctcctcccggcggcgctcaagagccacgacaagtggccgacgtcgtccgtccccgcgggcggcggcggcctgcgggaggcgacggaggagtacgcggaggaggtggtgcggctgtgcaggagggtgatgaggctactgtcgagggggctcgggctggacgacgggaggctgcaggcggcgttcggcggggtcggcggcgagggcgcgtgcttgagggtcaacttctacccgcgctgcccgcagccggagctgacgctcggcgtcgcgtcccactccgaccccggcggcatgaccatgctgctcgtcgacgaccacgtcaggggcctccaggtgaagaacgccggccactggatcaccgtcgaccctgttcccgacgccttcatcgtcaacatcggcgaccagatacaggtgctgagcaacgcggtgtacaagagcgtggagcaccgggtgacggtgagcgcggcggaggagcggctgtcgctggccttcttctacaacccgcggagcgacctgccgctggcgcccatgccggagctggtggcgccgccggcccgcccggcgctctacccgccgatgaccttcgacgagtaccgcgagcacatccggcggtgcggcctcagcggcaaggcgcagctccagtctcagcagatggcaaccgccatctgcggcgcccctcccgccgctactgcgttttcttcttcttcctcctcagcgagcagtctagctcgctagctagctattccctttgtgccaaaaaaatagcctatataagaatggaatataacttaggacaatgaatatgaacatatttatttcgagattcgttgttataggttatgtcctatcctatttaggttagctttttggtacaaagggagtagttggcttcaacttgcaagctccgatatccatccagaaggaacatgtttttgtggatagcgtgcgttggcgacctgtagatattattactctctccatctcaaaatataacaacttgtcctcaggatttgtcccaaaatataataacttctccaccaacattttcttcccaaccaatcataaccctccaccattcacttttcccacctacctccactactcatctaatcacaaccctccaccatccacttctacctactttcttaataaccgtgtcgaactctaaaacttcttgtattttgggatggagggagtaataaataattgatgtttattctactttgtgaagatcatggtgcagagtgagacgacgtggtgtatagtacataaactcgtctcacgcgcctaaattgtcaccacatgcatgacaaagttactcgcctacgtacatatattatt

SEQ ID NO: 18623 - DNA, 1904 bp, Oryza sativa
  ref <308>: DATABASE ACCESSION NUMBER: AK069009
  ref <309>: DATABASE ENTRY DATE: 2001-12-06
cacaaactcctaaacccacaatatacaacccaagatacccgggcacatttacagaaatgccccccaaactcctcacttatctcatcctagccctcctcgccgcctccgccgccgcagcgcggcgccacccgtctccggcgagctcagccgccgccggggagcccgtctacctatggccgctgccgaggaacttcacctcgggttcccggaccctgctggtcgaccctgacctcgcgctcgacggccagggccccggcggcgccgccgcggcggtggccgaggcgttcgagaggtacagatcgctcgtcttctctccatgggcgcacgccgcgcgcaacgcctcgggtgggtacgacgtcgggaagctcaccgtcgtcgtcgcctccgccgatgagaagctggagcttggagtggacgagagctacacgatctatgtcgcggcggcgggcggcgtcaattcgatcgtgggtggagcaaccatagaggctaacaccatatatggagctattcgtggattagagacattcagtcaattgtgtgttttcaactacgataccaaaaatgtcgaagtgcgtcatgccccatggtacattgaagacgaaccacgctttgcttttcgtgggttgctccttgacacatcaaggcatttcctcccagtagatgtgattaaacaagtgattgactccatgtcattttctaagctgaatgttcttcattggcatatcatcgacgagcaatcttttccattagaagtaccatcatatccaaaactatggaagggttcatattcaaaattggagcgctacactgtggaagatgcacgtgatattgtcagctatgctaggaaaagaggtatccatgtcatggctgaaattgacgtgcctggccatgcagaatcatggggaaagggatatccaaagctctggccttctcctaagtgcagagaaccgttagatgttactagcaatttcacatttgaagttatttctggaattttgtctgatatgagaaaaatctttccatttgggctcttccacttgggtggtgatgaagtatatacaggttgctggaatgcaacaccccatgtgaaacagtggcttcatgaacgcaacatgactacaaaagatgcttacaaatacttcgtcctgaaggctcaagagatagcaattaaccttaattggattccagtaaattgggaagaaaccttcaactcattcaaagaaaatctcaatcctctaaccgtggtgcataactggctgggtcctggagtctgccctaaagttgttgaaaagggtttcagatgtataatgagtaaccaaggtgtatggtaccttgatcatcttgatgttccctggcaagatttctacactagtgagccactcgctggaattaataacacagcacagcaaaagcttgtacttggtggagaggtttgcatgtggggtgagacagcagacacctctgatgttcagcaaacgatatggccacgagcagctgcagcagcagagcgtatgtggagtcagttagaggccatatctgcccaagacctggaaacaaccgtcttggctcggttacactatttcagatgcctgctgaatcaccgtggaatcgctgcagctccagtcacaaactcttatgctcggcgtcccccaattggtcctggttcatgcttcattcagtaaacagggagctgcagagcaaagataggcataagaggggtatttgcctccatacaccttccacacttcagacaaaaatggtatcttgtcaattttagtgtactgtttctgtatgtttgtttgcattacattacctatcacacggatgtttgacaataaaattttatagtccctcgtcatgtattttcgccctaagtttcaaataaaactgcagagccgttcctt

SEQ ID NO: 18624 - DNA, 1782 bp, Oryza sativa
  ref <308>: DATABASE ACCESSION NUMBER: AK069010
  ref <309>: DATABASE ENTRY DATE: 2001-12-06
gtttcaaatcctctcgaaaccaaacaccccggaaaaaaataatttattttttataggagaaaaaaagaggagaaaaaaaagggaagaaagagatggacgaggcgtgggagagggcggtggaggcggcgctgcaggccgccggagaggggagctcgtcgccggcgaggagcctgacgctggacggcgccgtgaagtgcctgcacggacggctgcccgcggcggagattctggagcggtaccagagcctggagctcctgtcgatcgccggcgtcggggtcgcgtcgcttgccgggttccctcggctgcggaacctgacgcgcctgacgctctccgacaaccgcatcgccggcggcctcgaccacctcgtcgccgccgggctggcctcgctccgcgacctcgacctcagcaacaatcgaatccaggacgtcggcgacctctcgccgctcgccaacctccgcctcgtctcgctcgacctctacgagtgccccgtcacgcgggtcaaggattacagatccaaggtgttcggcatgatccggactctcaagtacctcgacaagatggacgccgacgagaacgagaggccggagtcggatgacgacgacgacgacggggatggcgacggcgacggcgaggaggaggaggacgacgacgatgacgaggatgaggatcctggcagcggcgaggtggccaacggaggcgtctcccacccgcgcggtggcgtggcgtcgcacccggtggaggtgaacggtgtgatcgatgtggacgaggacgagagcgacgccgacgaggtcgtcccgaacgggggagacgaacaccacgctaatgggtttcgggtcgcggccgttggggacgaggatgaatatgtggaggaggaagacgatgatgatgaggaagactatgaggaggaggatgatttgggggaggagatcgatggggatggtgatgacgaagacgctgttgttgaggtgcatgatgtaccaagtagcagtgatgaggaggaagacggcatcgaggaagaggatgaggaggaggacgaggatgaagaggaggttgaggatgatggtgaggaggctgagccagagagcagcgggagggtcgctttggcggtgggggacgttggagaagagattgatgggcatgagcacggagagggggaagatgaggatgagaacggtgagattggagaggaagatgaggagagattggaggatgatagggtttatgaggaggggaatgatgacgacgaggaggatgtggatgatgaggatgaagacacagaatatcttgttcaaccaattgctcaacctcaggccatggcggttggaaacgactttgatgcagctgaggctgatgatgctgatgaagatagagatgaggttgatgacgatgatgatggtggtacggacctgccctcgtcctcgcagggcgctaagcggaagagagatgatgatccatcaggcagtggagatgacgacgaggacgatgatggtgtcgaggacctgaggcccttcaagcaccactgaccaagcagcaatgtacatggatcccttcctccccctcttctcagctagaaaggaccaagcaagcagcagcaggagcatcagcaaacagaaatggtaggtttccccctgttttttcttagcgtttttcttgtaaagactttggattgagagagagcttcttcatccagccttcctcttcaaacatcagattttaggagggaaaatggagatacctgtgtagcaacttagcaagtagccatggcagctcagtttcagtttc

SEQ ID NO: 18625 - DNA, 2235 bp, Oryza sativa
  ref <308>: DATABASE ACCESSION NUMBER: AK069011
  ref <309>: DATABASE ENTRY DATE: 2001-12-06
gcggctcctcccctctcccccgatccccttcctccacctccaccccccacccgccgatcgccccccgcgagctcgtcccgtcgcggcgggcgatcgctccacccacccatccacctccaccttcccgcgcgattccccgagaggcggggcgaggcgaggccgctatagctccgctccgctccccgaccaccacgacgcggctggcggcggatcctccactccacccacccaccccgcttccgccgatcggatcgcgtgctccccccgaggtagaggtgatgataaatcatagttagtgacttagcttgcagcagttctttcttgcagctaagacaaataataattggcgttatggcatatagaaatacggtatgcactccccaagtaattgatctagaaactgaacaagggcactctcatattcattctgaaagttttaatcgcactgggaatgattcatctgaccaaggtgcacaacatgctgtcagaggggtaggaaatgctacaaacattggtctatctgatatgcgaagttactatgatgcgggcatgaaccatccacatcaacctgttcataacttgcctccaaatttaggagttgattcaggttttgtcttcccatccagtatgtacaacccctgcatgtcgacaacatctatgaaccaatatgtttctcacactcagagcttcggattgccatcaaaccaagttgttctaggaagcatggatgaaggtagcagaaatgaaaatgctggtgaaagtgctagaggattcattaaaaggaaaaatgctgcagttgcaggaagttaccactgtgctaatggatttgcaagttcaagctcttctcatgcatctctgaatcctacacataggccatgggatccttcttttgagtcaaatgttttgcctaacactgcatcatataacccatcagagtaccatagccagaccagttggccatctatggaaggatcttccattcccagtaatggctttaatttgatgggtgctcacccagaatcagcacagcatggtaattatgcatttccaactagtcacatcagccagtgctttcaacctactagcaatacatggatttcccagtctgcaaatggtattgctgatggaataccacagtgggaatatgtcaatggaatgaataatgctccaggcagattttcccgttcaggtatgacagaaacagtgaatggaagcttccgtgaatatcagaatggcccttcaaccttatgtcgagggcctttaccctattttcatcagcatgctggcatgcatgctcataatctgcttgatcatacacaagtgcaagctccttaccaacaatgccacaataatcctgtcttacatggtgtaaatcattctggcaaccggttccatttgggtccaaggattccagttcttttctctaattctgaacgtacttttgggcctccacatcatccactcttggcaaatccagtgaaccacagaaatatacgaatcctgccacctgagcatgctacaataatggatttttcaagattgtatgaagtgtcaaatgttgtagatgagcatagagatatgcggctagatatagacagcatgacatatgaggagcttttagcattagaagagcagattggagatgtaaatactggtctggcaaaaagctacattgtagagaaattgaagactagcttatttgtgccaggatcatcctgcatgtctaataagtcttctgaatcttccatggagaatgatgcttgcataatatgccaggaagagtatcaggttaaagaatgcattggaacccttgactgtggccacaggtaccacgaagattgcataaaacaatggttgatggtaaagaatttatgccccatctgcaagacgacagctttgtcaaccggaagaagaagtggataacgaacaggaataatcttattagttatttacttccgacaaatattcagctcaattttgtatataagaaacggtagaccattctgctacctgtatttgttgctcactttgttgtgatccgggagtaactcagcttcctaaactgtacagccataacattgatcattttcttcggtgtagaatattttaaattactcagttcgcccccatctgtatcataaggcggaccgacaaaaaaactcacaatgtcatttctaggcaaacattgtatctaccatcagattaaaaatcagaacagaacatgtgctcttctgt

SEQ ID NO: 18626 - DNA, 2162 bp, Oryza sativa
  ref <308>: DATABASE ACCESSION NUMBER: AK069012
  ref <309>: DATABASE ENTRY DATE: 2001-12-06
gcgcgattcgccgtctccatctcgtctcccgcttcctccccgcgtccgccacgccaccccccacctcgccgcctcgccgtggctgctcctcacctcccctcccctccccgccgccggtgctccggccttcgctgccgccgtgctttctctatctatcctcttcccccacgcggacgggggtgcggcgattcgggctctccgccggacacgcgtcgcttcggcctcaactgaagagccacgcttcggtctcgactctcgaacccccaagtttgttgcgttgcagaagattcgtttgatgcgtgctgaagtacaatcgtgaaaggaaggaactgtgccaacaccacctgattggtactcctgtcgttcttggacaggagattgattttgcttcggtaggagacccaattgcggatggaatatgcacacgtgcgttgttaggtaatgacgagcttgcctgataggggtgtatcatcgtcttcatctgatccgttgtgcgagggtaacattgcaccttgttcttctagctcggaacagaaggaggattgtagcctgaaacaatcgaaaacctcgatcctgtcctgcgttttcaattcacctttcaatatctttgaggcgcaccaggattcgtccgcaaacaagtcgccgaaatcgtcctctggatcctatgattggtcgagggtattgaggaggatcgtgtgctctggctcaatgtggcgttttctgggcacctccaaggttctcacttcaagtgatgtgtggttccttggtaaatgttacaagctttcgtcggaggagtcgtctagtgactcagattccgaaagtgggcatgccacatttcttgaggacttctcgtcaaggatatggatcacttatcgcagaggctttgatgccatctctgattccaagtatactagtgatgtgaactggggctgcatggtcagaagcagccagatgctggttgctcaggcattgattttccaccatcttggcagatcttggagaaggccattggagaagccatataacccagaatatatagggatcttacacatgtttggtgattctgaagcttgtgctttctcaattcacaatttacttcaagctggaaatagttatggtctggctgctggatcatgggtgggtccatacgccatgtgtcgggcatggcaaacccttgtccgcaccaatagggagcaacatgaagttgttgatgggaatgaaagtttccctatggctctttatgtggtatccggtgatgaagatggtgaaagaggtggagctccagttgtttgtattgatgttgctgctcagctttgctgtgatttcaacaaaggtcaatcaacttggtcaccgattcttttgctggtccctctggttcttggtcttgacaaaattaatccaaggtacattcctttactaaaggagacgttcacatttcctcagagcttggggattttgggtggaaagcctggaacatcaacctacattgctggggtacaggatgacagggcgctctacctagatccccatgaagttcagatggcagttgatattgcagctgataacatagaggcagacacttcttcataccactgcagcactgtacgagatttggccctagacctgatagatccgtcattggctattggtttttactgccgtgataaagatgacttcgatgatttctgttctcgcgccactgagctagtagataaagccaatggagcaccactcttcactgttgtgcagtcggttcaaccgtcaaaacaaatgtacaatcaggacgatgtgttgggcatctcaggggatggcaacatcaatgtcgaggacctcgatgcctcaggtgaaacaggagaggaggaatggcagattctttagtgaaggaacaaaactgacctcatgaggtacagaaaacgttgcgtccaacacgtcggtcgaatgcccttgtttatgtgtgggtgaatagaaatgactcgttgtgttgtctacagaacaagctggcactgtctcgataccccagggggttgggtcttgggagaatcagctttaggtgctaccgatgtaaaaatgtgatcagttcatcgctcattcgttggaaatctccttgtatcatacatgctcttgtggttggctataactcaaaatttattatacgttctgtt

SEQ ID NO: 18627 - DNA, 1262 bp, Oryza sativa
  ref <308>: DATABASE ACCESSION NUMBER: AK069013
  ref <309>: DATABASE ENTRY DATE: 2001-12-06
gatggaggcagagcacccgcaccagatcacatacaccaccaccaccaccacctccacctcatccctctgcccgcgccgcaggaagagaggagacgacgaggcggcgcaccacctcgtgttccccatggatctcgactcggccgcggcggcggctgcggcggcggcgcaccaccagcagcagcagcagcagaccacgtcccaggacaagctgaaagcattggcttatgagtacggtcatgagttccgagtattttcaagtgtaacatttgagtcaatgactagcaacttgcccgcagcagatcaggaggaagatgatgacttttatgagcttcagcctgctgactatttcaacttggtttcgaacagaataggagaacaatcgaaagttttgaagactcgtaaaatgcgtgaagcagaacttgctgcccaacgagcaaagataaaaaaggcagtaatgagggtgcgattccctgatggatacatacttgaggccgattttcatccgtcagaaacagttcaaagtctgatggattttctgaagaaagtaatctctagaccagacctgccattctatctctatacagttccaccaaagaagcggataaaagacacttcactggatttctacacaattggttttgttcctggggctaatgtctacttctcttatgatctgccggaaggctcagagttaaatacagacagtgtaaaatcaggaccttatctccgtgaagaaattcggatgttggatggactaccaattgtccaagaacctgtgcaccaaccaattgattctactatgaactcttcttctgctcatcaatctgatgtgtctcaatcagattttgcaccgccagcaaacaagaaaccagctaaaccaaagtggttcaaaaggtgatgatgaggtgagacagtcagggcgccaagaatgcaccaccagaggacgactctaatgtagggggatagagagtgaaagcatgacaataatgggttgctgttggctttcttgatggatggatacacattgtaaaatgaaactttccaaagaaatttcacgagtgctgcagaatgattttttgcgtctgatagcactgcattacactgtacactccgttgctaacaaagcctcccttttcctgagtgcatatggctgggggtgtttggttgattgcttcactttgtcacgccacacttcagtcatgccacagtttgtagatgtgtgtttgtttcaatgccacagttgtgtcatgccacacttttct

SEQ ID NO: 18628 - DNA, 2162 bp, Oryza sativa
  ref <308>: DATABASE ACCESSION NUMBER: AK069014
  ref <309>: DATABASE ENTRY DATE: 2001-12-06
gtagtgtgtccctctctgactccccacctcgcgctcgcctcacccgaccatgccgggcctcgccgcggccgacaactcgccaccggtggcggccccgccgccgaggcggctgtcgtcgccgctgcccaggagccgggcgccgccgtcgccgtcgccttccacctcgtcgcgggccaagcccaggaaggtggcggcgcagccggagacggacgaggcggcgctcgacaacccggatctggggcccttcctgctcaagcaggcccgcgacgccatggtctcgggggagggcgggggcgccgcgcgcgcgctcgagttcgccgagagggccgcccgcgcgctcgagcgccgcggcgagggggccgagctcgagctcgccatgagcctccacgtcgccgccgccatccactgcggcctcggcaggcacgccgacgccatccctgtcctcgagcgcgccgtcgccgtcgtcacgccgcctccgcctccgccgccgcctgagggtgagagctcggcggaggagcagccgcccgaggaccagcagaagggggaggagtgggccctcgccgccttctccggctggatgcagctcggcgacacccacgccatgctcggccgcatggacgagtccatcgcctgctacggcaagggcctcgagatccagatggccgcgctcggcgagcgtgatccccgcgtcgccgagacctgcaggtatttggcggaagcgcatgtgcaagccctgcagttcgatgaagcagagaagttgtgccgcaaagccctcgagatccaccgggagcacagcgctcccgcttcgctcgaggaggcctccgaccgccgcctgatggcactcatccttgacgccaagggtgactatgatggtgccctggagcaccttgtgcttgcctccatgaccatggtcgccaatggacgtgacattgaggtcgcgacgatcgatgtcgcgataggcaacacctaccttgccctcgcccgcttcgacgaggctgtcttctcctaccagaaggcgttgacagtactcaagtctgcccgtggtgatgaccacccttcggttgcatctgtctttgtccgcctcgcagacctttaccaccgaacagggaggctccgcgagtccaaatcctactgtgagaatgcactccgtgtctatgcaaagcccgcgcctggcgctgcccctgatgaggttgctggaggcctaatggagattgctgccatctatgaggcgcttggagaccttgatgaggcactgaagcttttgcaaagggcactaaagttgcttgaggactcaccaggacagtggagcactgttgctggcatcgaggcacaaatgggtgtgttgtactacatggtagggaggtatgccgattcaaggaactcatttgaaaatgcggttgccaaattgagagctagcggggagaggaagtcggcattttttggagttctgttgaaccagatggggctagcttgtgtgcagctattcaagattgatgaggctgcacagttgtttgaagaggcaagggcagttctagaacaggagtgtggtgcctctcatccagatactctcggcgtctacagtaatttggctgcaatctacgatgctatgggcagggttgaggacgccattgaaatactggaacacgtacttaaggtgagggaagagaagctcggcacagcaaacccggatgtcgaggacgagaagctaaggcttgcggagcttctgaaggaggcagggcggtcccggaacaggaagcagaaatcgctggaaaaccttttcgtgaccaactcgcagcgtgttaagaaagatgctgggaggaggtggtccaactttggcttcaggagttgaggaacacaccctcacctcacctggtgatggagggtggcctttgtaacataaagggaagaagaagaaaaaaccacatgtgtaaaggtgttgtagactaggaagaatatgatgatgattgtgtttgccgtttgagattctaaaatgccattgttgtgaattacagctcgctattatctcgagtatttttttttctcccccacagttttaactggttcttagtgttgtatttggataatgtattgatttgtgctggtggttgatgatgaattaatactactactgttaccacctgtgatgtgatttgtttgtcacc

SEQ ID NO: 18629 - DNA, 2778 bp, Oryza sativa
  ref <308>: DATABASE ACCESSION NUMBER: AK069015
  ref <309>: DATABASE ENTRY DATE: 2001-12-06
gaatggcaaggggggaagaagagtggaggaagaacctaagcagcaaaccctagtcgcgactacaccaccaccaccaccattgattccgatggacttcgcggagctggaggcggtggagggcctccggtggccgtggcacgcgtggccgccgaccgcctccgccgccgcgtcgctcgtcgtcccgacctccgtcctctgcacgccgctgcacccggcggcgcccgacctcctcccgctcctcccctacgcgccgctccgctgcggcggcggcggaggagggggagggtgcggcgcggcgctcaacccgttctcgcgtgtccaccacgccacagcgcggtgggcgtgcccgttctgcggcgcgtcggccaacccgttcccgcgcctcctcgcccccgacgcgctccccgccgagctcttcccgacccactccagcgtcgagtacgcgctgccgccggacgccgccgaggccggcggcgggccgggccctccgtccgtcgtgttcgtcgtcgacgcggccacctcggggccagagctcgccgcgctcaaggcggaggtgctcagggtcgtgcaggggctgcccgagggggtcagggtcgcgctcgtctccttcgcggcgtcggtgtgggtgcacgatctcggcttcgaggggtgcaccagggtggtggtgatgaacggggagcgcgagctcgagtcggagaagatacaggaatttctaggtgttcgtgatgctcgatacaataagttggctatgccaaggtccactaaagtgcagagatttttgctgcctgtttctgaatgtgaatttaacatcacatctgcgatagaagacctgagatccatgtctgcttgcccacgtgggcatcgccctttaagagccactggtgctgctatttccacagctgttgctcttctagaaggttgttgttcacctaatgccggaggtcggatcatggtcttcacatctggtcccacaacagttggtccagggcttgtggtggaaaccgatctcgggaaagcaattcgttctcatcgcgacattttcaatggcaatgctcctctcattgacaaagcccgagaattctataagaaagttgcaaacaggttaacagctcatgcattagttcttgatctatttgcttgttctctagatcaggttggggctgcggagctgagatacccaattgaagtgtctgggggcttaatggtgcatacagaatcatttgagtctgagcagttcaaagcctgtttaagacacatattcaatcgtgagggtgttggttaccttaacatgaactttaatgcaacaattgagatagtaacatcaagggaggtgaaaatttgtggtgcccttggtccctgcatctctcttcacaggaaaaacagctctgttagtgataaagaaattggggagggtgggacaaactattggaaaatgagtacagtggacagcaaaacctgcatcgtgttcttcttccgagtggactgtagccataatactgagcccccaactgtcttctttattcagttcatgacgaggtaccggcatggtgatggtagctatcgcctaagagtaacaactgttgcgagaagatgggctggacctcgttctcctgagattgcagcagggtttgatcaagaagctgctgcagctgttatggccaggcttgccgtgcacagggcagagacataccatgttagagatgtgataagatggcttgataagatgcttattcgctttactgccaagtttgggaactatgtccctgaagatccatctacattccggctgtcaactaacttctcgctgtatccccaattcatgtactacctgcggaggtcacagttcattgatgttttcaatagctcccctgacgaaactgctttctttcggttgatgttgaatagggaaggagttgtggggtccctaatcatgatccagccaactttattccagtactcgtttgatggcccacctattcctgtgttgctagatgtcagctccatctctcccgatgtcattttactatttgattcatacttctatattgttattcattatggctcaaagattgctcaatggaggaaacttggctatcataaggacccaaatcatgaaaatttgcggaagctgcttgaagccccagaagttgatgcggaggcactattggtagaccgtttcccagtgccaaaactcataaaatgtgatcagcatgggagccaggccaggtttcttctagctcggttgaatccatctgtgacacagaaaacacagctttcagatggttctgaagtcatattcaccgacgatgttagtttgcaagtttttattgaacacttgcaggagctggctgttcagggttagtgaggcatggagcctggcgatgtttccacttttgcagttggacccacctctgatcctgaagatatagctttcagaaggattgaatgtcatattcacagatgatgtttgcttgcaagtttattgaacacttgaagtaatttgctgtgcaggattgatggatcatgtggactgtttatatgttactttctggtcttctgttatcttgaaagttccgggagagctttactgcttggaaggatgggatctcctcgagttgttgtacatttcaccagctccagtttgatgtaagccatcacttaatatttttgtatagaatgctataatgtctattatttatgctctacaagtgctggagttctcttgagacatttgctaatttctgagcagtaaaacaccctttgccttccaattctggt

SEQ ID NO: 18630 - DNA, 1523 bp, Oryza sativa
  ref <308>: DATABASE ACCESSION NUMBER: AK069016
  ref <309>: DATABASE ENTRY DATE: 2001-12-06
gacagtacagacagaaatcccactttccggcagacggagatgtccacctcgccgtcgccggcgccgccgcagccgcttgacaacgacgacctcctctcggagatcctcctccgcctcccgccgcagccgtcctccctccctcgcgcctccctcgtctgcacccgctggcgccgcctcctctcctccgccgcttccgcgcccgccaccggcggccaccactcctcggcctcttcaaggaagattcagtataccccatcttcatccccacgctggactcgccggaccgcatcccgcccgcgcgcttctcatggcgggtccccggcggcagcggcgaggactaccaccagctgttcggatgccgccatggccgcgtccttcactacagccggaggcggcgcctactcatggtgtgggatcccctcaccggcgaccgccgcgccgtggatatcccggcgctgttccatcgctgggacatggtcgtctaccatgggtcggtgcgctgcgtcgacggcgacggctgctactccaacccattcgaggtggccgtggtaggaactgacacgagcgggacagtggcgttcatctgcgtttactcatccaagaccggcaattggggaaatgtggtctcagccccgattagtcctggggattacatgtcattttccagtatcctggatggggatttcctctactggttgctgggaaatcatgggtgcccaatccttcagttcaatttggttaaacagacagcaactctggttaacgcgccaccggatttgcgtaccaattcgtatggcggcttccatattgcaccagcagaggatggtggtgggcttgtaatccttgctgtgacacatttcagtctaaatgtatggaagggtaagaccaatcgtgatggtattgctggatgggtgctggagaaaaccattgaattggacaggctcctttctttcggaacaggacctgagacatgggcaccagtgattctgtgctttgcagaggaacatgatgtggtatttttgagcacgcatgttggtttcttcatggtcaatatgcagtcaatgcaattcaagaatattccccaaatcctgaaaggaggcctgtattatcctttctctagcttttatactaaagaagccgcagaactgttgcccccatgtgatatgtccaagaagcctaaggttccatttgctggtgcgttgcctgatattgaagaatatggttcaaatattggagagattagttgctactaattctggtccaaggcataagaagaagataaatccaaaacaaaccttttatgtgggctctttacaagtggagatcgatccaaactaatggttcggtcatgcttaattgaattaagtacctatcagtagtaacctagccgcattagtttattccttatgcaggtgctagctttgtgtccttttgtgtttgctgtgaacatgtgattcgatgttgtctatctggtgaaggaaaactgaagaatcacttcactttggtataatgtgtcatttgtg

SEQ ID NO: 18631 - DNA, 1763 bp, Oryza sativa
  ref <308>: DATABASE ACCESSION NUMBER: AK069017
  ref <309>: DATABASE ENTRY DATE: 2001-12-06
ggcttctactactcttcccgtgctacggtagcgaaaggaaagagacgcaaatggagatgaccctgccattgctcggcgccgccgtcgtcctcgccgcgttcctcctcttcttcctcgtcaagaacaaccgttgctgctggtcgccggcggcagagaggcggctgcggttgccgccggggccgtggcggctgccgctcgtcgggagcctgcaccacgtcctgctgtcgcgccacggcgacctgccccaccgggcgctgcgcgagctcgccgggaggtacggcgcgctcatgctgctccggttcggcgccgtgccgacgctcgtcgtgtcgtcggcggaggcggccagggaggtgctcaagacgcacgacgcgtgcttcgccagccgccacatgacgcccacgctcgccgtcttcacccgcggcggccgggacatcctcttctccccctacggcgacctgtggcgccagctccggaggatctgcgtgctcgagctcttcagcgcgcgccgcgtgcagtcgctgcgccacgtccgcgaggacgaggcggcgcgcctcgtccgcgccgtcgccgaagagtgcgccataggcggcggcggcggcgctgtggtccccatcggcgacatgatgtcccgcatggtgaacgactccgtcgtgcgctccgccatcgggggccggtgcgcgcggcgcgacgagttcctccgcgagctcgaggtctccgtcaggctcaccggcgggttcaacctggccgacctgtacccgtcgtcgtcgctggcgcgctggctcagcggcgcgctccgggagaccgagcagtgcaaccggagagtgcgcgccatcatggacgacatcatccgcgagcgcgctgcaggcaaggacgacggcgacggcgaggacgacctcctcggcgtcctgctcaggctgcagaagaacggcggcgtgcagtgtcccctcaccaccgacatgatcgccaccgtcatcatggaaatattttcggccgggagcgagacagcatcaacaacgcttgagtgggcaatatcggagctagtgagaaacccaaaagtcatggataaggcccaatcagaggtcaggaaattgttcgagggacaagacaatctaaccgaggacgacatgagcaggctaagctaccttcacctggttatacgggaaacacttcgcctacatgcgccagcaccattccttctacctcgagaatgccgtgagcagtgcaacgtcatgggctacgacataaccgaaggaactcgagtgcttgtaaatgcttgggccattgcaagggatactaggtattgggaggatcccgagatttttaaaccagagagattcaacgcgaatctcgttgatttcaagggtaatgatttcgagtatatcccttttggctccggtaggagggtgtgtcctgggataacacttgggctaactagtatggagcttgtgcttgcaagtttgctttaccacttcgattgggagctcccaggtggcaagaggtgtgaagagattgatatgtcggaggcattcgggatcacggtgcgcaggaaatcgaagcttgtgttgcacgctacgccacgtgttccgtgtttgcattaacagtggttcgatgctttcgcacgtgtatagacgatgcatgttatatttgcaggattgtatattgaaatacttaagattcttatgatggagaaactactcccatctggtcataaaatgcttcactttcatgtattatcaaatggactagttttaagtttcgaagat

SEQ ID NO: 18632 - DNA, 1014 bp, Oryza sativa
  ref <308>: DATABASE ACCESSION NUMBER: AK069018
  ref <309>: DATABASE ENTRY DATE: 2001-12-06
ggcttctcctccgtatcctcctccagatagcggcggctgcctcgccttctccgacgagctccaccgccgagtcgccgccccttgccaggacaggatggtggtggccacggaggaaatggcggtctactgcttcgacgccctcgtctcccactacagcggcgaccagccgccgccgcccgccttcgaggagggcatccacccattgtttgtcacctggaagaaggctaccaatggttcagaaccacgccttcgaggatgcattggaaccttggaggctcgtcagattgtcactggcttcaaggagtatgcgctcacaagtgcattgagggaccgccgctttcctcctatacagtcgaaagaactgccgtatttggagtgtacagtatctatactgaccgaatatgaaactgcacttaaccaccttgactgggaggtgggtaagcatgggttaattattgaattcactgatccagactataacatgaggcgcagtgcaacttatttacctgaggttgctgcccatgaaggatggacacatctagagaccattgactcactgatgaggaaggcaggttacaatggtaccataaccgactctttgaggaagaaactccgtgtcacccgctaccagagtaccttgtacactatgcactatggtgaatacgctgcctacgtcaagaagaacagaggagctgcaccagaaattaacggggcacctataattaatggcttcaaaccaggccattgaatcatctgtattgcatcatctaaaatgactttataatttatctgggagcacctggggtgagaatttgtttggaaaactccaccccttgccgctcattgatatgccatcattttcattcgaaagaaaggggaagctatgacagcatatcccctaaattatgccgcctggacaaacagtggtgaattagttatgtatcttgcaaaaattatgggcttccggtgcccaaaaaatgatggcatgaattgattcaagctgctttgttaccc

SEQ ID NO: 18633 - DNA, 1270 bp, Oryza sativa
  ref <308>: DATABASE ACCESSION NUMBER: AK069019
  ref <309>: DATABASE ENTRY DATE: 2001-12-06
gctctctctctcactccaagaactccacgccaccatccccaccgcctccattccaccgccgccacaagcctcgcctcgccgcgccgcgttctcggccacggcggcgccaatggccgaccgcgtctacccggccgcgaagcccaacccaccgccggcaatggcgaacgcgggcggcggcggcgcgacggcgtcgttcccggcgcccaagtcgcagatgtaccagcggccaatctaccggccgcaggcggcggcggcgaagcggcggcgcgggcgttcctgccgatgcagcttctgctgctgcttctgctgggcgctgctggtcgtcatcctcctggcgctcgtcgccgccgtcgccggcggcgcgttctacctgctctaccgcccgcaccgccccagcttcaccgtctcgtccgtcaagctcaccgcgctcaacctctcgtcgtcgcccacctcgccgtcgctcaccgactccatccagctcaccgtcaccgccaagaaccccaacaagaaggtcgtctacctctacgacgacttctccttctccgcctccaccgccgccaacgccgtcccgctcggcgccgccacgtcgccgggcttcacccacgacgccggcaacaccaccgtcttcaccgccaccatcgccgccaacgccgtcgccgtcgacccggccgccgccgcctccgacatcaagaagtccggcgccttctccgtcgccgtcgacgccgagacgcgcgccggcgtcagggtgggcagcctcaagaccaagaagatcggcatccaggtgcactgcgagggcatcaaggtgacgccgccgccgcccgccgccctgccgcgccccaaggcggtgaaggggaagaacggcaccgtgctggctccggcgccggcgccggcggactccgacacggcggcgaccaccgccgcgacggtgagcaccgcggcgcactcgtgcaaggtcagagtccgtgtcaagatctggaagtggaccttttaggtacagaatttcgcgaaagtttaggggctcggatgcaaaattttcagaaaaaaggattttcactttatcatttattatatattggagtagaaataccatgcgtcggtggggtgtaaattctctcaaacatttgtttttttgtttttttgcttttcgttttcttctatattatcttattaaatacttttttcctcctctttgtagcgaatgtactgtataattttgtgatttattatttgtaacattataatttgaattttatatttaaattttctaccc

SEQ ID NO: 18634 - DNA, 2437 bp, Oryza sativa
  ref <308>: DATABASE ACCESSION NUMBER: AK069020
  ref <309>: DATABASE ENTRY DATE: 2001-12-06
tggaatcccatgtgtcgttgggtacaaggaagaagaggatactactctccaagtagcgaaaatccacaaattccctctccggctcgcgcgcgcgctctcaattttttgggggaagagaagatctccccttggagggaaccccgcccaagaatggcgggtctcggcggcggatggggcggcgggtacgacgacgacgacgactgggggctgagcgcggacagctcgaccagctcgagcgggacgcctaccgcaagctcgccgagcgcaaggcctcctcctccgccgcctccaccgccacctcgccgctcccctccgcggcctactcgccggtcaagaacagccaccaccacccggcatccagggtttcccaggagtcttgcttcggcaaggtagaatcactttctccttctcggcttagtcaaccaaatgcatcgggaaatgcagttaataatagtcagggcaatatgtctaaggtatcagtacatcttttccttcattctactggtgtgatcgcagcgaagttccagtaccaccagaaacttgtggatgcagttcacaagatccccaaagccagctggaacgggaaggagagggtatggatgttcccacactcatcattatcagtagcagaggaagttcttagtacagtacctggaatagctgttgaggtccaaaaactggatccgctggttaagcgcgcactaactgcttctttatatgccggagatcttcgagatttgtatggcaagattccaactgatgttgagtcaaagcttatgccgtttcagcgtgaaggtgtcaggtttgctttacagcatggtgccaggaccctgatagcagatgaaatgggtcttggcaagacattacaggcaattgctgttgcttcttgccttcatgatgcctggccagttcttgtaatctctccatcatccttgcgattacattgggcttctatgattcagcattggcttaacatccccacggaagatatcttggtggtgctaccacaaactggaggatcaaataaagcaggatacagattggtatattcaaatactaaaggggattttaatctggatggggtgttcaatgtgatatctatgatgtgttcccaagataaaggacatgcttctggacttggatttaagattgttatagctgatgaatcacactttctgaagaatgcccaagcaaagagaacaatgcattcacttcctgttctgcagaaagctaaatatgtggttttgctaagtggcacccctgcgttatctcgccctatcgagctgtttactcagctccaggcattgtatccaactgtatacaagaatgttaatgagtatggtaatagatattgcaaaggtggcttttttgggctttatcaaggtgctagcaatcatgaggagcttcataatttgatgaaagcaactgtcatgatccgcaggttgaagaaagatgtcctttcacagttgcctgttaaacgcagacaacaggcctttctggatttaagtgagaaagagatgagacatattcgtgctctatttcatgagttggagactgtgaagatcaaaatccagtcctgtgactcccaggagacgatggactctctcaaatttgctcagaagaatcttattaacaagatctacaatgattcagctgaagccaaaattccagcagtgctagattacctgggtactataattgaggccgagtgcaaatttttaatatttgcacatcatcaatccatgcttgaagctattcaccaacatctcttgaaaaagaaagttaagtgcataagaattgatggtcaaacacctgtacctgtaagacagactctagtcacagatttccagaataaggatgacatcaaggcagcagtgttatccataaaagctggaggtgttgggttaactttgacagcagcaagtacagtaatctttgctgagttatcatggactccaggtgaccttattcaagccgaagaccgtgcccatcgtattggtcaggtttcttcggtgaacatatattaccttcttgcaaatgacactgtggatgacattatatgggacgttgttcaaggcaaacttgagaatttgggacagatgctggatgggcaggagaaaacgctggatgtgtcccagagcgacactaggcccagcccttccaagcagaagacgctcgacgcctacctcaagcgatgcagcaattccacagaagctgatcagcccaagctcaagaaccctaggttctgacatttctcagggtttttagctctactatgtttttgtttggcaattggcatgaccctcttgccttaaacgaaggaatgctgcagtgtcaggtagctgtgtgttggtgttatgatcacagccatgctgtattttgtattacccagctaaatgcccgtgcgttgcaatgaaaattaagaataactttgatc

SEQ ID NO: 18635 - DNA, 2369 bp, Oryza sativa
  ref <308>: DATABASE ACCESSION NUMBER: AK069021
  ref <309>: DATABASE ENTRY DATE: 2001-12-06
ttgggattggtttctttctgctctgttgcagctccgttgtctatggtaggtaccttttggacggaggttttgcatttgcctagttactagtaactgcataattaacaggaggagtactaccaagaatgcatactaattattcgcgtgatattttgtacgtttaagtttagagaacccgggattcgaccagaccatcagtccactctctctctctctctgcttcttcttgtgttgtgcttgtgcctcctcattattaatatctgtactccatattctactactgcatgctggagtactctggtcatggagcatttgacatttgcatccaccccgatgagctgagctgctccattaatatactattcctcctcaattagtcattcactacatacatacagcaaaatcctagcaccacgacggcggccgcatttgtatgaaatcgatagatcgtctctctctctctctcatccaaccaaccacgcacagcgactcagcgagcgaggaacaactagagcttgatgccagtgtcgcggatgatgatggagtcgaatacgatggccaaggagatggccgtgcggcaccacctccttccggggtctcctcgccgccgcaccgcacacaacctctcatcttcctccctccgcaaaagctccgacgcctccctcctccacaaggttccctgcgccgccctccgctccctcctcgccaatctcaacgacgtcctcctcaccaccaggctcttcctcctcttccccgccgtcctcctcgccatcgccgccacttacctccacttcggacaggtgtgggtgtttgtgcttagcttaatcggcctcgttcctcttgctgagcgactcagcttcctcaccgagcagattgcattttacaccggtcctactgtgggaggactactgaacgcgacatttgggaacgtgacggaggtgataatcgcgctgttggcgctgcgagaaggaaagattgaggtggtgaaatgctccctgctgggatccatcctctccaacctgctgcttgtcctcggcacctccctcttcctcgccggcatcgccaacctccgcgcccaccagccgtacgacaccaagcaagctcacgtcaacaccgccctcctcatgctcgccgtcctctgccactccctgccgctcatgctcaggtacgccgtcacctccggcgaccacgccatcgtctccggcgacgccgccctccacctgtcgcgtgcctgcagcatcctcatgctcatcgcctacctggcctacctcttcttccaactcaacacgcatcgccagctgtttgagccccaacaggttgaggatgatgacgacgatgatttagtgatcgctcaagatgatgagccagtactgggattctcgagtgccatgatttggctggctctcatgactctcctgactgcgctcttgtcagggtatgttgtgagcacaattgaggcggcctcagaatcatgggaactatcagtgagcttcattagcatcatcttgcttcccatcgttgggaacgcagcagagcatgccggtgccgtcatatttgctctcaagaacaagatggatattactctcggagtgtctttgggctctgccacacagatctccatgtttgtggttccagtgagtgtgattgtagcctggactatgggaatcccaatggatcttgatttcaacctgctggagactggctctctgtttctagcaatattagtgacagccttcaccctccaggagggagaatcacattatctgaagggattgattcttgtcctgtgctacgctgtcatcagcgtgtgctttttcgttataagacggcgttctgcaggagggacggacggtgttcaccatctggatgtgattgtgtagcaaattactaacaggcagaccgcagaagcagaaacgtacgtacatgcgcctaacatatatatggagtccgtacagtacgtgctagctacggagtactcctgtacactactgtactactgcttgcacaagagaagaggatcgagtaccgtagctagcacaggcggcggagacgagacgatctgcttgcttgaggaggcagccgatcgaagccggactgggcggagatcgatgcatggatccagtttgtttagactgacggacgatagaggatgataccacgacccaaccatccgtccctgcaattggctggtttggtcattcaaatagggaatcacaattgggttttaatgggttgctttagtttaggtcgttttggaatggtttgtttatatttatctttttcaaaggagtttgtttaggtttatcgaactactagaatatacatccatcttaagattattacattttaaaataaagatatatagtatg

SEQ ID NO: 18636 - DNA, 1577 bp, Oryza sativa
  ref <308>: DATABASE ACCESSION NUMBER: AK069022
  ref <309>: DATABASE ENTRY DATE: 2001-12-06
gatgtataagccagcctccgcgtcgctctcacgcgggtggctcggggcgaaaccctagccgcccgcgccgccaccttccccacccgctctagccgccctcgccgccgccggagcccgccgccggaaaccgcgcggccggccaggaaggcggcggcggggaaaaccagccggcgacgatcctccccctcggcgtgggaggtggagtggcgagcgtcaggcggaagacggcgtccgaagaggtccacagggcgaatccggccacgccggaggcggattcggccccctcggcggctgatctggcctccccgtggccggatcgggagctggcgactccggtgggcggaactcgcggggcggtgcgtcgactggcagaggaggctgacgtcatcgccaagcacgtctctgaccggcggagctcgcagcgacggagatggtagcagctggctggcggcgggaggcgcgggagaaggcagcaagtggccggcacggctggcggcggcggagggcggcatggcgcgcgcgaggaggcacgtgcggtgagaggggacacgcccggcggcaacgtaggctggcgaggaggcgcagacggcggctgtggaggctggcgcggccggcacggagggaggtgaggccagcggaaggaacgggccgttggcggaggcttggaggctgtgaggccagcgtgggcgcggtggcttcgctgagaggccggcgcggacgacggcatggaggccgtcgtggcgagtcctccagaggcggcgaccggcgaggtgcacggcgagcacggcacggtgcggcggcgagcctaccgcattgggaggtcgggtggtcagaggcggtggcgatgcgaccaagtggcccctcaagggcagcttggttgaggcggcgacggcggtaacgccatgaggtgggagttgaaggctgcggcgatcttttctccaggcgtcagtcctcttgcggtggcggcttgccgctgcaagatgaccacgttggacgggccagtgtgggggagagaggattcatccttctctctcaccctttccctttccaacccgcccgcgtggatggagccggagcgagccgaagtttgagatcctttctgatggccgaccggcggcgaggcgtcggcgcggtggccacgcgttgaagaggattagctggtggtggctgttgattctgacgagcactcgttgacgcgggggaggaggaaagcaatgggtgaaagcctagccttcgggccggcaacggcgacgcctgcggggcgttgttgcgctttcctcctttggtcctttaggtgaaaaccacatcctgttctaggacgggcgacggcggtgctttttggcgtcgcttcctccttggaggcgtcgtttagaagttccattcgtgttgtgtgcttgttgggtttctgcagtgggatcagacgtagacgcgtggtgtggttgtattttctttttcctgactgcagtctcccaggatcgtaatcttgtattttttttcttctatatcaatagaaacgtcgcaatatcttgtgctggttgtttcaaaaaaagtggtatttgaataactgttttaatttg

SEQ ID NO: 18637 - DNA, 1900 bp, Oryza sativa
  ref <308>: DATABASE ACCESSION NUMBER: AK069023
  ref <309>: DATABASE ENTRY DATE: 2001-12-06
gatcctcgcaaccactgtctcgctctccgccgccatcgccgccgccgccttcctctccgccgccgccgttggtactcgcgcttgccgcccgtcgagctcccctcaccgataaaggctcaccgaaggtttcgtcgtcgaccccgggagtttcaaatatgtctggccgaggactgatgaagcaggacttaagcaagcttgacgtgacgaagctccaccctttatcacctgaagttatctcacgccaggcgacgatcaatatcggtaccatagggcatgtggcccatggaaagtccactgttgtgaaggctatatctggagttcagaccgttcgcttcaagaatgagctggagcgtaacatcactataaagcttggctatgctaatgcgaaaatctacaaatgtgaagacgagaaatgtccacgaccaatgtgctacaaggcttatggaagcggaaaagaagatagccctcactgtgatgtgcctgggtttgaaaacactaggatgaagctactgagacatgtttcttttgttgattgtccgggacacgatattctcatggctacgatgcttaatggagctgctatcatggatggagcattgcttctgatagcagcaaatgaaagttgcccacaaccccagacatctgagcaccttgctgcagttgaaatcatgcgtctccagcatatcatcattcttcagaacaagattgatcttatccaggaaggtgcggcgatgaatcagcatgaagcaatccagaaattcatccagggcaccattgctgaaggtgctccagtggtgccaatatctgctcaactgaagtacaacattgatgtgatctgtgaatacattgtgaagaaaatccccattcctgaaaggaacttcacttcccctccaaacatgattgttattcgctcctttgatgtcaacaagcctggttcagaggttgatgaaattaggggtggtgtagctggtggcagcattctcagaggagttttgagggttaaccagaacattgaagttcgcccgggaattgtaatgaaggatgagagcggcaacatcaaatgcaccccaatctattcgaggatcgtttcactctatgctgaacagaatgaactccaatttgctgtgccaggaggtcttattggtgttggaacaaccatggatccaactttgacacgtgccgatagactggttgggcaggttctgggtgaagttggatcccttcctgatgtctatgtggagcttgagatcaacttcttccttcttcggaggctattaggtgtgaggacaaaaggcacagagaaggctgggaaggtctccaagctcaccaagggtgaaatcctcatgcttaacatcggatctatgtcgactggtgctcgcgtggttgctgtcaagaacgatctcgccaagcttcagctcactgcccctgtctgcacaagcaaaggtgagaaggttgccctcagccgccgtgtcgagaagcattggcgcctcatcggatggggccagatccaggctggcacgacgctcgaagttccaccatgcccgctctgaattgtgtttctccaggcagaaatcctaatctttgagagaagatagaagagatgtggaagggcagagagctcctaggcactatttttgtgaggtggatgagaaaacatgaatttgatttggaagccatgtcattgcgtgctatcgaattcagctatgctacaaaagttttgcttacatctgcattctgaattatggagaatcgttttttcaccatgttataatgaatttgaagtggggagaaacctactaattgatcagaattgcattattgcatttctcactgaatccaatcagtgatgtattattgcattgaacatgttgcaagaaaggaacatatcgctctggatttt

SEQ ID NO: 18638 - DNA, 1041 bp, Oryza sativa
  ref <308>: DATABASE ACCESSION NUMBER: AK069024
  ref <309>: DATABASE ENTRY DATE: 2001-12-06
ttaaccaaaccaaattcgtaaattaatatttctagtactgtatctatttttcttcttaagattatgaattgctcttttttatcctaaaatatataacaatccagtacgagatgagatacatcataataatatgaattcaaacagattttctgtttagattcgtgatgttaggatatgtctcatctcagtactaagttgctatattttactctctctattttaaaacaaagtaaaatagtacgagatgcgatacattataatactataaattgaaacagacattatgttcagatttgaagtattatgatatatcacatctactactagaattctatattttaagagataaattttaccatttttgagaggtatgaaaatgtaccaaaatttattgcaaatttccgtaactcctaggtatatataccaaattttacactgaaaaatatagtacatctcaatatctcattaagaacagtaaaataactcattttgagagagagacagtacaagattcagacaatgaccacggagaaagtccggtagaattcctccaatctgctgcagctcgaatgttctttactcgatatgacagcagaaatctgagtggaacagcagcagcagcatatgttctttgctggatttttcatatcataccggacctaaaagagaggtgcagaatcgaaagactgaagctttcagttcaggccggcaaagaaacaagtggagcatgataagagctcggaattggattccattgccctgaaagataattaaaaaaaggagactaaatttatctatcacgacgagaagagaagaagaggagaatgtgattcccaatcagacacaaaaaaaactccagctttattccttcctttccgactgcactcacccactttgaatctctgaccaaatgatgatgatgaattgatgtggtttccctttcaaaattaacttgcaaacaaattgtgacgacgacagacgccattgatgtgcttccgttcgctgagggagctaggatgtgattctcaattagatacaacc

SEQ ID NO: 18639 - DNA, 1322 bp, Oryza sativa
  ref <308>: DATABASE ACCESSION NUMBER: AK069025
  ref <309>: DATABASE ENTRY DATE: 2001-12-06
gacggttttttcccctctcccgcgcatccgccccgcgccatggccgcctccagctcctccgcccccgccctcgccgacgcctacgacatcccgtgggtggagaagtaccgccccacccgcgtcgccgacgtcgtcggcaactccgacgccgtcgcccgcctccaggtcatcgcccgcgacggcaacatgccaaacctaatcctctccgggcctccgggcaccgggaagactacgagcatcctgtcgctggcacacgagctgctcggacctagctaccgcgaggccgtgctcgagctcaatgcctcggacgacaggggcctggatgtggtgcggaacaagatcaagatgtttgcgcagaagaaggtcacgctgcagccggggaggcacaagatcgtcatcttggatgaggctgacagcatgacatcgggagcacagcaagcactgagacgaacaatggagatttattctaacaccacaaggtttgcgcttgcatgcaacacttcatctaagatcattgaacccattcaaagccgttgtgctattgtacggttctcaaggctttcagatcaggagattcttggccgactcatgattgtggtagcagctgagaaggttccttacgtgccagagggacttgaagctatcatctttactgctgatggtgacatgaggcaagctttgaacaacttgcaagctacagttagtgggttccgttttgttaatcaagaaaatgtgttcaaggtgtgtgatcaaccacatccgttgcatgtcaagaatatggtgaaaaatgtgcttgatggaaagtttgatgaggcttgctctgctctgaagcaattatatgatttgggctactctcccactgacataatcactactctcttccgggttatcaagaactacgacatggctgaatatctgaagctggaattgttgaaggaaaccggatttgctcacatgagaatctgcgatggtgttggctcatttcttcaattatcaggcctcctggcaaagtttgcgttggtgagagaaacagcaaaagcatcatgaacttgttgcagatggtaatagctgtacgtgcaactgtcctggcacggtaacctaatgatcttagttaacaatattctggcttgctgagtacaatcatgtctcgcttaaagtagaacatctatgttatgtgcaatggaagatagcgcctcgcttgagtaaaacttctatatatttatgtcgaatgaatgatccagcatggccaaagggggctaaattatgcatccagttcaggtgatgtagcctgtatggccttgcccgtcgcaagtcaaattggc

SEQ ID NO: 18640 - DNA, 2513 bp, Oryza sativa
  ref <308>: DATABASE ACCESSION NUMBER: AK069026
  ref <309>: DATABASE ENTRY DATE: 2001-12-06
ggctcggcgtctccatccaccctggtggtagtcaagcactcaagctagtgtaacggcgagtctaccgccgcgttgcccgacgcggccatgccgccgccgcccgaagacgacgggtcctcctccgcgcggacgccgctcataccccccacacctcctcctcccggccgagcggtggcgcggctccaccctctcccgctcctcgttgcggcggccttcgccgcatcgtaccacctcctcgtcgcgcccgcgccgtcgtactaccgctcgctcttcctctccctcggatccaacgacaccgcggcagcccacctccacgcgctcaccctccgcccccacctcgcgggcaccgaggccaacgcccgcgccgccgagcacgtcgtctccgcgctctcctccctctccttccccacccgcgtcgtgccctactccgtcctcctcgcctacccggtccaccgctccctctccctctcggcgccaggccacgccaccaccccctttgcgctggtgcaggacacataccccggtgatccctatgccgcggtctccgcggaggccgtccccaccttcctcgcctacgccgcgtccggctcggtcgccgccgaggccgtctacgctaactacggccgcccggaggatttcgcctacctcgccgcccgcggcgtagacgtcaccgggaaggtcgtcctcgcgcgctacggcaaggtgtaccgcggcgacatcgtgataaacgcccggaaagctggcgcggcggcggcggtcatatacaccgatgccaaggactacgcggcgggggaggccttcccggatggtccatggatgccgcccaccggtgtgcaggtcgggagcacgttcaagggggtgggggatcccacgacgccgatgtgggcgtcgtccgaagggtgcgagcgcgtgagcatcccggaggcgatggccaccgacgacatgccggggataccggcgctgcctgtgtcgggaagtgatggggaggctatactacagcttatcggcggtgatgtcgcgcccaaggattggcaaggcggagatggctcgccggtttaccggctcgggcccgggccggcggtgctcaatctcacctacattgggaacgagacaatggctactattcagaatgtcatctcagtgatcgaagggaaagaagaacctgaacgctatataatccttggtaatcatcgtgatgcatggacttttggggcagttgatccgaacagtggaacagcagccttgcttgagttagctcaaaggttctctgagctacaaaagaagggttggaggcctcgacggaccatcatcttgtgtaactgggatgccgaagagtatggactggttggatccactgaatgggttgaagagaacagggctatgctaacttcaagaactgttgcttacctgaatgttgattctgcagtgtatggtgcagggttttatgcatcagctactcctcaacttgatgagttgcttaaggaggcgagtaaacaggttcaaaatccagataatgagacacaaagtctgtatgacttatggatggcttctgatagttcttccatgattaagattggaagaataggaggtggaggatcagattattctgcctttgttcaacacattggtatcccttcaattgacatttctatgggatcagaatatgcggtctaccatagcttgtatgatgactttgtgtggatggagaagttcggagatcccttgttccgcaggcacgtcgcagcggcaagcatgtgggggcttgtcgccctgaggctttccgatgaggagatcctacccttcaactacagcacttatgctgtagagcttgagaagggtgcaatcgatataaataagagattgctgggagtgcctgtcagctcatctcccctgcaaaagtcaatcgccgagttcaaaagggcagctctacaaatggattctgaaatgaaggccttacagacaaggaaagtttggaacccctggagaaacaatcccctgaaggtcagagatctcaatgagcggttgatgatgacggagcgagcattcaccgatcgagaaggactatctgggaggccatggtacaaacacctgatttatgcaccatcactgcatgatgattacggagcgcaggtgtatccaggtgttgatgatgccattcagatggcagagaggacgaatacgtccgaatcctggcgatctgtgcagcatgagatttacaggattgctagggtcatcaaccaggcctcgctagtcctaagtggagggttaacataaacaactgttggggaagcggtggaaatggaactatgctttctactcgggggactggtaatcgttgactgcgataaatgaaatgttcatgtcacttatttggaacaaaaaaaaggaagaaaaatagaggaatttgtgggttttaaatccaaagagcgaagggtgaagagcaaagctttggaaagtaaactgtatcaaaataggactcgagggaataaagggtacatgtacctttgatagct

SEQ ID NO: 18641 - DNA, 2001 bp, Oryza sativa
  ref <308>: DATABASE ACCESSION NUMBER: AK069027
  ref <309>: DATABASE ENTRY DATE: 2001-12-06
ggctttcgcgagagagggacacctgctctgcttccgcttccgcttccccctctcgagtctctcgcctctcccccgtggccaacccacacaccgcgggttggaggaggaggaggaggaggtaggggaaatccccgtcggccgtcggctcggcgccgaatcgatccgcttaggcttcttctgctgggctcttccatgaagcaaatgaagtttataatgcacatactaatgttcagtatattatactgagaatcaactttattctcagctgtatatacactagtatgccagccattggtagctacttgaaaggatggtgaaacgcatatgattacccatgatgagcatgtgtgttccctttttttattagtgctaagctggaaatcaataaatccaagatattcatggagcatgctacctgtgatgatgtgcatgagcatgctataaatgtatcacatggagaaactgcatcaacatcaaccagtcatcaagatttgcacagtgattcagatgattcacatcaggatgataggccttcaacaagcacacaaaccccatcaccacagtcttcagcatcaacttcgcccactgcatataacaccagaaatttatcctttcctagaagagatagtatgtatggtcatggaagaagtatttggaattctggtttgtggatctcgtttgaactggtcatatatgtagtacagattgtagctgctattttcgtccttgtcttttcaagagacgaacatccgcatgcccctttatttgcatggataattggttacacaattggctgcattgcaagcattcctcttatttgttggcgctgtgcccatcgaaacagaccttcggaacaagaacctgaacaaccacccgcagcctatcctaatttgacttcctctcaatcatcagaaggacgcaatcagcgtagcagtggtactgttttgcattttggatgtatcacaatttcgtgtccaaggcctagcatattggcttatcatttcaagacagctgtagactgtttctttgctgtatggtttgttgttggcaatgtgtggatttttggtgggcacagcactttgtcagattctcaggaagctcccaatatgtataggctatgcttagcattccttgcacttagttgtgttgggtatgctattcccttcgtcatgtgtgcagccatatgctgctgctttccatgcttaatttctcttctgcgccttcaagaggatttgggtcatactagaggagctactcaagaactaattgatgcactgccaacctacaaattcaagccaaaacgaagcaaaatgtgggttgaccatgcttcaagctcagagaatcttagcgagggtggcatcctgggcccaggaactaaaaaggaaaggattgtttcagctgaagatgctgtgtgctgcatctgtcttactaagtacggagatgatgatgagctccgtgagcttccttgcacccacttctttcatgtgcaatgtgtcgataaatggctcaagataaatgcagtgtgcccactctgcaagaccgagattgggggtgtggttcgatcattttttagcttgccctttggtcgccgacgtgttgataggatggcaggaagaggtatagctagctcgagattcactgtatagaacacgtcttcttctctagcatgtttgcttgtttcatctgctcatatgcacataaaagacgtgctcatggattgtagtttgttgatttgcaatgaaagcgataatctgctttcatcacccttgagttcaccaaagtgatgacagaaaagtggagacctgatgcttgcagtgacaagtttctgcagtacagtagaaacataagtatattctgatgtaacatttgatgtcaagattgtaaataaagagcacaaagttcacttcgggggtgtatatctgcatgtgtatgggaaaggaaagcctaattagttagtaactttgtaggcattttattgtgtgcaatcattgatcttgtttt

SEQ ID NO: 18642 - DNA, 2562 bp, Oryza sativa
  ref <308>: DATABASE ACCESSION NUMBER: AK069028
  ref <309>: DATABASE ENTRY DATE: 2001-12-06
gaagggcgcacaagcccctctccttccttcctcctccccccctctcgccggagctcctccgccgtctccgccgccccgccctcctcctcgccggcggcgctgctcccgcgcccgttccagctcgcccgctctagcttcgcgacctagggcttgcctcccccaagtgaagggcagcaccgccgcggccgcgtggagggagggaggaggggggcgcgcggaggcggaggggatcttcggggggtgggggaggggcggcgttggtgttgggttggggtggagcggaatcctgtgctggagtggattgatggaggagaggaggagattgggagggggacgagcggtgcgaactagataagtggttcggaatcggatcctcctcctcgctgagtgtgggcgcaagtctacgagttccccgatctcaccacgcgacggcaaccgcgagattggctccggataaggtgtttgataccatggctgctgccgcggagccacccatggtggagcaagtgatcaccgagtttttcgccaagagcctccacatcatactggagtcgcgctctccgtacgagtcgtcgcgcaacttcacgcggccctcgccaccgtcctcgccgctgtccgggagccagccacgcgaccggtggttcaaccttgcgctccgggactgcccggctgtgctcgagaactttgacctgtggcggcagagcaaccttgagccgttggtcattgacattgtcctcttatgccgggacagcaccagcaacacagctgctgggagtgggaagataatagagaggtgggtgatacagtatgaagctcgcaagtctggcggtggcaatggtaatggcagcaagaacaatggcaggaagtctaggaacagctcggctgaggatcatagcttgtacagggctacctaccagggatcgacagtgttactccggtcattgcatctgctcgtcaggctcttgccagcatacagtctcttcagggaactgaactcatctgggagaatccgtcctctcaacctgtcacacaagatatcttcatttgttgagccattcacccgggcagaggatgcagagatgaaacactatgcatttgctccaattgaaactctgtttggccgattgagcttgtcagtttcttatgtgccagtgttggaggtggtggcagcttcagaacctacatcaccaatgccaccagagatcataacggattacgttgggagccccacaactgactttctaaagaaattcaattccctcccttcagctggcattgcacctgcatgtgctgcaatgaccaggaggcacagttggagtattgagcatggagctggaacgtcagtgtcgccatctccttctcccactaaggcacaatcccgtggaagcccacagctaggcgttcctctgcatgtttctctaaaaacatgctcacatccacaaaatgcatcatcctctgggcagaagaaatatacaccatttgaagaatgctatccatcaccaccattgtcaccatcaccatcccaatccccttcagctaactaccctaaaaaccctttgttccgatatgagagtgcaccagttactattcccacattgaagtcaggcggaggaggaggtagcgggttgcctccttctccatgttcgaagggtaagcaccagttctcatctcacaatgacaacctggcacattcccctgatcataactcaaatgtaaggaaggatctagtcaggttgggtgaatttgaaaaggacatggccttgcaaaaggtattatcttacagtaaatatgatttgggatactttcatggactgaaattgactcggacatcaagtaaactttttattatggatgaactggatgaacatgaattggtttttgcatgggaagatagagacaccataattgatcagcttaacagggctgatatctcagacagggaggaacagaagaaccaagatgctggtggctcgtccacaaggtctccagctgcagccattggtgctcttgtgcatctgctgaagactgcaccaagcctcagagaaggcctacagtcagatgcagctgctgtggttcctcaagaaccttcgtcagttcagaaggtcgtgactgaggaacatggcagcatcgcatcaagttctacaccggtgacggcaactgacgcccttgaggagctgaagaaatacagggaggttaaagaatcaatactaaatcgcggcaaaacacaggtcagcggcaccaatctaggagagaaactcacagatggagaaccttagcatatatagtatgatgacgaaagttttcgttttgtatatattatatatgtagcgcgcgttagctgactatctataccttaagcaagctagtagctactaggatgttaccaactctatatatatttacgggatgacatatatatccatccatgcagctgctctgagatgatctgaggctgtgggattttgtaaagctgaaatgattatctgcagcgcatgcaggcagtgagatgcaatcaaatggttcagttcaaccatgttggttcagtagaatttcgttgtttcc

SEQ ID NO: 18643 - DNA, 2118 bp, Oryza sativa
  ref <308>: DATABASE ACCESSION NUMBER: AK069029
  ref <309>: DATABASE ENTRY DATE: 2001-12-06
ggccatcctcattgcttgctccatgtggagtcacttagcgcagtgtagctagccatcaccgggcattctcatcggatccatacagccctagctagcagctgtacgtacattacagagtttgttgccagaggaaaatggaggtggggacgtgggcggtggtggtggcggtggcggcggcgtacatgacgtggttctggcggatgtcccgggggctgagcgggccgcgtgtgtggccggtggtcggcagcctgcctgggctggtgcagcacgccgagaacatgcacgagtggatcgccgccaacctgcgccgcgccggcggcacgtaccagacgtgcatcttcgcggtgcccggggtggcgcgccgcggcgggctggtcaccgtcacctgcgacccgcgcaacctggagcacgtcctcaagtcgcggttcgacaactaccccaagggccccttctggcacgccgtcttccgcgacctgctcggcgacggcatcttcaactccgacggcgagacgtgggtcgcgcagcggaagacggcggcgctcgagttcaccacgcgcacgctgcggacggcaatgtccaggtgggtctcgcggtccatccaccaccggctgctgcccatcctggacgacgcggccgccggcaaggcgcacgtcgacctgcaggacctcctcctccgcctcaccttcgacaacatctgcggcctggcgttcggcaaggaccccgagacgctcgccaagggcttgccggagaacgccttcgcctccgcgttcgaccgcgcgaccgaggccacgctcaaccggttcatcttcccggagtacctgtggcgctgcaagaagtggctgggcctcggcatggagaccacgctggccagcagcgtcgcgcacgtcgaccagtacctcgccgccgtcatcaaggcgcgcaagctcgagctcgcgggcaacggcaagtgcgacaccgtggcgatgcatgacgacctgctgtcccggttcatgcggaagggctcctactcggacgagtcgctgcagcacgtggcgctcaacttcatcctcgcgggccgcgacacatcctccgtggcgctctcctggttcttctggctcgtgtccacccaccccgccgtggagcgcaaggtcgtgcacgagctctgcgccgtgctcgcggcgtcccggggcgcccatgacccggcattgtggctggcggcgcccttcaccttcgaggagctcgacagtctggtctacctcaaggcggcgctctcggagacactccgcttgtacccctccgtcccagaggactccaagcacgtcgtcgccgacgactacctcccggacggcacgttcgtgccggccggctcgtcggtcacgtactccatatactcggcggggcgcatgaagacggtgtggggggaggactgcctcgagttcaggccggagcggtggctgtcggccgacggctccaagttcgagccgcacgactcgtacaagttcgtcgcgttcaacgccgggccgaggatttgcctcggcaaggacctcgcctacctgcagatgaagaacatcgccgggagcgtgctcctccgccaccgcctcgccgtcgcgcagggacaccgagtcgagcagaagatgtccctcacgctcttcatgaagaacgggctccgaatggaggtacgtccacgcgacctcgcgcccgtcgccgacgagctccgcggcgcggacgtgagggccaccgcaccatgcgcgtagaagatccgagggccccgctcgcgccaagattcgtgctgatggaggcatggaacattcaatgtgtagataaagagagagtacgagacagtaagtaaattaaatgggtttggtgggaacatttaagccgcttcttctctgaatttaccatccggatcagagaaacttggatttttttttttttgcaaagacgagatctacttggatttggatctgagagagcagaagcggagaagcaaaaaagagaactaaagaaagagcaataatttgtgatgtagctaagatgcagagtactttgatagtatttgttcgagttagtttgtgttggtgaccagccaactattatatttattttattctattcttaagagacattttcttcttttcc

SEQ ID NO: 18644 - DNA, 3025 bp, Oryza sativa
  ref <308>: DATABASE ACCESSION NUMBER: AK069030
  ref <309>: DATABASE ENTRY DATE: 2001-12-06
ggtggaggaggaagaggtggtgaacggggaggaggaggtcgaggaggaggcggtagatggggaagagggcgacggcgacgaggagggggatggagaggaggagggggacgacgaggaggaggacgccgaggagggggagaagggcgcggcggggcacaccgtcgtagagatctccgacgaggaggatgaggaggacggcgaggagggggatggcggcgacgacgatgacgacgacgatgatgatgacgacgacgacgacgatgacgaagaggaagaggaggaagtcgagggcgacgagcaggaggtataattttttttcacgccttgatccctcgaatatatgctagtatgctttgttcatgtgttcttcctgcctgccctgatagatctatctttatgctctactgttacgattagtatgaaattcttcagcttcctgcgcgttttcttgctaattttctcttgcacaaatctggaaaagtagttctattctcagatctgttcagcacctttgtccctaaaatactccagtagatgtatctgcttagttttgaatacaatagcgttctctcacatcagtagatgtatcagcttagttttgaagacttttcctctcaaaaaacctttctagaaggtcgagatttttgcaagtctgaggtcgtttttttttttttttttttgcatatcgatttctgtagacggtcaaaacttaattttgtttttgtgagttgtttttaccactcaggaaactatagatctgggaataaagaagccttttttgggcaaaaaaaatatagatcttggagtaaaaaggttcagttttttttggcaaaaaaaaagagagaagaaaaccctgtttccgtattttctgtagatctgggtgattgttctctgccataccgtttatcctttcccagtacttttgcgctgatgtggtaatttcctatgaggacatgttaggttttctacttttctagtctagccttatccacctgctgtttgtgtggtctgtggtgtagcccatcagaggcccatctcctcccccaagaataataagtccaaagggcattttggcatatgttgttgttaatattattatatatttttttgatatattaaaaataatcggatattggttcttgatgcaaggacagggacgtgtgacgtgtctaccactgttcatgaacttcaagaaccccttatccgtcacatgtcacatggttcttggtttgggtttctgaggagattttatctcttaacacatcaagatttagatgtgattccttcaggctttaggctttatttaccgtgccttctagaaacaatcgcctaatgttgcttctcctatgggctcatgggaagttaaacacctggatctgggctctttcctatggtggaaggctagatctgtgaaagattagttgtaggattttgtttttggagatgatgatttgtatcagaggctgtttctgaggacgggccaatggctctcccagtgctgcaaagaactgatttgccgttctgatccaaaaccacttcgtagattgctgtttgcaagtagaacctattttagatctgaggggggagtggtaccagtttgttgacctataaagtaattggattttggattttgtttttgctttgttcatgttcttttggagatgatgatttatatcagaggctgtttctgaggatgagccttgagctcacccagtgctgcaaaagaactgatttgccgttctgatccaattctctttctttatttgcattttctcccttaaaagatctgcctagttttttttggtcaaattaagatggcgttgctatctgatgctttcgaatatgtgctcgagaattgagagcatctactgaaaggcttagctcctattttagggatatgacgaaaaacttattccagaggttgtttctgagggtagatctcttctgcctgtgattaaaccttgcacgtcagtccgatcccattctcagtagatctgagaggacaacctggtctgatttgttcctccgcagttctttggagatctagtgatatttcactgctttctgaggaagattcctattccctatttctgaaagtattgcgggtcagaacttatcacggaagacaaaataagcttagcatggacattgaatccatattccatctagtcttttgctgtttatgtacctgtgtaaccttgctgaatctaggtctgtttcccaaggtattgtcatacaagtaggccctgattgctcatcttccactgaccttattgaatctatcatgtttgggaaatgatgaacaattcatctcagatatcctttatggatttattttcagaatgatgaaaatttgcacgtcagtctgatcccaaagttgtttctattctcatgtttagtcaaattagagtttgccttgaaggcaatttaagcttaaagattcaccatgcatcttaatatccgaatatcgttcacctcaatcagtcatgacacgcttttgatgaaatttctgcaggagctaggaactgagtatctggtcaagccacttggtgatgcagaggacgaggagcattccagtgacttcgagccagatgaaaacggtgagggtgccgaggatgaagagattgatgaggacgatgatggcgatgatgattccgcgaaggcgcaatcctcgtcgaagaggaagaggtcgggtggcgacgatgaagatgacgacgatgatgatgacgatggtgatgatgatgatgatggtagaccctcaaagcgatagttgagcagctcatctggggtcagttgtgtcctctgcagggtgctagaaagaaaataatcctcttggggagaagattgttggtaaatgcttgtagctttaggacatctgtggtttaggtttagcagctcaaaaacttgagagacagtccatcatgttagtcgttagtgcatactgctgatgtgtttggttaacagcctctttgagaacatcatctgtatgaggaaagatatgagaggcttgctttatgctttgtgc

SEQ ID NO: 18645 - DNA, 1867 bp, Oryza sativa
  ref <308>: DATABASE ACCESSION NUMBER: AK069031
  ref <309>: DATABASE ENTRY DATE: 2001-12-06
gaaaccaacacaccaacctagctaactcactcactcactccttcttcttgcgacctagctatcgagctagagcttccaaaaccctagctagctagctgagacagttagtttcatctcgaactagttgttgatatgggcagcttggacaccaaccccacggccttctccgccttccccgccggcgagggtgaaaccttccagccgctcaacgccgatgatgtccggtcctacctccacaaggcggtggacttcatctcggactactacaagtccgtggagtccatgccggtgctgcccaatgtcaagccggggtacctgcaggacgagctcagggcctcgccgccgacgtactcggcgccgttcgacgtcaccatgaaggagctccggagctccgtcgtccccgggatgacgcactgggcgagccccaacttcttcgcgtttttcccctccacgaatagtgcggccgccattgccggcgacctcatcgcgtcggcgatgaacacggtcgggttcacgtggcaggcgtcgccggcggccaccgagatggaggtgctcgcgctggactggctcgcgcagatgctcaacctgccgacgagcttcatgaaccgcaccggcgaggggcgtggcaccggcggtggggttattctggggacgaccagcgaggcgatgctcgtcacgctcgttgccgcgcgcgacgccgcgctgcggcggagcggcagcgacggcgtggcgggactccaccggctcgccgtgtacgccgccgaccagacgcactccacgttcttcaaggcgtgccgcctcgccgggtttgatccggcgaacatccggtcgatccccaccggggccgagaccgactacggcctcgacccggcgaggctgctggaggcgatgcaggccgacgccgacgccgggctggtgcccacctacgtgtgcgccacggtgggcaccacgtcgtccaacgccgtcgacccggtgggcgccgtggccgacgtcgcggcgaggttcgccgcgtgggtgcacgtcgacgcggcgtacgccggcagcgcgtgcatctgcccggagttcaggcaccacctcgacggcgtggagcgcgtggactccatcagcatgagcccccacaaatggctgatgacctgcctcgactgcacctgcctctacgtgcgcgacacccaccgcctcaccggctccctcgagaccaacccggagtacctcaagaaccacgccagcgactccggcgaggtcaccgacctcaaggacatgcaggtcggcgtcggccgccgcttccgggggctcaagctctggatggtcatgcgcacctacggcgtcgccaagctgcaggagcacatccggagcgacgtcgccatggccaaggtgttcgaggacctcgtccgcggcgacgacaggttcgaggtcgtcgtgccgaggaacttcgctctcgtctgcttcaggatcagggccggcgccggcgccgccgccgcgacggaggaggacgccgacgaggcgaaccgcgagctgatggagcggctgaacaagaccggcaaggcgtacgtggcgcacacggtggtcggcggcaggttcgtgctgcgcttcgcggtgggctcgtcgctgcaggaagagcatcacgtgcggagcgcgtgggagctcatcaagaagacgaccaccgagatgatgaactaagtaaagagaagattacaaataaatacacatatttagaacacatatacgtttttgatttttttttttggggttttagatgcgaatctgttgattcattttgtgagctatttatacctatggatatatggatcaaaataaattattatttggttgtaatttttttaaaagatgaactgatactataccttac

SEQ ID NO: 18646 - DNA, 3216 bp, Oryza sativa
  ref <308>: DATABASE ACCESSION NUMBER: AK069032
  ref <309>: DATABASE ENTRY DATE: 2001-12-06
tggccttcctcccatctttctctctctttgcacgcggatctccacactccgcaccgccggaaccctagccgccgcccgtcgccgccgattttttttacccctggtcgccgctccgtcgtggcgagcgggcgggatgagcagccaccggaagaacttccgccgccgcacggacgacgccgaggacgcctacggggacgactcgagcaactccaagcccacagccaccaagacccaaacccctcccgttcccaagcccaggtcgccgagacgtcagggcgcgagccgcctcagcttcgtcgaggacgaggacgacgatgacgccgaggagggacctttgtcgcagcgccgccgcccggctgctacggtccggcaggcccgcacggcatcgccagctgcggcgactctccaccgcctcacgcccgccagggaccgcctcaagagctctacggccgtggcagcggcggttcccgcgccgaagccgtccaacttccagtcgcatgctggagagtacacgccggagcgcctccgtgagctccagaagaacgcccgcccactccctgggagcctcatgcgtgcaccgccgccccctccccctccaaccgctgaagccccacgacagcgtttgcctggagctgccgccagtcctgctcctgctacaaacaccactgctgctgctgtagagcccgtggtgattctcaaaggtctggtaaaacctatgtcacaagctagcattggaccaaggaatccatcgcagaacgaggacaaagacgaagatgagtcagaggaagaggaggaggaggaagaaggaccagtcatacctgaccgcgcaacaattgaagctatccgagcaaagcggcagcagcttcaacagccgaggcatgcagcaccggattacatctcccttgatggatgtggtgtgcttagcagtcgtgaagctgctggtggatccagcgacgaggatgatgatgagacacgcggccgtattgcaatgtacgctgagaagtcagatagccagaggagcacgaaaggtgtatttggcgtgatcaataatagaggtcctgctgccagtttgggggttatcaatgatggtttcagggaggttgaggatgaaaaggatgacgatgaggatgaggaagagaggaaatgggaggaggagcagttcaggaaggggcttggtaggagggtggatgatgcttctgctcagagagcagcgaatggtggaccagctcctgtgcaggtccagccgcaaccatccggatactcaatcgatccccgttaccagccttcctttagcggggttttgcctgggacttctatttttgcatctgggagtgcagagttcctgtcaatcgctcaacaagctgatgtagcaagcaaagccctgcaggagaacatcaggaagcttaaggagacccataagacaacagtggatgctttagtcaagactgacacacatcttactgaagctctttcagagatatctagccttgagagtggtttacaagatgcagaaaggaagtttgtgtacatgcaggagctccgaaattacatttctgtcatgtgtgatttcttgaatgataaggcattctatatagaggaattggaggagcacatgcagaagctgcatgagaatcgagtgactgctgtctcagagaggagggcagctgatctagctggtgaatcaagtgttatcgaagctgccgtcaatgcagcagtatctgtccttagcaaaggatcaagctcagcttatctatctgctgcatctaatgctgcacaagcggcggcagctgctgctagggaaagttcaaacctaccacctgagctggatgaattcggcagagatatcaatatgcagaagcgaatggatcttaagcgtagggaagaagacaggaggcgaagaaaaattcgatcagaatctaaaaggttgtcatctgaagggaggagtgcaaataatgaacatatcgaaggggaactaagcactgatgagagtgatagtgagagcagtgcctatctgtccagccgtgatgagttgctcaagactgctgatcttgtattcagtgatgctgccgaggaatactcaagccttagaattgttaaggacaagtttgaaggatggaaaactcagtatcctctggcttaccgagatgctcatgtagctctgagtgcgccatctgtgttcaccccttatgtcagactggagcttttgaagtgggatcctctccatgaaacaactgatttctttggcatggagtggcacaagattctttttgattatggtgagcaaaacagtgaaagtggcactgaccctaacaatgtggacaaggacctcattccagtattagtagagaaggtggctcttcctattttgcaccaccgtattatgcactgttgggatattttaagcacccaaagaaccaaaaacgctgtggatgcaattaatatggtcattagctatttaccaacctcaagcaaggcattgcatcaactattggccgctgtcaatagtcgtctgactgaggccattgctgacatttcagtgccagcttggggatcaatggtgacaaggactgttccaggtgcttcgcagtatgctgctcatagatttggagttgcgatacgtcttcttaaaaatgtgtgtttgtggaaggatatttttgcaaaacctgttttagagaagcttgctctggaagaattgttgaaggggaaaattcttcctcatatgaagagtatcattttggatgcccatgatgcaattgctagggctgagcggatatctgcattacttaaaggagtgtggtcttcaccaagccaaaagttgcagcctttcatagatctcgtggtagaactaggaaacaagttggagaggcgacacatgtcaggcataagtgaggaagagacacgtgggctggctcgtcgtttgaaagacatattggtagaactgaatgaatatgataaagctagagctattttgaagacttttcagatcagagaagccctttagctcttattcggcataccacaagaattccagttttgactgtgatacaggttcttaatccttctgctttaggaaatgttgtaacttcatcaggttttctgtacattaaatgatcatgagttcctcgttcaatcctgcatgatgttatccatacaaattttatgggggcttctcaattcagaaattatggtcatttttaattaccatttaccaatgct

SEQ ID NO: 18647 - DNA, 877 bp, Oryza sativa
  ref <308>: DATABASE ACCESSION NUMBER: AK069033
  ref <309>: DATABASE ENTRY DATE: 2001-12-06
gagcgatcgagcgggggcggctcctcctgcgacggcgaggcgtccatggcgtccctctccctttccctccaccacccgtgcaattcaagaacaggcttccttggaaagagacaagggatttgtcttcatgttatccctgctggcagagttggttttgtcagaaaaacaattgagtgcaaggaatctagaattggaaagaaaccgatagaagttccatcaaatgttactcttacattagaggagcaatttataaaagctaagggtccattgggagagttatcactaaactatccaggtgaagtaaaagtggtgaaagaagaatctggtaagctgagagtctccaaaacagtggaaaccaaaagggcaaaccagatgcatggacttttcaggaccctgacggacaacatcatcgtaggggtatcaaaagggtttgacaagaaacttcagttagttggggtcgggtaccgtgcagctgtagaaggcaaagatctcgtgatgaatttgggattctcgcatcctgttcggatggctgttcctgaaggcctgaaggttaaggtggaggagaacaccaggatcatcgtgagtggctacgacaagagtgagattggccagtttgctgcctccataaagaagtggaggccacctgagccgtacaaggggaagggaatccgatacgccgatgaggttgtcagaagaaaggagggtaaagctgggaaaaagaagtagaaaagctcttctgcttcatcatcgtttcgttcggctggtattatatatacttccttttggttttgatttttccccatgtgtaagtgtaatccatcttttacgaacaaagagaacaagctttttgaatcatgtaatctctcacggcttgtcg

SEQ ID NO: 18648 - DNA, 1576 bp, Oryza sativa
  ref <308>: DATABASE ACCESSION NUMBER: AK069034
  ref <309>: DATABASE ENTRY DATE: 2001-12-06
gacaatccacgcatcgtgcctctctcgccacggatcttttaggcgcaggaccaacggacaacaacgatggctcgtggcctcgccgttgcgtcgctgctgctggtcgccctcgccgtggtagcacggccgccgctcgccctggcagtgaaggattacccggccgacgcgtcggcggtggctaagaaatctccagccagtaaggctgacacgcctaccacgggtaaagaatccgtcgctggcaagaccgacgtggtcacggtggctaagaaatctccagctggtaaggcagacacgtctgccacatataaggaatacgccgctgcaaaggccgacgcggtcacggtgactaagaaatccccagccgccaaggctgacacgcctaccacgagtaaggaatctgccgctggcaaggccaacgcggccacggtggctaagaaatctccagctggtaaggcagacacgtctgccactgccacaggtaaggaatacgccgctgccaaggccgacgcgatcacggtgactaagaaatcaccagctgccaaggctgacatgcctgccacgggtaaggaatccattgccaaggtcgacgcggccacggtggctaaggaatccaccgccggcaagaccggcaagaaggctgcggcaaaggaattcacgatgtccggcaagaccaacactgaggccgacgcggccacggtggctaagaaatccctagccggtaaggctggcacacctgccacgggtaaggaatacgccgttaccaaggctgacgcagccacggtggctaagaaatctccagccgataagacgggtaaggaatctgtcgttgccaaggccgacacggctacggtgacaaagaaatccacagctggcaagaccggcaagaaggttgcggcaaaggaatcccccgcatcccacaagaccagcatggaggccgcaacaaagaaatccactgctaacaagaccggcacggagaccgcagcaaaggaatccacggtatccggcaagaccgacacagaaaccgcggcaaaagaatctacagcgcccggcaagaccgacacgacggccgcggtcaaggaatctacagccggcaaaggcgatgcacccgccatggctgagaaatccgcggcaggtaaggccgaggcatccgccgcggcaaaggaatccccaacaaacaaggccgacgcagcggcggccggccctaccagtggaggctaccaatacgtcaatttcgtcataaagaatccagtcaaagccaaggaaaaatcgagtgaccgtgccgatggccttcctatcgatccgacgcccgacggccagatgatgcactaacaaccctaaatccccaatgtacgattgatttgatgtgtactgcgtttgtatttgattttgtacatttgccatatttgagttttgtggcgcccaacttggggcaaatcaagtgctcgtttcatacagttttcgaagcaaaccaacagaaggggttgtaaaagaatataaagagggttgtgcttggagaaagtattctttaacacctacccatatgatttgctcatacaaatatgatataaatagttag

SEQ ID NO: 18649 - DNA, 2721 bp, Oryza sativa
  ref <308>: DATABASE ACCESSION NUMBER: AK069035
  ref <309>: DATABASE ENTRY DATE: 2001-12-06
gagtcactctctcacctctcggcacggtcgcactcgcacccgcacccccacccccaccccgcgacgccgacgactcccctcccctcttccccttccccttcctcccagatcgcgcgcttgtctgtcggggagagtagaagcggggacgttggggggcgcggaggcggaggacgatggcgctgctctagggtttccaccacctctccactcgccccgccgggtgcttccgtccgttcctccgttggggctcctttgctcaggatttttgatacatttgagatggatagggcgtcgaatttcatacctggtccttatcaagaactcgtggatgccaaaccaattagatcgttagctcctatgttccctgcacccttgggaatcaatgtcaaccagtcaagcaccccgcctttggtatgtgtcactccggttggccaatttcctgtcggttttggttctggaatccttcctacctttggttcaactactgccttcactaccacagcaaatggggtttcttatacaagctacaccaataatggagctattgatgccactcctatctcggcatataagaccagaccaggcattgtatcacttgatggcgatgaaccttactcaggttcagcatctggacggaagtccaagagatcatctggttcagctgctgatggttcaaatggagttaagttcaagcgccctaagccagtttacaagaattttgttgctggcaaggagcttgcctttttaccaccttcatccagtgatcccagggaggttgtggaagcagtccacatgacctttgaagcacttaggcgtagacatctgcaactggatgaaatacaagagactagcaaacgggctgacctgaaggctggcgccatcatgatggcaagcaatatcagggctaatgtgggaaaaagggtaggacttgttcctggagttgaaataggggatattttctatttccggatggagctatgtatcatcgggttgcatgctcctagtatgggtggcattgattatatgagtgctaaatttggaagcgatgaggattctgtggcaatatgtattgttgcagcaggtggctatgagaatgtggatgatgacacagatacactggtgtacagtggttcaggtggcaatagtaggaacagtgaggagaggcatgatcaaaagcttgagagaggtaaccttgctctggagaggagcctgcataggaagaacgagatcagggttgtgcggggcttcagggatccattttgcctgactggaaaaatctacatatatgatggcctctataagattcaggagtcctggaaggagagaacaaagtctggtatcaattgcttcaagtacaaactgctgcgtgagcctggacagcctgatggagctgcattgtggaagatgactcaaggatggatagacaatccagcaagcagaggcagggttatattacctgatctatcatctgcggctgaagctctcccagtttgccttgtcaatgaggtagaccatgagaaaggacctgggcatttcacctatgccagtcaagtcaaatacttgaggcccctcagttctatgaaacccttacagggttgcggatgccagagtgtttgcctgcctggtgatcccaactgtgcttgtggacaacataacggaggtgacttaccttacagctcatcaggacttttggcgtgccgcaagccaataatttatgaatgcggtgatgcttgccattgtactacgaattgccggaacagagtgacccaaaaaggggtcagatttcactttgaggtcttccggactgcaaatcgaggctggggtcttcgctgctgggatcccattcgtgctggtgcatttatctgtgagtatactggtgaggtcattgatgagctcaaagttaatctggatgacagtgaagatgattacatttttcagactgtatgtcctggtgagaagacattaaaattcaactttggtcctgaattgattggtgaggagagtacatatgtatcagctgatgaatttgagccactgcccatcaagattagtgcaaaaaagatgggaaatgtctcacgtttcatgaaccatagttgttccccgaatgttttctggcagccagttcagcatgaccatggagatgacagccacccacatatcatgttctttgcactgaagcacattcctcccatgacagaactgacttttgactatggtgttgctggatctgagtcttcaggttctcgtagaactaagaactgcttttgtggatcatcaaactgccggggagtattttaattgatggatgtatcttcattgtgttggatcaacacacaaacctatttgccagaacttcctgcctgtacccccagattcgagctctggtattattccctgagaatgacgatgggtttcaacatgaactgtgaagagacagtaaattaccgtcgatttgaactgcatagacagttaaattatggttaaactctgttgtgttgatgccgcacttggtaacttggtggcctctgtacaccaccttttgttccatattttgtgggggcatgtatttgatattattgctgcaaatcgtctgtaatccatctgcacccatcctttgtaggctagcgtcagttttaactggaactctagcaattagttgtgacctgtcagatgcagtcatgtacaatgtgccggtttaggatcaccttgcattttcgctct

SEQ ID NO: 18650 - DNA, 3520 bp, Oryza sativa
  ref <308>: DATABASE ACCESSION NUMBER: AK069036
  ref <309>: DATABASE ENTRY DATE: 2001-12-06
gggcgcaccggaaaggcgagaggagggaggaaggctgcaagccctagcgccagggcgaagcaaccggatgtccgggcgcgcgcgcgcgtgggtgcattgcgcgatcccttcacgctgcggcaagccagaggcgaccgggccgccgcgcgcgcgtcttcaccttcttcccgggcgccgatccatggcggagcggcggtggtagaagggtttcgcgagcgggcgtggatccgggggcgggggcggcggtggcatggcgctcttccgcaagttcttctaccggaagccgcccgatggcctcctggagatcaccgagcgcgtctacgtatttgattcttgcttcactacggatgtctttaacgatgataagtaccaagactacattggggacattgtcgctcaacttcaatgccactttgctgatgcctcatttatggtgttcaactttcgagagggagaaagtcaaagtttgctggcaaatatcttatcgagctatgagatggtagtgatggattatccaagacaatatgagggatgtccacttgttaccattgagatgattcaccatttcttgaggtcaggggagagctggctgtctttgagccagcagaatgtgttgataatgcactgtgagcgaggtggctgggctgtacttgcattcatgttggcagggctactgttgtatagaaaacagtacattggtgaacagaggacactggagatgatctacaggcaagcacctcgtgagctgattcagttgctctcaccactaaatcctataccctctcagatacgatacttacattatatatctcggaggaatgtgagcgcagtgtggccaccaggtgatcgggcacttaccttggattgtgtaatactaagaaatattccaggtttcaatggggagggtggatgtagaccgatattccgtatttacggaaaagatcctctacttgctacaagtaacacccccaaggtgcttttctcaacaccaaagaggagcaaatatgttcggctttacaagaaggtagactgcgaattaattaaaattgacattcactgccatattcaaggtgatgttgtccttgaatgcattagccttgatgcggatcaacttccagttctagtagttgtcattgtctccctccagattccatgctttccaccacaacagctttgttcagacctccagcaccgccgccaccaccacttcaatctccatccactcctagatgctctcctgttagaactcttgcatcacctccacctcctcctgcccctacttcatcgcctgttagaatgtcagggcctcctcccccacctcctccacctgcaccaaactcgtgtcccagtagacctgcaccacctccacctccacctccaccacttgcttcaacttcatctcctccccgacctgccgcaccatcaccgtgtcaactacatacttcaacttcatctcctgcacgaccagttccaccacctccaccaacattatctacaattagatcttcagcgccaacaccacctctactgcctggagctacttctgcaccatccccaccaccaccaccacccccctgtagttcatcaaatcaactgtctgctccgccaccgcctcctccaagcttctcaaagaacaatggcagtattgcgcctccgccagcacctcctggtggtaatgctaaattgcctggtatgagggggcgtggacctgcacctccttcaggtccaatgtctaggagccttcaatctggtcaggctgcatccagaaggtccaacttgaagcccctacactgggttaaagtaacaagagcaatgcagggaagtctctgggaggagtcacagaaaactgacgaagcttcaaaacctccagtgtttgacatgtcagaactagaacatcttttctcagctgtcctgccaagttcagatgggaagcgttcagataagtcaggaagtcgtgcatctggatcaaaaccagaaaagattcaccttattgaccttcgccgagctaataattgcggaatcatgctaacaaaagtcaaaatgcccttgcctgacctaatgagcgcaattcttactttggatgatactatcctagatgctgatcaggtggaaaaccttattaagttcactccaactaaagaggaagcagaacttctgaagggttacaaaggagataagcaagtacttggagaatgtgagcagttcttcatggagcttatgaaattaccccgtgtggattctaagctgagagttttcttatttaagattcaattcccttctcaggtttctgaccttaagaggagcctgaacattgtcaactcttccgcggaagagataaggggttcagctaagctgaaaaggattatgcagacaattctttcactgggaaatgcgttaaaccaaggaactgctagaggttctgctgttgggttcaggttggatagcttactcaaactaagtgacactcgtgcacgtaacaataagatgactttaatgcattatttatccaaggtgctttctgagaaacttccagaacttcttgattttcctaaagatctcgctagcttggagttggcagcaaaggtacaattgaagtcattagcagaggaaatgcaggccataaacaaaggactcgaaaaagtcgagcaagaactaactacatcagaaaatgatggccctgtgtcagagatattccgcaagacactgaaggattttctaagtggtgctgaagctgaagttagatccttgacctcactatattctaatgtgggaagaaatgctgatgcattagcactttattttggagaagacccagcacgttgtccatttgagcaagtggtcattacactccaaaactttgtgagattgttcgtacgttcccatgatgagaactgcaaacaattggatctagaaaagaagaaagcactgaaggaagcagaagcagagaaaaccaagaaggagccagaaaacgcacagaaaactaaggaaccaggaaatgacaaagctaagcacaacaattcaatcaaagagttgggtatctcactccaatcaccagcgcaaactgccagtgccaaatgatataacttctcttgacagatgagccaaacaacactagctttgccaataaaggaaacctgttcatggtgcctgctcctatcagtcaccctctctagctgatgtcagctggatatgttgcgctggatgatggattgaagtgaaccagctgtggcaagaaagtcgcaaagtgaatggcccattcagcattctgtcctctgcagttattcatctaacagagcgattgatacttaagaaatgttcctggagacaagctgtacagttctaacaaaataatagaaatgatcagaagcacatttacaattttgtttatttgttccaatcatatgtaggtaatgttcgttctaacagaagaataaaatttatcagtagaatcgtgtttagggggactagcctgtaggttttgttgtaaaaggaaaaaacaaataatggctgattgtattgt

SEQ ID NO: 18651 - DNA, 1149 bp, Oryza sativa
  ref <308>: DATABASE ACCESSION NUMBER: AK069037
  ref <309>: DATABASE ENTRY DATE: 2001-12-06
gtggagtagaagctgaacagattggcagaagcagaagcagaagcaaaagatgatgaattcatctgagccggtgaagctgatcggcgctttcggcagcccgttcgtccaccgtgtcgaggtcgccctgcgcctgaaaggagtgccctacgagctcatcctcgaggacatgggcaacaagagcgagctcctcctcgcgcacaaccccgtccacaagatggtccccgtgctcctccacggcgaccgctccgccatctgcgagtcgctggtcatcgtcgagtacgtcgacgaggcgttcgacgggccgcccctcctccccgccgaccccctccgccgcgccatggcccgcttctgggttcacttcctcgacgaaaattgcctgaagccgttgcggccggcgctgttcggggaaggcgaggagcagaagaaatccatggaggagacacgggagggcctgacggtggcggaggcggagctcaggggcaagcggttctccggaggcagctccatcggcctcgccgacatcgccggcggtggcgtgctggctcactgggtcggcgtgctccaagaggtcgccggagtgagcgtcctgagcgacggcgacggcgagtaccctgctctgcgccggtgggcgaaggattacgtcgctaatgaatccgtgatggagtgcttgccggatagagatcggctcctctcctacttcaccgggatcaagcagaagtgcgtttcggtggccaagtctacgctgccaaagtactcccttcttccctaaatatttacgcagttgacttttttaaatatatttaactgttcgtcttatttaaaaacttttgtgaaatatgtaatattatatatatacataaaagtatatttaacaataaattaaatgatagaaaaagaattaataattacttaaatttttcaaataagacgaacggttaaatatttttaaaaaagtcaacggcgtcaaatattttgggatggagggagtagttactagtgatgaacgaataaactaatagcggcgtgcaccttgtggctaattgagtttcgtctttcttgtcgacgtgttattgtgttgtctctgtttgtcacatgcacgtttgaccgtatgtacgattaatctttcgtcatgatacagtacgagcaagg

SEQ ID NO: 18652 - DNA, 984 bp, Oryza sativa
  ref <308>: DATABASE ACCESSION NUMBER: AK069038
  ref <309>: DATABASE ENTRY DATE: 2001-12-06
ggcgccaacacacataggagatagaaaaggtgacacaacccacagaaacccaaaccccccaaaaaagccatggccatgtctcctctcaccaccatcctcctcctcgccgccgccgtcggcgccacctgcgccacctccgccaccgcctcggccgcgccgctccacggcatagcgaacgacctcctcccggagtacggcctcccgcgggggctgatcccggagacgatcgcgtcctacaccttcgacaacgacacgggggacttcgagatccggctgacgagcacctgctacatctggttcggctcccacctcgcctacttcgaggacgccatccgcggccggatcgcgtacggcaccatcacggggctctccgggatccaggcgcagaagttcttcgtctgggtctccatcaccaccatcgtcgcccaccccgaccagggcaccgtcgagttccgggcggggttcatctccgaggcgctgccggagtcggacttcgccgaggtccccgtctgcggcgccggcgcgcggctccgcggcgccgccgggctcgcacgccagctcggcctgcagctccccaccgtcgccgaggcatgagcttctgagttgggaatcgacctgcagcaaacttgagcacctccggttcgatgttgttacaaaataaagaagacgcgcccttgagctcaggaggctgtgcaaggtttgctgtttagtgtgtacgttttgtgtggttatttatttatgaacatggatgctatccacaagtctaagatcaatatatttctaccgcgcccgggtagagctatagattaaagtcggaccgtgttgtcgtcggattcatgtgagttctgatggcatagggggtccgaatgcagtgaaaatttgcatggaacttcatatatgtagtgtatttatgtgtatgtaaatggcaagtacctggctacctgctcccatgttttaaggagaagagttggatcttgaagtttc

SEQ ID NO: 18653 - DNA, 764 bp, Oryza sativa
  ref <308>: DATABASE ACCESSION NUMBER: AK069039
  ref <309>: DATABASE ENTRY DATE: 2001-12-06
ggcgactgcgaaacaacccgccgccgccgttgcgcgccgtccggtcgcatcccctggcctggccgtcgccggcccgcccgcggcgcactcctccatggccgccaagtgggcgcagaagacaatcgtcatccccgcccagcgccggggatgccacctcatcacccccaagattctgagggagattgagggcgacctgtccgggttcaagtgcggcttggcgcatctgttcttgcagcacacaagcgcttccctaaccatcaatgagaactatgactccgatgtacaagctgacaccgaaactttccttaaccgaattgtaccagagggccgatctgctccttggaagcacactctagaaggacctgatgacatgccagcacatattaaatcatcaatgtttggttgtgccctgacgatccctataactgatgggcatctcaatatgggcacttggcagggtatatggctctgtgaacatcgtgacaatgcttcctcccggaaaattgtgatcactctcaatggggtctagatgaaggtcttcaaaggctgggatgcaggaaagagagcgaatgttggacagttcgaagcacgggcatgtaaaatcatgactcctgccgtatactgaattgttgttctaaatgtcgattaatgctggggagctctatgaaatttactggtactgtttcctgtgtgatgtttgacatgctatgttatcttacaaacttgtgaattttatggcagtgatgcttaatgctttctagatc

SEQ ID NO: 18654 - DNA, 1565 bp, Oryza sativa
  ref <308>: DATABASE ACCESSION NUMBER: AK069040
  ref <309>: DATABASE ENTRY DATE: 2001-12-06
ggtggacgtttacgcgtgtgttgtgtgcgccagtgaggacggccacgcacgacgcctcttctcctctcgccgtctcgcgcaatcgcgcggccacaaataacgccgctccaccttttcgctcccggctcctcctcctcctctcatcctctcctctcccactccacacccaggcacccagctcgagcgcgactcggcaaatccatggctcccacggcggcgtcggcggcggcgggggaggagcagcaggcggtggggctggcggcgcgcgactcctccggccacctctcccctttcgccatctcccggaggagcactggagatgacgatgtggcgataaagattctgttctgtggaatctgccactctgacctgcactgcatcaagaatgagtggaagcactccatctacccacttgttcctgggcacgagatcgccggtgtggtgacggaggtggggaagaacgtcaccaggttcaaggccggcgacagggtcggcgtggggtgcatggtgaactcgtgccggtcatgcgagagctgtaacaatggcttcgagaaccactgcccggagggcgtcttcacctacaactccgtcgacaaggacggcaccgtcacctacggcggttactcgagcatggtggtggtgcacgagcgcttcgtggtcatgttcccggaggcgatgccgctcgacgtcggcgccccgctgctgtgcgccggcatcaccgtgtacacccccatgaagtaccacggcctgaacgcgccggggaagcacgtcggcgtgctcggcctgggcgggctcggccacgtcgcggtgaagttcgccagggcgttcgggttgaaggtgacggtgatcagctcgtcgccggggaagaagcgggaggcgctggagcggctcggcgccgacgcgttcgtcgtgagcagcagcgccgaggagatggaggccgcgaggtccaccatggacggcgtcatcaacacggtctccgccaacacccccatggcgccgtacctggcgttgctgaagcccaacgggaagatgatcctcgtcggcctcccggagaatcccctggaggtccctcccttctctctcgtccacgggaacaggactctggcagggagcaacatcggcggcatggcggacacgcaggagatgatcgagctggcggcgaagcatggcgtgacggcggacatcgaggtgatcggcgccgacgacgtgaacacggccatggagcgcctcgccaaggcggatgtcaggtatcgcttcgtcatcgacgtcgggaacaccctccacgccgccgccgccgagtgatggcatcgcctgcaaactattcgtgtggtctgtaatctgtatgaaattgttcatggtacgtacacgatatatagattgtggcgtgtcatggcgtataggaatgaacccgatcgaggaagctattgttggtagtctgatgctagtcagctcagtgtttgactgtttgcatttacggattgaaattgagctttgtgtggcctaagttttattttctaaagatttcaagtgaatttcgttttattcgaatgaaattccagatcttt

SEQ ID NO: 18655 - DNA, 2427 bp, Oryza sativa
  ref <308>: DATABASE ACCESSION NUMBER: AK069041
  ref <309>: DATABASE ENTRY DATE: 2001-12-06
tttctctctctctcattcttgtgtttcttctcgatcgatctctcgatttctctctgtgcaccagcatcagctatggtgtccgacgccagcaagaagaaggcggcgcagaagaaggccgccgccgctgccaagaggggtgacaaggccaaggccgccattactctctccgagcgcacctgcaccgccgtcctcacctcccatcccctctcccgcgacatccacatcgagtccctctccctcacattccacggccatgacctgcttcttgacaccgacctggagctcaactacggcaggcgatatggtttgcttggcttaaacggctgtggaaagtcctgtctcctcaaagctataggatgccgggagcttcctatccctccacacatggacatctatcatctcacccatgagatcgaggcttccgacatgtctgcgctacaagctgtcatcagctgtgacgaacagagactccagctcgagaaggaggctgaaatcttggccgctcaagatgacggtggcggcgaagccctggaccgcgtttatgaacgcttagaagccatcgacgcatccaccgctgaaaagcgtgctgcagagattttgtttggcttgggttttaacaagcacatgcaggcaaagaaaacctgtgatttctctggcggttggcgcatgaggatcgctttggctagggcgctcttcatgaatccaactatccttttgcttgatgagcccaccaatcatctagatcttgaggcctgtgtctggctggaggaaaccttgaagaaatttgaccgtatacttgtcgtcatatcacactcccaggacttcctaaatggagtatgtacaaatatcatccacatgcaaaacaggaagctcaagctatacactggcaactatgaccagtatgtccaaacacgagccgagcttgaagaaaatcaaatgaaacaatacagatgggagcaggaccagattgcctcgatgaaggagtacattgcacggtttggtcacggatctgccaagctggcccgacaggctcaaagtaaagagaaaactcttgctaagatggagcgtggtgggctcacggagaaggttgtaagggataaggtattgacgttccgcttcactgatgttggcacgctaccacctccagtgctgcagtttgtggaggtcacatttgggtacacaccagacaacctgatctacaagaacctagattttggtgttgaccttgactcaagggtggcgctggttggtcctaatggggctgggaagagtacgctccttaaactcatgacaggtgatctcataccgctggacggcatggtgaggcgacacaaccatctcaggatcgcacaattccaccagcaccttgcagagaagctggacctggacatgtcagctctgcagtacatgatgaaggaatacccagggaacgaggaggagaggatgagggcagccatcggcaagtttgggttgtcagggaaggcacaggtaatgccaatgaggaacctgtcggacgggcagaggagcagagtgatatttgcatggttggcgtggagggagccacacatgctgctgctggatgagccaacgaaccatctggacattgaaacaatcgactctcttgcagaggcgctgaatgaatgggatggagggcttgtgctggtgagccatgacttcaggctgatcaaccaagtggcgcaggaggtatgggtgtgcgaaaagcaggcggtgaccaggtgggaaggtgacatcatggagttcaaggagcacctgaggagcaaggccggagtggacgattgagttgagttgagttgagtagttttgatcttgctgcctggcccggagaggagataccatcactctgctagttactagtatttcttcggctgttactaaactatactgcccagcctaacggggacgacgactgcatcatcatctcttgatctctctctcttagttaagttggatgcttgtcacggatgtttgtacctgatctccatcaactacatctgatgctatagcccatatgatgtaccgtcctcttcttggggtctctggagaatgaggaaacagcaagatccagccagcatagcatgtatgtatagtgtaattagctggtttgttggcggtgcacatgcataagatatacttcctccgtttcatattataatactatctattattgcccacattcatatatatgtctagattcattagcatctatatgaatgtgggcaatgatagaaagtcttataatatgaaacggagggagtattatcttggtttgcacttgcatgatcacctgctgtagttattattatcagtgaccaagttcccctagctagcagtagcactccatgaaaagatatctacatgaaactgtaccacccccacgatattatatatgagattggattttaaact

SEQ ID NO: 18656 - DNA, 2434 bp, Oryza sativa
  ref <308>: DATABASE ACCESSION NUMBER: AK069042
  ref <309>: DATABASE ENTRY DATE: 2001-12-06
ggcaaggttcagtgaggaataaagccaagatacaggagcgatcggctccgcggcgttcgtcgctgtaaaatccattgttcatcgtctccctcaccggcgtttgtgttcgtgagtgtgagagtgttcctgggctgagccaacatcgaagtcagcaactccatctccaaggttctctggatggccaccctcagccccacctcgctgcccaactggaacaggatgcggatctcggtgaacaccatcacgcagaaccgcgccaagtcgctgcggcggctgcgtgcgtcactgcggaacacgtactacgtcgacgacgaggtggtgccgatcagcttcaacatggacagccgcgtcgacgcggcgacgctgaacgccgtcaactcctccgacgctgaaccagtactaatgtgattcactccacctgactgacattgctcaaagttgagcaacaagacttgtccatcgtgatgaacctgcttgtcagcaacacagttgtaccggatgagctacagaacactgtcaagaccaaggaggttaagcagactaaggaaggaagacctgttaggcaccgagtatgtaatcctagagtgagtgggccggaatgggccatatgagcaccatgtccaggctgtcgatagttgcgtgtgagagagaaagcatcttaaaactaactctgtattcatttggatgagttgaggatgaactaggcggcgaaggcggcggcggcatcaaccctgtcgggttggtgaaatccatctgtgtgtgtgtatcgttgttctgtttgggcgattcttcctctgtccttgggggtagttaacaaattggtatcagagccttgccgaaattttttcctcctcttgattttgctgtaattcctgggtgaggtgggaatttgttgcttcggcaactatattccgcaaaagcttcggctccctcaactaggtcggcgagatctcgagcgagttcgtcaatcacggcgtgctacgacaagcctcgctacgtgaccaagcaagcggccaagatcatggattaggaaagtaagctcgatctcttgttgaggaagatggaggaggtggagaagaaacgggaggagagtgagaagcatcgggagctgtcggaagagaagagccgatctgagtttttggctctcaaagtggcggtggaatcccgaatgccggtggtggagaagcgcgtggatgatttgcacgtttcggtggtgggactccaagatcaagtcgacaaactccagtccttggtgcagcagccacctcgtccttccccttcttctccgggttcgcccgatggtatgcaaactccgccccaatttacttcgctcccctctgctctggaacagtctgcgtttgcctctgctcttttgggtgcttcgggaattgggggtaatgttccacctatgtcttgtccgcaattcaatggtgatagtcgtcagctctggaagagtaattgcgaggagtactttgaggtttatggtgttcatcctaagaattgggtgtgtgtggctggactgaattttactggcaacgctgctttttggttacaatcggtgcgttccaaactggtcggggttacttggcaagagttctttgatcaagtttgtcttcgtttcactaaggataggcagaaggtcttgattcggcagtggtttcacattgttcaggattcttcagtttctgattatgtggagaaattcgatggtattatgcatcagttgttggcttatgatagttctttgcctctgaattattttgttaccaagttcgtggaaggactgaggaaagacattagatctggagttttgatgcagaaacctcaagatttggatacagcgtgttcgttggcttttttgcaagaggaaatactagaaggaagtcaccctgctgtgtacaggaaacctgagccgattttgttgtctaaaaattttgctcgccaacctgcacctgtttctcctgtgtccaaccatcctcaaggttctgtgttggaggataggaaacagtctgaattctcacagtctcgctctgataagttttctgccttgaaatcctacaagcgtgctaaaggcctttgtttcacgtgtggtgagcattggagcagagagcataagtgtggctcctcggttcagttacatgttgttcaggaacttttagctgcgttgcaggacgatcagttaaaccatgagtccgtcgatactgtatctgaacctgtagaaccagtttttatggctatttcttatcaggctgttactggtactgaatccttgacttcttttcggttaaatggctgggtacaggggtatgaattactcatgttagtcgattctggtagttctcattccttcattgatattactgtggcacaaaaacttcagggtatccaatgtttacagcatgttgtttcagttaaagttgctgatggtggtgtg

SEQ ID NO: 18657 - DNA, 2701 bp, Oryza sativa
  ref <308>: DATABASE ACCESSION NUMBER: AK069043
  ref <309>: DATABASE ENTRY DATE: 2001-12-06
gctcttcttctcccggatctcgcgcgccacgaccctcctcccccttccagaagcttctcgaagctccgttcctcaccaccccaacccaatccccactccccactccctccgcgcggatgagcggcggcggcggcggctcgggccccctcccctactcgatgcgcgatgtggacggccgcggcgcctacaacaacgccaagttccgccaccgatctcgcctcaagatggcctctcaggctctgtttaccaatagcagcaagtaccaatgtggaaagttcactgttggaaaatttttgagtcttttaatggtttctggcgtaatatacttacttgtgcacaaaagttcggatggttttgtatccggtgagctccatgaaaaagtagggaatacacataccaagaaagattttcccaaaattcgtacattttggagaaagccaccaaggctgccgccacgtcttcctccaaatgaaatctatagaaacaattcattgcttctacagtctcctcaatctgaatggacactcagacagaagaaagttaaagaagcatttgaacatgcatggtctggctatcgaaattatgcaatgggttatgatgagcttatgcctttaacccgccgaggtatagatggactaggaggtctaggcgctactgttgtagattctttagacactgcaataataatgggtgctgatgatgttgtttccgaagcatcaaaatggattgaagataatctcatgaaaaagttaagtgagaaagggcaggtcaatctatttgaaactactatccgtgtcttgggagggcttcttagtgcctatcacttgagtggtggtgacaaagcaagaggtgactctgggataccaatgacatctaaaagggctaatccggagcgtcttttggaagtttcaaaggacttggcagacagattattgttagcctttacatcaagcccaactgctatacctttaagtgatgttgttcttcgagatcgaactgcacatgcagcccctgatggtttaagcagtacctctgaggctacaacattgcagctggagtacagttaccttagcacaatatcaggagatccaaagtatgacttagaggcaatgaaagtgttagagcatatgcgaacactcccaacagtggagggtttggttcctatttacatcaatccctcctctggtcaatttagtggagaaaatattcgattaggatctcgtggtgacagttactatgaatacctattgaaagtatgggttcagcaagaaagatatcgtgacactagtttgaagtatctatttgaaatgtatacagaagcaatgaaaggggtcaagcatcttcttgttcgaaaaactattccaaatgggctggtcttcgttggggagctcccctatggacgaaatagtggttttagccctaaaatggatcacctggtgtgttttcttcctggtacccttgctctgggtgcaacgaagggtataaccaagaaaaaagctcttgaaaatcatttattgactgcggaagacatagacaatctgcagcttgctgaagatttggccaaaacttgtgttgaaatgtactttgtgacatctactggacttgctcctgaaattgcttattttcacattgagggtaattctgagggaggacctgatggtgggaacaaaagttctcaatatgttaatgatatcataatcaaacctctggatcgtcacaatcttttacgcccagagactgtagaatcactatttgttttatatagaatcacagaggatccgaagtatagggaatggggttggcagatttttcaggcttttgagaagtatacaagagttgattctggtggctatacttcattggatgatgtcacaagcttgcccccacctaggagagacaaaatggaaactttcttccttggagaaacactgaaatacttgtatttgctgtttggtgaaagcaatattcttccattagataagtatgtattcaacacagaggcccatccacttccaatcattcagtctgcacaacagatctctcattcggtatagtttccaagtgttttagtgggtgtagttcctctactatcatgtgaaaagtgtactaccatgagaaaattttaccaaacagataaagtgagaaaatagttacgcagacaaaattattgggacaatgagagaaacatactagccttatagatgcacatgctcccgttgcatgagcttgaagcagcatcagagccgttcttggtagcaacctcatggagttgtcagcttgaagctgcagtggcatcattattagaagcaagctcgtggatggagttatcgtcatagatttggagattgtacttgtatttatgggaaggtcatgaaactactctgatctgctgaaaacatacaattttgaattagcttgtgattacactgacatttgtcttccaagaaatcttcaatccttgtgtcagacatcccatcatgttcacaacttgctccctgcttacctggtgagttcaactagatttgtaagcttcttatcatctccagttgctgttcattgacagcattttgcatggttcatgtttttggcgtgtttgtgttatggtagtgctctactgtaagcctgtagcaaaatctcctaaaagaacattgattttgaaaatgtcataatatagtcaaagttcaaggtgactatgattggc

SEQ ID NO: 18658 - DNA, 1219 bp, Oryza sativa
  ref <308>: DATABASE ACCESSION NUMBER: AK069044
  ref <309>: DATABASE ENTRY DATE: 2001-12-06
gacgcttctctcctcctcctcctcagcccttaccaaccaaagcaaaccttccccctcctcctcctccggccaccgcggcgagaggccccgatggcgccaacggtggagatcagccacctctccttcacctacccgggcatcgacggccgcccgccgcccggcgcgccgccgctcatcgaggacgtctgcttctccctcgacgccggccaccgctgcctcctcctcggctccaacggcgccggcaagacgacgatactgaagatactgggcgggaagcacatggtggatccgagcatggtgcgggtcctgggcaggtcggccttccacgacacggcgctcacatcatctggcgacctctgctacctaggcggtgagtggaggcgcgatgttgcctttgcgggctaccaggtaaatatacagatggacatttcagcagagaagatgatatttggtgttgtgggcgttgatcctcaaaggagagatgagcttatcaagattttggatattgaccttgcctggcgcatgcacaaggcatccgatggtcaaaggagacgggtccaaatttgcatggggcttctcaagccattcaaagttcttcttcttgatgagatcacagtagatctggatgtgttggcaagagcaaatctattgacatatttaaagaaggaatgcgaggaacggggtgctacaatcatctacgcaacacatatttttgacggacttgatgattggccaacacacattgtgtacattgcccgtgggaagttgcaactagcactgcctttagagaaggtgaaagaaatgagccagttatctctcatgagaacagtggagagctggctgaggaaagagagagatgaggataggcggagaagaaaggaacggaaggagaagggcctcccagagtttgacaaggttactgaggggagtcgggttataggtgatcccgctgccagagcggtgaacaatgggtgggcagcagggaggctcgcctcaacggttgctggtgaagagaatttcattttcagctctaacagcgttcttaggcaataatcctaccctgcaatttggctttgtaatgatgaataacgatcctatagatccaatagatcacaccatcccacaggagtttttgcagtaacagcctaacaggctaacagcaaagttcttgtatacaactgctcaaagattattttcaaaaatttcgccttcttttatg

SEQ ID NO: 18659 - DNA, 3326 bp, Oryza sativa
  ref <308>: DATABASE ACCESSION NUMBER: AK069045
  ref <309>: DATABASE ENTRY DATE: 2001-12-06
gagtattggaatattattggtggattatttcgtgattgtaggaacctgcagagcaccttcctggtttccctcatgaaatttcagtttatgaacctgctaacttgttcttcaaaaacagatgacactgcattctcaactatctatggttcagagaacaataggtttgagtggtctggactctggagcactgtaaaataacagagaacagttttcagctgaactctcctttctctaccatactggcttgatccatatttagatctttggtatttgtgttgttgatcagcatgcttgtccatagaagcattgagaaagatgtatttgagccacttgtgatgcgtatttctgaaattgcgcaacactattttgggacagtgggctcatctgaaactggtgagaagggtcctacagtgcctgaatttccagagaagatcaaatgggaagtgcaacatctcgaagaattgtttgagggcattaaagaagacaaggaggaggtctatgagggttttaagtctgttagccttgcaatctccgagtggcagagaagattggctatagcataccaaaatgcagctagagatcctcgaccttttgagggaatgaaatgggcaatggagtatcatgagatgtgggttgaagacaataatataataggagctggtgatgagatattggattttgatgaacatgagctttttgaatcacttagatatgtcaagactgcacaaggtggttcagaagctcatctcctggaaagtatcaagagtgggatgcagtgcataaagaatgtgttagccaccattcgatcaagaaaggaagcagacaacaggagctggtgcattgtggaacaggtcttctccccgctactgaaacttttgaaaactatcaatcatctagtatcagaagcggctgcccgcaacaacaagtctgagaactataagatccttgtcaagatcgatgctgaagtcaactgcttacaggatgcactagatttgattgatagaaataagaatgaggtttatgagaacttcagattaatagaagatctcatactaccattattaacattccttaaggccacatacaatgatcaatcagaatctttgagcttcctagatgcagtcaaacacggagtgaattacttggaaggtgtacttgacaagattgagcagaagcagcgggatggaaatgataatttccacattgtcaaagcagccttctcaccattgttgacatgcatgtacaccttcaggcgcatctcgttggaaaccttagcccatgaagataaatcagatgcttttattctgttggacaggatcagagatgatttgtcacagctcaaagatgtacttcagatggttcaagagaaagagaacggaatatacagtaactttgatgcaattgaagaacatattgatgagatttatgacggacatatgaatgttgaaggttccttaaaacttaaccagatgggtggtctgcgagacaagctccagttgattcatgaagagataacaaatatacggggaaaggtggatgactctttcaaggtccaggaggtctcatgccatgtcatgcgcatggctgcagcacatgaagcttcatcttctcatcagttgtcagcatcaaataccttctgcattaccatggaaagtgcgcagatgtggcagctcaaagttataattgatgaactagagacaagattgagacactgccttctatgccttgctgtgttcccagtggatgccatcatcaagaagagactgttaattcactggtggattggagaatgttttgtaacttcggtttctgaaggcaagagcttctttaataaattgctgctgtccaatgggttcattacgccagtaaagaaataccactgtgacaaagtccactcgtgcaaggtgcaaccttggatccgtgggctactgattgaagctgcaaagagcaaagcatttgttgagctcagttcagatggcagctccaggaatgaccttaccaggacccgccgtgcatgcttgcatgctggaaagatccttacaaacttccatcctgatgttttgacgatttacaatatcaagcaacagtatgtagagttaaacacgacatggttttctgaaaagaaccgtttgaccactttgcagttaggacaatggcacgatgcaagttatgaccctcgggcacatcacgttgagattaacaatgccaagttcctaaagcaggtcaaatcctgcaagcagttgaagtacctgagtttgagaggcatatcaagaattgaggcccttccgaactcaattggaaagctctcaagacttgtcattcttgatctcaaagcgtgccataatctagaggatcttcctaaagaaatagtaaaactagtgaagctggagtacttggacgtttctgattgttacctgctctcaggtatgcctaaaggactaggcaagctttttcaacttgaagttctgaagggatttgttctatcaaacgccaagagcaaagatctatgccatctcaatgaacttgtcatgctaaaaaagttacgaaagctgagcattagaattggttatagcatagatagcggtcagtttgcgaattttggtgagctctgtgctctccggtcgcttacacttatttggggggcacacccaatatctacacacgggagttctccaagtcatgctgctcctcatgcaatgccttgtgttctccccttaggtcttgagaagctggagctccgttgttttccccttgtagaattgcctcactgggttagtcctgaaaagctgagaaaattgaagaagctctacgtcagcggaggtaacatcagtgacctgggtgatttgaagtcctgggaggtgactgtacttcggctaaggttcctcaaacatatgaactattcatggactgccctgcatgattcattcaggaaactcgatgttttggaggcacatgaatgtgaaaatctacagccctggccttcctgcggaaaagggttatggcggaaagaaccgaatggaacgattgcacctgtgttgacctgaagtattgagctgggtccaatagggtgcagaattactgcctggaaatgggaatattgaaggatatatttgatcagcagtatatctgaattctgaagacattgccaatcactgtctggtaagatggcaattggcaattgtcctgcagcatatataaagatattaaacttctaactgtgttacatttctaagcacaaatccttgcatactttcacattgtcgaatgtttatagacttattgggcaacataagtcaaaaaataaaatgtactcgtcgattggttgc

SEQ ID NO: 18660 - DNA, 1903 bp, Oryza sativa
  ref <308>: DATABASE ACCESSION NUMBER: AK069046
  ref <309>: DATABASE ENTRY DATE: 2001-12-06
gattcccccaattcattccttcgccgaaccaccagagtggtggagagtagctagcagagtagcagagcggtgggagcagcagcagccgtagccgcatccggagagattcgggcaggagaagccgccgcagcgatgggcgcgccggtgcgcggcgccctcgtcttcttgcttcttctcgccggcgcggccgcggagacggcgccggaggaacccacattgccctccgccgccgccgatggggcggctagtagcgggacaacatctggcgctggtgctggaacgggaatcaactcgaactcggtgctggtggcgctgctggactcgcattacacggagctggcggagctggtggagaaggccctgctgctccagacgctggaggacgccgtcggcaagcacaacgtcaccatcttcgcgccgcggaacgaggcgctggagcgtgacctcgacccggagttcaagcgcttcctgctcgagccgaggaacctcaagtcgctccagtcgctgctcctcttccacgtcctccccgcccgcctcccctccgggtcctggtccgccgtctcccaccccacgctctccggcgaggaggttgagctcgccgccgccgccaacgacggcgcgatgcgcgtcgcccacgccgccgtcacccgcccggacgccgtgctcaggccggacggtgtcatccacgggatcgagcgcctcctcgtgccgcgctctgtccaggaggacttcaaccgccgccgcagcctcgccgacatctccgccgtgctgccaactggcgcgcccgaggttgacccgaggacgcaccgcctcaagaagccggcgccgcccgtgccacccggcgcgcccccggtgcttccgatctgggacgccatggcccccggcccatccatcgcgccggcgcctgcccctggaccgggctccgggaagcaccacttcgacggccacagccaggtgaaggacttcatccagaccctcctcctgtacggcggctacaacgagctcgccgacatcctcgtcaacctcacctcgctcgccaccgagatgggccggctcgtctccgaggggtacgtgctcaccgtgctcgcgcccaacgacgaggccatggcgcgcctcaccaccgaccagctcagcgagcccggctcgccggagaacatcctgtactaccacatgatcccggagtaccagaccgaggagagcatgtacaacgcggtgcggcggttcggcaaggtgcgctacgacacgctgcggctgccgcacaaggtggtggcgcgcgaggccgacggctcagtcaagttcggccatggcgagggctcggcgtatctcttcgacccggacatctacacggatggcaggatcgcagtgcagggcattgacgccgtgctgttcccgccggatgacaccaagacggcgccggacacggcgccggtcaggagggcgcccgccgtcaccggcactcgcaagaagaacaaactccggagaggcaagttgttagaagcaacgtgccaaatggctggcatccttggtcagcgattgcgattcgcaagctgccagtagacggcgaaagattgatctcatgataccgaaacacgaactagaatgaggtgatggactgtgctggagccgtccacattaccatttgtttttttttatttttatttttgtttattattacgaataataaatcaggtggggaatgtaatctggtggctgttggtgtctgaaaaaaaaaaaggcaggaaaatgttcatacttgaagaccgagatcttctgtgtataggagcgtttttttttatatttttttccgtcattttttcttctttttctgttttgacagaatgccgagtaaacaattaaacatcacagcatccttggtgttaaagctagtagtaatcaattctgc

SEQ ID NO: 18661 - DNA, 996 bp, Oryza sativa
  ref <308>: DATABASE ACCESSION NUMBER: AK069047
  ref <309>: DATABASE ENTRY DATE: 2001-12-06
ggatcgcctccgctgccaccctccaccattctcattcccccacccctcccccctcgcgagccatggctgccgccgccgctgtaaggtccgtggcgatctcgctcttcgtcgtcgccctcgccgtggcagcgttcgcctggtccccgtcgtcgctggcgggcggcgccagccaccacctgcggctggaggaggtggccagcgccgccggcgccggcgcggcggggcatggcagcatgtcggcggccgccgggaaggacggtggcgccagcgcggcggcgcatggtagcgcgccggcggccgccgggatagaaagaacgggtacctcagcttcttcgccgccatgcgccgcgacagcgtgccgtgcacccgcaaaggcgccagctactacaactgcgtccccggcgcgccgcccagcccgtacaaccgcagctgcgagcacatcacccgctgccacggctgatcgatcacaccatcgcccctcctcctcctccgccgccgccgccgccgccgctgccggtgccggcgccggcgatgatgattcgctttgtttctttgacgacgacgacgatgtgcacgcatatgcatatgcgtactagcgttttgtcgatggatcgatcgatcaccaggttaattaaataaaaatgacatgaaataaggtgtgtgtgtgtttgttctcgtgttgttgccgtgccactgcgttctcttattattatccatgtctactgtctcattgtattagctactactgttgtccatttggttcttttgattaattaatttgctgctaatgatgcagctattgtatttgggatttttgtccctgtaaggttttgtttgtttaatcccttctacaagaggatcgagggggatttggacaggacttatttcacaactattgtatggtgtggaattattctccttcaatcccctccattctccttttcttgaggattaaatgaacaaggtctaaattaagccgatttcatcttgttgctt

SEQ ID NO: 18662 - DNA, 2900 bp, Oryza sativa
  ref <308>: DATABASE ACCESSION NUMBER: AK069048
  ref <309>: DATABASE ENTRY DATE: 2001-12-06
gtcctacaggcgcaggaagaggaggagaagaagcggaagaggagagaaaagaaaaaattcgcagcaaaaaagaaaaaaaaatcgcagctgcaaggtagaggaggagaagttggggtttgggagggccagcgattgagccgacgaactcaaggttcttcaaagtgatgattgggatcgaaccctggtaacctccatgtctggggcgccatgctccaaccttggacttgttcccagggatatgcatggtagtatccctattagcactacaaattcctctgggccaagcattggtgttagctctttggtgacggatgctaactcatcgctctccggaggtgcccagttgcagccaagtacgagcatgaatgctgattcattcatgcgccttcctgcttccccaatgtcgttttcatccaataacatctctggatcttcagttattgatggtcccattgtgcaacaaagtcctccccaagagcagatgcagaagcgaaggtcttctagtgtaacatcacaacctgttattgatgctgctggtgcattgcatgctcagaagaagtcaagggttgatattaggcaaggtgatatcctgcaacacaatttaatccagcaactgctccaaggccagagttctcttcatctgcagggtcaacagaaccctcagattcaagccttgatccatcagcataaactggcacagattcagcagcaacagcagcatcagatgttgcaaccattttcacagatccaacaatctcaagttggcatacctcggcagccacagttgaggcctccactagcgcagcctggaatgcagctagctggacctgttaggactcctgtcgagaatgggctttgttctcgaaggttaaagcaatacttataccataagcgtcaccgaccagagaataatccaataacatactggaggaagcttattgatgaatattttgcaccacgagcaagagaaagatggtgtgtatcctcgtatgagaaaagaggaaatccttcaggtgctgttccacacacagctccggattcatggcgctgtgacatttgtaatacacatgggggcaaaggatatgaggctacctatgaaatacttcctagactctgtcaaattagatttgaccatggtgttatagatgaatacttattccttgacatggccaatgaattccggttgcccaatggactaatgctgctggaacatactaaagttgttcagaaaagcatttatgaacatatgcatgtgatacacgaggggcagttgagaatcatattcacaccagaactgaagataatgtcctgggagttctgttcgcggcgacatgatgagtatatcactcgcaggtttctttcaccccaggttgctcatctgctgcaagttgcccagaaatatcaaactgttgccactgaaagtggtccagctggggtctcaaacagtgatgcacagaacatttgcaacatgtttgtgacggcgtcacgacagctagcgaaaaatatagaccaccacaccttaaatgagcatggtctatctaaagatatgttcgctgcttgcagatatcagaggtggtgaatcacatgaaagacctgattgaattcagccacaagaacaagcttggtcctatagagggtctgaagagctatcccaagcaaactgcagcaaaacttccagtacaaaacatgcacgagccaaagcaactaatggcagctgctggccttcctaatgaccagactaacctcaaagccatgggtgtcaaaacagaaatgaacacccatgcgaatgagacgcacggtattggaccaattggaaatggtccgcagaatgctgctgcacttaacaattaccagaatcccattggaaatggtctgcagaatgctgctgcacttaacaattaccagaatatccttagaagttcagtcgcaaaccagagtttgcttcagcaggaggcatcaagcatgtttaaaggtcccacagcaatgcacaatggcattcagctggaagcatctagatccttccgtggaccaaaccaggtgcatctcgcgcagttccaacatccggcctcatttcagcagcctatgcctcagcagagcagcctccagggcttgggtgtgagcccacaatatcggcagcatgtgctccatcagttgctgcaagaggccaagaacactaacaaccgtgtcttggcgcagcagcagcagcaacaacaacttcaacatgctcctgctaacagtggtcttgcatcaggaggaacggctatcaccggcagcgccgctagcggggatcatatgaataacaacggcgcggtgaagggtgggactccaatggttacaacaggtcctagcagtgtgatcaacaatacagccagcatcctccccagcagaagtaacagcttcaagtcagtgagcagcaacccccaagttgcagctgctgcgggcggcggcattggcagcggcggccatgcggctacccccaaggctgatgctctgcatgagttggatgatcttgacaatcttgggaatctgatcagtactgaactggaggagagtgggctgttcctgggtgaccaggcaggtggtggctactcatggaacatgtgacaaatgcttgcctgcttggcttcttggtgatgatggaaactgccgtagattctagcttctcgtcttgttcttttttgttttgggtatgtggagtttttgtttggggtgtctgaaacagtttctgatgatgatgatacactgatgtaatttaagcgttatgtgcgctggtaagtgagttggcttggaatgctgagatcgaaccagagctgcttctgctagcacacatcgagacttgtaaacttagcatttcgcagcagagctgttggtatggaataaggtcgatttaatttttcttg

SEQ ID NO: 18663 - DNA, 1449 bp, Oryza sativa
  ref <308>: DATABASE ACCESSION NUMBER: AK099084
  ref <309>: DATABASE ENTRY DATE: 2002-08-28
ggctcgctctcacccgcccacggatccgatccgcctccactccctcccccaccggcgggcggccgcccgagcggcgcggtgctcctcctccctcctcgtcgtcgtcgtcggcgccggcgatggtcgtctgcaaatgccgcaaggcgacaagggtttattgcttcgtgcacaaggttcctgtctgcggcgaatgcatctgcttcccggagcatcagttatgcgtggttaaaaattatgctgaatgggttgttaatcctgattatgactggccacaacactgttcatcttgcaattctgttctggaagctggaagcgaagaaactacacgattgggttgcttgcatgtgatgcacacaagatgtttgatctcacacatacaaagttattcaacccaaactgcaccagctggatatgtttgtccttcatgttctacacctatatggcctccttcaactattaaagatactggctcgcgccttcactctaaactaaaggaagcaatagcccagactggattggagaagaacgtatttggaaatcattttgtgacaatgcctaaagctgatactcgcacccctcctgcttttgcttcagatcctcttaaacgtgtatccatttctggtgatagagaatcaaatggtgcaaacataatcaattctgctatagatgcaaatgtgcaatctggtggaatgtattcttctgctactgtgggatctgggacacctagtcacgttgaaccagaaatagttgaaatagatggtccaagtccaataacaactcagttccctgaacaggagtccaacttcatcagaagtcctagcccacatgggccgagtgccatgacaagaaaaggtgctaactatgttgagagacaaaattcagagatttcttattatgctgatgatgaggacgcaaaccgcaagaagtataccaaaaggggtacattccgtcacaaatttctaaggatgctgctacctttctggtccagtgcattgccaacactgccagttacagcacctcctagaaaagagagtgatgctccagagggccgttcacgacatcaaaaatcatcaagaatgggtcctacaaagatcttacttgcattggcgatcatggcatgtatagcaacaatggggatactttattaccgtttgacacaacgcagtctttccgagaactttattgaggatgaacctcaatagtaccctgaggttgtcaatcttgcagttcattcctggtgctatgctgctgattccaagggttttataccctccttgtatttcttttcttctccctttttgtggggctttcttggtggctgagatgggtagttagatactacataagaattatagtagactgcttccatatgatgattgatgtgcatgtttatgtaactataatgctataaaatatcctctttgttatttacacctgatgagaaatcat

SEQ ID NO: 18664 - DNA, 1680 bp, Oryza sativa
  ref <308>: DATABASE ACCESSION NUMBER: AK069049
  ref <309>: DATABASE ENTRY DATE: 2001-12-06
gagtgaagtcacacactagcacgctccattggcatccatggcggctcctcctcctcctcgtcctcagcctcatgtcatggtgcttcccttccctgcgcaaggccatgtcatgcctctgatggagctctctcaccggctcgtcggcctcggcttcgaggtcgaattcgtgcacaccgacttcaaccgcgaccgcgtcatcaacgccatggcgaacgagacgggggcgatccctgatgggatccacatggtgtccttcccggacggcatggaccctgccggtgaccgtgccaacatcgccaagctgggtgacggcttgccggccgccatgctcggcggcatcgaggagatgatcagatcggaggggatcaggtgggtgatcgccgatgtgtccatggcctgggtgacggagctggccgccacggtgggtgtccacgtcgccttgttctcgacttactccgccgccgttgtggcgcacaggctgcaagtccccaagctgatccaggatggcgtcctggacgaaattgggaatgtgaggagaaacgagatgatccaattgagacccacgatgccgcccgttctagcagtcgagctcccctgggttaccctgagcggcacgccggacgggcgcaggatggtcatccagaacgtgttcaagaccaacccgacaatatcctcggccgaggtcatcatctgcaacacgttccaggacatcgagccgggggcgctggccctcgtccccaacgtgctgccggttggaccgctcgaagcgccggcgacgtcgaggttagccggccatttctggccggaggacacgacctgcctggcatggctcgacgaacaggacgcctgctccgtcgtctacgtggcgtttgggagcttcaccgtcttcgacatggcgcgggtccaagagctcgccgatgggctagtgctttctggccggccattcctgtgggtgatcaggcaaaacttcaccaatggtgccggcgaaggctggctggaggagttcaggcaccgtgtcagcggcaagggaatgatcgtcggttgggctccccagcagagcgtgctctcgcacccgtcgatcgcatgcttcgtgtcgcactgcgggtggaactcgacgatggaagggctccggcatggtgtgccgtttctgtgctggccgtacttcgccgaccagtactgcaaccagagctacatatgcaatgtgtgggggactggagtgaagctccaggcggatgagcgaggggttgtcaccaaggaggagatcaagaacaaggtcgagcagctggttgacgacaaggagatcaaggcgagggcagcaaagtggaagcatgcggcatgcacaagcatagcagagggagggtcctcccatgaaaacttgctgaagtttgtgaatttgctaagagaacagtagtgtctaagattgtcaaaattgttctgaaaattgaaaggtcagaattaatcattgaggtgctttggcaaattcatgggactggaagtataccttctcttttttttttctgaaaagtgtaatagatgaatcaccagtgctactgctaaatgtaatgcaatataataaaaactactacctctgttttcaaatataagcatttcaggctatgcaatgtatagccagaaatgcttatatttgcaaacggataaatactgtttttcagatggccg

SEQ ID NO: 18665 - DNA, 1011 bp, Oryza sativa
  ref <308>: DATABASE ACCESSION NUMBER: AK069050
  ref <309>: DATABASE ENTRY DATE: 2001-12-06
gggccggtggccgtcgctcggcgagccgccggcccgacggcgccgtacgcgcagggagcactcgaccggcgctcgccttttttctaggcgccggttcgccgtgaggcagccgcccagcgctcgcgttgccccctcctgatccgcggggttgctcaccggggcgccgtgccggaggagatgcacaggctgggggatttcaggctcccgcccttcttcaactacccgccttacttcacattgcagcctgtgcgagaaacacgtgaaaagcacgtgcagctgtggaaagatctgatacttgatgattgtggaagtcaaaagctatctataatctccctagaagaagatgccccattgttctccaatccatagatcgagagatctcttagccgtgaagcaaaggacgtattccttgctgctcttgtttatgaaggacgtgcagaatggatggacaaaggtcataagcagtgcctcattctttggttgcggatacaagattgggctaactacatattaaattttgtaaaggataatgggctggaagatagtgtaatgactgttgaagaaatacgttatggaattgaaacacgtgggtctgaacttgcaggaatggaccgtggtgttctcatgagggctttgaagttactggaacagaagggcaaaacagcgatttttaagggcacttcagttaatgaagaaggtgtaaaattttcggcttagtgtctggggcctgtgtggcagatcaattatcctgaccagcatctttaaatgacgagaattcttgccaaccaggacgctgatcacgtcctccccaaacatatttatctgccttactgttcactgctgctgctgttaaatgccatgatggccattccatctttgactgaaaaaacactgtaatcagaacttaattcatttccacaagcatacctacaaaaccctcctgttgttgtgtgataaaactaggaacttgtcttgcatctcatgcaaataaattttctatttaatcaggcc

SEQ ID NO: 18666 - DNA, 1223 bp, Oryza sativa
  ref <308>: DATABASE ACCESSION NUMBER: AK069051
  ref <309>: DATABASE ENTRY DATE: 2001-12-06
ttgccatcgatcaccattaattcatctccatcgacaaagctagctaagcccagtcatggccgcctctcccgcaatgccgtcactcctcctcctcctcctcctagccgttctcgtctcggcggccgatgcctacgactccgccgccagcgccaacaccaacgccggcgccatccccgaccccaacatcttgaacatggaggccatgtgccccaagacgacggacgtgaaggcgtgccagcaactggtgaagaacatgccgtccaacatcgtcgcggggaagaaggacgccaggagcatcgcccgggggtgcatcgccaccgcctggttcgtggcgagggacggcgccaaggactgcaccgccgccgtggacgagtgcaaggacaaggtcgaccagtgcctcgacagctgccgccacgccttcgccgccgtgaacgacgccctggagccccagggcaccggcgacgacgccgtcaaggtccccgaggacgagaagctcctcgccatccacgccagcctcacgcagctgctccgcggccccaccggcacgcgccgcccgcccctctgcaacacctgctgccaggacggctcgtgcacggaggagaagaagcgcaacgtcgtcgcgctgttcgtgcaattgtggagcttgctggatttcgccgacgcggtgctcgaggacctgtatcctctgacgaagctgccaggggacaaggccgcgggatcagatacctctgcggcggcggccggatcaaccgccgacaaggagacctctgcggcggctggatcaaccgccgacacggcgacctctgcggcggccggatcaacctccgcaaaggagacatctccagtagccggatcaaccgccgataagacctatgcagcggccggatcagctcctcctgtcgtcgacactgcgcctgctcatcccgtgacaacttatgattaattacaaacattcggtatttcatattttggaggatgctataggaactttaaataactcttccaaaatttttaggacaccaacgaaaatccttacaaaattttgactaatcaacgtttctaaggagtttaacaaatttctatacgtgtaactttttcttacatatctgagtaggtgcattgctgagggcagggtgcgccttccgtggttgtcattcgaaattgtctttgtaacctcgtcaatttaatgaagtttagaatcaaaatgatgagccttttatctc

SEQ ID NO: 18667 - DNA, 2034 bp, Oryza sativa
  ref <308>: DATABASE ACCESSION NUMBER: AK069052
  ref <309>: DATABASE ENTRY DATE: 2001-12-06
gatggttaccgtctccctcccaaagccccgcctggtgattcgccgtctccctccgtcgccgtgccttcccccgccaccgtcctgctcaccggcgttccgccggaacgacttgaagtccacctctcgagctcggcggcctcccccttagggcagaagcggacgaggcgaatggaagaggttaggggcagggagagcaaagaccaccgcggcggcggcggcggcggcggaggtgatggggacggcgagcggacgggacggtggcgcgccgaggaggtcatcgctgggaaccgcgcggttctggaggctctccgggagctcgtgatgtatcctgtcctctacgcacgggaggcccgcgtgctcggcctcaattttcccagaggattgctgctccacggcccctctggcactggaaagaaaagcatggtccgagctgttgttcgagaatgtaatgcccacctcacagtgattgattcaatttctgtgcataaaccccacgctggagagggggagaagttcatgcgagaggcttttactgaagcatattcccaggcatcacagggtagaccagccgtgatattcattgatgaacttgatgacatatgtccaccgcgtggcagtaggagagagcaagggtcccgcattgttggtcagctgttgactctgatggacgggaagtcatcaaagctgcttccccacctagttgttgttgcatctgctaccagggtggatgctattgagtcagcactgcgaaggcctgggcgttttgactcagagatagaggttactgttcctacagcagaagaaaggttcgagattcttaagctttataccaagaatctacatcttggtgaatgtgttgatcttcaatctgttgctgcatcctgcaatggttatgttggagctgatttacaagctttatgtcgagaagctgcaagacgtgcttatggtagattatcaagctcatcagagagtgagaatgtgctaacgctaatcatggaggattgggagtctgctaaatctgtggccaaaaatagtgtgacaagaggggtaactaaagaaattccagctgtttcatgggatgatataggaggtttgaaagctgttaagaaaaaacttcagcaagctgttgaatggcccatcaagcatgctgcttcatttgatagacttggaatatcacctatccgtggggtgctattgcatggtccaccagggtgctcaaagactacccttgcaaaggctgctgctcatgctgcccaagcttctttcttttcattaagtggtgctgagttatactccaagtatgttggtgaaggtgaagctttgttgcgacgtacattccagatggcacgtcttgcttctccaagcattatattttttgatgaggctgatgcaattgcccctaaaagaactggtcccagcgggaactctagtggcaatgccacggttggagaaagactcttatcaactctattgacggaaatggatggtttagaactggctacgggaattattgtattggctgctactaatcgcccaaatgcaattgatgctgctcttctgcgcccagggcgtttcgatatggttttgtatgttccaccaccagatgcggaaggtcgatatgaaatactacgcatccatacacgcaaaatgccattaggagatgatgtggatctttggaaggtagcagagcgtaccgagcttttcacgggcgcagatcttgaaggcctgtccagggaggcgggaatggctgccttgagggaaagtctgaggtcagagcgttttgtatgtgacgatattcacttccaggccgcgctaagatccttgcgtccatcacttacacaatcagtggttgatgagtactcaaatgcagccatccatggtccattgacgaggagaaaacactaaaagatgtattattctggcgcacaagcatcagtgtcgcccattgttgattctgactagttatcagaacattgtatcatcggtctgctgtatatattgaccaaagttgtgacatgttcccatatgattgcc

SEQ ID NO: 18668 - DNA, 2414 bp, Oryza sativa
  ref <308>: DATABASE ACCESSION NUMBER: AK069053
  ref <309>: DATABASE ENTRY DATE: 2001-12-06
gacccccccattccgccgcccccacccccagatctactccaccgccaccgccaccgacacccccgtctccggcgagtccccccgccgcctcctcgccggagaacccgcctcccctcccccaaccctaaagcctccccgtctcattcgcccccccaccggatccagatcaaaaccacacgccgatccagatcccgccgggcgcccagccatggcgcgcctcctccccttcctcgtcgcggcggcggcggcgttggtggcggtgtccctctccgcgccaggcgccgacgggttctacctcccggggagctacccgcacaagtacaaccccggcgagccgctgagcgtgaaggtgaactccctcacctccatcgacaccgagatcccctacagctactacagcctcccgttctgcacccctcccgacggcgtcaaggacagcgccgagaacctcggcgagctcctcatgggcgaccgcatcgagaactccccctaccgcttccggatgcacgccaacgactccgacctcttcctctgccgctccccgccgctcgccgccgacgccttcaacctccttaagaagcggatcgacgagatgtaccaggttaacctcatcctcgacaacctccccgccatccgctacaccaagaaggacgactacttcctccgatggaccggctaccccgtcggcatccgcgtcggcgtcgactactacgtcttcaaccacctccagttcaccgtcctcgtgcacaagtacgaggaggccaatgtcgcccgtgtcatgggcaccggcgacgccaccgacggcttcccttccaccggcaaggacggcagcggcggcgccgccgggtcatccggctggatggttgtcggcttcgaggtcgtgccttgtagcatcaagcacaaccccgacgacgtcaagtcgctcaagatgtatggcaagtacccgaggagcatcaagtgcgacccgaccaccgtgtccatgagcatcaaggagaacgagcccatcgtgtacacctacgaggtgtcgttcgtcgagagcgatatcaagtggccctcgaggtgggacgcatacctcaagatggagggtgccaaggtgcactggttctcgatcctcaactcgctcatggtgattgctttccttgctggtatcgtgtttgtcatattactgaggaccgtgaggcgtgatctgacgaggtatgaggagcttgacagtgaagcgcaggcgcagatgaacgaggagctgtctgggtggaagcttgttgtcagtgatgttttccgcgcgccaagcaacccaatgttgctctgcgttatggtcggggatggtgttcagatccttgggatggcagtggtgaccattctgtttgcggcgcttgggttcatgtcaccagcttcccgcggtactctgatcacgggcatgctgttcttctatctggttcttggaattttggcaggatatgtgggtgttcgtgtgtggaagacaatcaagtgcggtgatcatacagggtggatggctgtttcatggagggtagcttgcttcttccccggcattgcattcctgatccttaccactctgaacttcctgttgtggggaagccaaagcacaggagccatccccttctcgttgtttgtcatattgattctgctctggttctgtatctctgtgccgcttacacttgtaggtggactcctcggtgccaaggcaccgcacattgagtaccccgtgcgcactaaccagatccctcgtgaaatcccacctcagaagtacccatcctggttgctggttctcggcgctggcacactgccctttggtaccctgttcatcgagctcttcttcatcatgtctagcatatggatggggcgtgtgtactatgtctttggattcctcttcatcgtcctgttgctccttgttattgtctgcgctgaggtttcccttgttctgacctacatgcatctctgtgtcgaggattggaaatggtggtggaaatcattcttctcatctggatctgtggcgatctacattttcttgtactcgatcaactatcttgtttttgacctaaagagcttgagtggacctgtgtcggcgaccctctatctcggctactcactcttcatggttattgctattatgctggctactggaacagtgggattcatttcatcattctgcttcgtccactatcttttctcatccgtgaaagcagattaagctcatcccgatgcagagtgtattactcaaatgagaggtgagaatagtggacatcaaaaagcttgtagtcacaaaatcttagctcatgtcatcttttggtatacaaagactgaataactattgtaagctttactaggatttatcaatgggttttatggagagatgtgctagcagcttgcacgatgtaatagaatgaattggtttatcc

SEQ ID NO: 18669 - DNA, 2321 bp, Oryza sativa
  ref <308>: DATABASE ACCESSION NUMBER: AK069054
  ref <309>: DATABASE ENTRY DATE: 2001-12-06
ggtgcccagagagctcgacacaaatacagggggactcgtcttcttccccgagctttgcgagcagagtcgttcagccatggcgcggcaggagcagcagcagcacctgcaggtgctgagcgcgctggacgcggcgaagacgcagtggtaccacttcacggcgatcgtcgtcgccggcatgggcttcttcaccgacgcctacgacctcttctgcatctccctcgtcaccaagctgctcggccgcatctactacaccgacctcgccaaggagaaccccggcagcctgccgcccaacgtcgccgcggcggtgaacggagtcgcgttctgcggcacgctgacggggcagctcttcttcgggtggctcggcgacaagctcggccggaagagcgtgtacgggatgacgctgctgatgatggtcatctgctccatcgcgtcggggctctcgttctcgcacacgcccaccagcgtcatggcgacgctctgcttcttccggttctggctcggattcggcatcggcggcgactacccgctgtcggcgacgatcatgtcggagtacgccaacaagaagacccgcggcgcgttcatcgccgccgtgttcgcgatgcaggggttcggcatcctcgccggcggcatcgtcaccctcatcatctcctccgcgttccgcgccgggttcccggcgccggcgtaccaggacgaccgcgcgggctccaccgtccgccaggccgactacgtgtggcggatcatcctcatgctcggcgccatgccggcgctgctcacctactactggcggatgaagatgccggagacggcgcgctacaccgccctcgtcgccaagaacgccaagcaggccgccgccgacatgtccaaggtgctccaggtcgagatccaggaggagcaggacaagctggagcagatggtgacccggaacagcagcagcttcggcctcttctcccgccagttcgcgcgccgccacggcctccacctcgtcggcaccgccacgacatggttcctcctcgacatcgccttctacagccagaacctgttccagaaggacatcttcaccagcatcaactggatccccaaggccaagaccatgtcggcgctggaggaggtgttccgcatcgcgcgcgcccagacgctcatcgccctgtgcggcaccgtcccgggctactggttcaccgtcttcctcatcgacatcgtcggccgcttcgccatccagctgctagggtttttcatgatgaccgtgttcatgctcggcctcgccgtgccgtaccaccactggacgacgaaggggaaccacatcggcttcgtcgtcatgtacgccttcaccttcttcttcgccaacttcggccccaactccaccaccttcatcgtgccggcggagatcttcccggcgaggctgcgttccacctgccacggcatctcggcggcggcggggaaggccggcgccatcatcggatcgttcgggttcctgtacgcggcgcaggacccgcacaagcccgacgccgggtacaaacccgggatcggggtgaggaactcgctgttcgtgctcgccggatgcaacctgctcgggttcatctgcacgttcctcgtgccggagtcgaaggggaagtcgctggaggagatgtccggcgaggcggaggacgacgacgacgaggtggccgccgccggcggtggcgccgccgtgcggccgcagacggcgtagtgtatgactgcacgtgaatatagtgttgatgtgatggaaaaggactgaagtttggatctaaacacagcctatgaagtctaaagttattggttcaaattttgctgaaagttctgtttttcttcacaaaaagtagctttaaagttggaaatggactaactgtggagaatatatgtgaaccagatatgaaaaattgacttgcactatgatctgagtacgaagtcgaaattgagtatatttgactatgaactccatacttaggccacgtttgggggcccacagtacctaggtgacaaaaacgaaatacaacaaatttcgacgaaatttctgaccaaaggaggcctgcattgatgccgatggctcaataaagcagcagttgaattgttggacagcgtatttttctgacaaatatccggcaagtctgaagttcaggataaatagccaggcagggaagaagcgtgttcactgaattttgcaaaatttcttcagtcattcttgttgacgcggcaaaccccaatttaagccaaagtttggtaacctttttttgagtgtttggctgttaatttggggaagtgtaagtttgtttgaacagtaagtgagtatgaaaacatttattttagcc

SEQ ID NO: 18670 - DNA, 1443 bp, Oryza sativa
  ref <308>: DATABASE ACCESSION NUMBER: AK069055
  ref <309>: DATABASE ENTRY DATE: 2001-12-06
gacctccgctagggttcaatcgccgccgccgccgccgcgggcgttgcctgcatcttgcgtttgatttttttttctttttctgatttggattctgatccggtgccgcgaggaacagggataggctgctggtctgattgatgtttgcgtcgaatcagcaagcacggtgatcttgttcgaatttttagccccttcgaatgatttttgtttttgtggttttggtggattgtgccgtgatgattgctcgcttatttctgacacctcttgtatgagaagttgttctttcctcttccttggggatgaggaggagcacttcgctgagcagattgtagcaaatatatctgagcacacgcatcctcgctcattaaaaagatgagattattttttgttatgattactttctgtgatgagtttgtgttaggatttttgtgctaagattagtttttgttagactagctacttgctgtgatgagcatttgcttacttctgacacctcttgtatgagaagggcctcccttccttgagcagatttagcaaccctctgagctcctctttttttttcagctactctcaaactcatttgtagcattatttttctggaatcacctgtcattatttgtaatgcgatactataacgtattaacgtgttctaaatttaggcgttttgttcgacatagctgtagtggagtgtgtaatgtggggaacataccattggtgaacatattctagtacttgttattggtttgttatgtatactttggtagagtaggagcagctgtgatgagcattgctttcttctgacacctcttgtatgagaagtgcttctcccagagaagctcttcgttgagcagagtatagcaattgtctgagctctcctcatgccatctctcatttctcacatctgagcatctcttgtgcatttatagaagaaagttttgggtacaaattaagaggcttgttgtacacctataaattctttaagtgtttgatttggtgtgtgcactatgtatgattttctcaccaaaatttctgttcactttcacgaatattgctctcagctaacatttcagatggttcaagtttgaacaccaaggagcatatgaatggtctatcttgtcttggaggggtgcataatccattgatcagaaatgggtcgattttaaggagtgggtttatgaacttaacctgcaaacaacttacaactgaatgtacttgctgcaatgttggttctctttcttttaatttttacaaagctggcagcagcattcttgagctatatacttctgtatgtaaagttgtaaaaagtttggagaaaaaaactagcattggtgacacaaaactatatagcacaattcatagtgcactttgtcatgtactccaccatatgatggtgtatctgtttatattctgcactcaagttcaactgcttgttcatgtggtgcctcc

SEQ ID NO: 18671 - DNA, 2103 bp, Oryza sativa
  ref <308>: DATABASE ACCESSION NUMBER: AK069056
  ref <309>: DATABASE ENTRY DATE: 2001-12-06
gacgggtcacctgcctcctcctgccgtgccacaaaaagcaaggcaaagcagcagcgaggaggcgagacagattcccaaatcccgcacaaccccaccccgaatccaccaccccacgccaagcccgctcgccgccgccgcccgagcgcgcgcgcgtacgggcacggcgggcgtacgacgccggaggtggggatcgagcgtgccccctcctccgtcgcggcgggcgacgtcggacgtcgtcggtcgtagcttgccttcgtttcgttgtcgggttttcggtgctgctgctgctgctggtggtggtcgagcaaaggccggtggcggatcgccggcggtcccgtccgcgggaggggcgcgggtgacgcggtgatcagataaaagtgtcccttctaacattgccatttggagctctatgggttggttgaccaaattttttagaggttcaacccacaaaatctcggaagggcaataccacagcaaacccgcggaggagacgatatggaatggaccctctaattccgcagttgtgacggatgtcccgtcagaatttgacaatgaagatatcgctcgtgctatatcactctctctattagaggaggaacaaagaaaggcaaaggcaatagaaaaggacatgcatttggaggaggatgaacaacttgcaagagctatccaggaaagtttgaatgttgaatcgcctcctcgtgctcgtgaaaatggcaacgccaatggtggcaatatgtatcaaccactgccatttatgttttcttctggattcaggacttgtgccggatgtcacagtgagattggtcatgggcgtttccttagttgcatgggagctgtttggcatccagaatgttttcgctgtcatgcttgtaatcaaccaatatatgactatgagttctccatgtcgggaaaccatccataccataaaacatgctacaaggagcgctttcacccaaaatgtgatgtctgcaagcaatttattcctacaaatatgaatggcctgattgaatatagagcacatcctttctggttacaaaaatactgtccatcacatgaggtggacggtactccaagatgctgtagttgtgaaagaatggagccaagggaatcaagatatgtattgctggacgatggtcgcaaactctgcctggagtgccttgattctgcagttatggatacgagcgagtgccaacctctttatcttgaaatacaggaattttatgaaggcctaaatatgaaagtggaacaacaagttcccttgcttcttgtagaaagacaggctttaaatgaagccatggaaggagagaagactggtcaccaccatcttccagaaacaagatgtttatgcttatcagaagagcaaactgtcagcacgatattgaggagaccaagaatggctggaaataaagttatggaaatgataacggagccatataggttgactcgtcgatgtgaagtgactgcaattctcattctttatggtctcccaagattgttgacaggttcaattttagctcatgagatgatgcatgcgtggttgcgacttaaaggatatcgcacacttagtccagacgtagaagagggcatatgccaagttcttgctcacatgtggattgagtcagagatcattgcaggatcaggcagtaatggtgcttcaacgtcttcatcctcatcagcatccacatcatcgaaaaaggggggaagatctcagtttgagcgaaagcttggtgattttttcaagcaccaaattgagtcagatacctcaatggcctatggcgatggttttagagctggcaaccgagctgttcttcagtatggtctaaagcgcacccttgagcatatccggttaacagggactttcccattttgaaatttcatagattcgtcttttgatggaagttatacacgatcgatttgtcattaagcgtccatttacaggaaaagaaagcaattttgagatgtgcaattgtacaaacaatcttttcagttacttttggaagggctaactgacgacattgattaaattgtgatatggttagcccaaccaatcacacatgtatggcattcagaaattctaatggaaacagcggtattttttatgtg

SEQ ID NO: 18672 - DNA, 2702 bp, Oryza sativa
  ref <308>: DATABASE ACCESSION NUMBER: AK069057
  ref <309>: DATABASE ENTRY DATE: 2001-12-06
ggagagagagagagagcgagcaggttgtggatttggggttgggggtggcggtggcggtggtggtggtggtggtggtggagtgcggcggcggggatagccgcgcatgcaggtgacgatcaagggaagggtgcggcagccgtaggtgtggttgccggcttgcggcggtggaagagggggacgggtccggcagtacgctgctagaagaagggtacatccgtacagaaggggaagcagtaatggagcaagggagagggaaggggatgcttgtaggcggcagcagcagcagcggcggcggcggcggcggaagagtagaagagggccgcgtcgctcgggaaaaagcgcggatcccatatacaataccaccacctctggatcgaccatctccgaactacaccgtggtggatctgaaaggtactcaagtacaagtgcgaaacagatggcgaaagtcggtgctagattatcgtctatggtgctacaatacatctgacgcacgatatgaatttggtcacccgtatcgaagatgttgtgctctcccaccaaaaggtcatttcctagtgtacatgcactacaaagggaagtggctttgtgctctaattgaaggtatttctggatacctcaatggttatattactagaagcacagggaagattgatgatcttcgtattagggagaatggatacctgggggtcacaaaatcagaattcattgaacatgcaaaaaagctgccctgggatggtgcatatgtgactgcccatcaagcaaaatgtggagataatgctcttcttaagtcatttcttattcttcatcggtatgttgatggtcaagctcctatgccctcagatgatgaagtaagagaagctggtgaagttatgatcttacactttccagaagccgctaagtccgacaatctctttcttgataaaattcacaagaacttcagggcatcaccagcacatgtttttgggaaacgacaaattgaaaaggcaagatcatggagtaaaacttgtggggatgttaagtcaattttccaaggagatggtgcacaaagtgaaattgcagaaaaaggtagaagagaccatgatgccacaaaaaaaagttctaagaaagatgtgacagaagcagaagcaaaggagtttcttgaagaggtacggcttatccacaggacttttgataaggcagagaacctatttcttctaaaggatatgcctgtacatctgtccatagatggcccaatagatgttgcatggactgaaaatgagctaagaaggagtcgtgaacacggtttggatgatccttcttggggctttctcacagaacgatccccaaaatttccacccactaacaacaacgaacaaaatcaaccgactctgattgagaatgcttacatgacattcagtgaatgtgatgagtactccggctcaccagaccatcaagaagagatgaatgaagaatctgtgggatataaggttacttctgcaagagctggtgtaccattcttttgccaaacagcctctgaatttgaggaaatgagaatcatacccgtgtttgaatcttcgaaaaaagatgtgctgtcgtcctttcaacttgacccagaacttacagaacctcatcgacttataaaacatgagaaattggagctctatttgcaagacaatcctttgtgcagtgatgtagacagtacacttgactctaaaatggctgcaattaaggctgcaatagaaggtgctgaaggacaggacaccgcacataaggagtttgccaaatgtcacatcatgggaaatcacaagaggccattgttactatcgagtgaatccagaaagcttatcgcataccatgaaagtgggcatgctattgttgcactccacactcagggtgctcatcccatacaccaagcaactgtacttccacatggtctttctcttggaatggtcacacaagtcgcttcaccaggaaatacttcaattagcaaacaaaaaatcttggcccgcattgatgtttgttttggtggagcagttgctgaagagctgttgtttggggagcacactgttacagctggggcgaaaaatgacctctttactgctaaagagcttgcccaaaaattggtattatactgttagaccagtgatactgttgatcgtatgcatctggaaaaatggccaagtgtacaaatgcaggccacgattaatgcagaggtgttgaaactcctaggagaatcccgtgagcgagtgaagcgtttgctgaagaagcatgagatgcagctgcaggctgtggcaaatgccctattggagaaagaaattctcaatgcagatgagatcatcaaggtggtgcagccctacaaaagagaaccacagattaccttccaagataaggagcttgcagttaattggtcgtaacatttgctgcataaaagggcagaagatacattaaggcgaacagatggtgactgctctttttttttttgtccacttttccttttttgtaatctggatctctgcaatatggatgcatattttcttggtggcacatgaaggttgtgctcaagaagctagctaggcgcgcccttgataatctttaatttggtctttagttagaaagaaacaatagagctaggtgcaagtgcagcatctcatatttctgatgctaggattatttccgcctgtgtactgtaaatctctaatgcatgggtcactcttgttctttgc

SEQ ID NO: 18673 - DNA, 1395 bp, Oryza sativa
  ref <308>: DATABASE ACCESSION NUMBER: AK069058
  ref <309>: DATABASE ENTRY DATE: 2001-12-06
ggccgcgggaggggagggagatcccgccgcccccccaaccaccaccgccggccacctcggatctcggctgcgtgctgcggcggcggaggaggcggagaaggaaggaggagaagatgttctatggggcgatggtgtgggatccgtggctgatcgtgtcgcagatcgtgtgcctgcagtgcctctactacctcgccctgggcctcctcatggcgctcctcgtcggcacccgcgtcccgcgcctcaccctcctctacctcttcgacttcgccacgctcaccccgcgcaccaccaccggatggtgcgtcatcgccgccttcctcctcgccgccgccgccggtgctgctttcatgctttatgtgattgagagagctaagaagtgcctggactttgcagccaccctctacatcattcatctgtttatttgcattgtttatggtggatggccagcttcagttacatggtgggttgttaatattgctggtttggcgattatgtctcttcttggtgaatacctatgtataaggcgggaattaaaagaaattccaatatcacggcttcgtgcaagtgtttaatcttacagactaaaggagtatagatggccttcaaatgttgttaccccccaagagatgcttgttaatatgtttctttaggaatacaaagactcgtgatacatgctttcctctatggtttacgaccaatactcttcaaacctgcaaattgatgcatgatctcccagtaaagccaccaggtagagactgacagaacaaatcaagggttctgagaccaagcatagaatgccaactcaatttttaaagcatgtatcaactattcaagtcttctcttctctatggatagtctcattgaattgacgaaaaaagagattacttgacaatttgtatggctagataccagcaccttgaaacctgtgttctttagcgagggtctgtatcgcaccattcgattcttctttagctttatcctgcagataatatatccagtttccagtgcttcctcttaagctcattccagcagagttcagtttggcggccaatcacatgactactcgaacctccaaatcatgctgtccttctgaacatgtatgtcaatatatgtgccctgtgtgtattgcgtcagaggtgttgacatgagttggttaaaaatacatgcttgatacgaaattgtaatttccatcgcaggtgaactcgggcaaaaattttaaaatcccttgtgggttcgcacttttttttcctctagtgctgtgatacttgcagtagtttgttttatccttgctaagtattgtgatattgtcagtactacagaagcgcctgtaatctcaggtgtcaaaacccaaaatcacttctttctcttctcttcactaaggttaaatatgcattg

SEQ ID NO: 18674 - DNA, 2175 bp, Oryza sativa
  ref <308>: DATABASE ACCESSION NUMBER: AK069059
  ref <309>: DATABASE ENTRY DATE: 2001-12-06
aggacgcctcccacctcttcctccgccgcgcctccacagccggcgcccccatcgccgcgcagtcctcctcttcgccgcacctccctcctcttcgccgcgcctccaccgccggcaacaccgccgcgcctccaatctccggttcgccaccaatacggagtcgcttggtccccgcctcgccggtctcctccgacaacaccgcgcgcgccgccgaaacacccacgaccgcgccaccaccgatccggagtcgcatcgcgccggatccccgcaccgcacgcatcgcgcatccatcacctcgctaccctcgctcaagctccatcgcacgccgcccttctccgcccgcgcaccgcctcctacacgctctccttcctcttctccccattgctcgcctctccaatgcccgctcgcaccgcgcagccgcatccatcctctacgcttcatctgccgcacgcgccccattccgtccgctgagcttcacgcctccctacccctcagcagtcagcacctttatctctccccctcagccctaatttatctgatccacgaaggtctctcctccaatccagtcgaaagaggtaggaaccgaaccgccgccacctccagtttgctgtgccacgatctgccgcccagatgtcctctccgccccaggtgtcctcgccgtcaactccaccttttcgcaatcgcaccgcaactccacaactttttcttctttggtagcttttggttttgcagggtgaattgtagcaaattaatgaggttcttgatcatggcggccgtccggtgggtggttcttgcatacatcgtcgtcgtcagctgcgacgacagtgagcatgtgctgttgaggattgccatcgagagggttgctgttgttgattcagctagcgttggtgttcactaatgtttcttggcttgaaggttaatttgctcatttgtttacatacgtcataccatgaaagctgcttaattattagctatctccaaggcatgattatatatcgtagtctcgatcaccttctgtaagattaagatcagtgaaattttatgaattacctttttgttgtggctatttatgtttcagggtccagtactgattgggtggtggttgagttcttccatctgaaaccctcgatgacgattagctttaggattttggtcagctgcaagcttgtgctaatttacatacatgatacatctcacctataattgcatactagctaggactacgtatggaacaagtagatggtagtacctgaacatttctagctctgaaatatgccagcctgaatattatggagacctcccaccctgtctgtgtacaacacctgtgaaggttggtgctctcctttaatttccatgtcaatctatggatgatgcaccatgtattgagttttggaaagttatatgcagttccaggttgcaagtttcaaatgatgcctataaaagaagtggcaaggggcaagggctccttgatgctgcaattactgaacaagagagaatagttcatatttgcactctttttaggaggtatttctgctgtaggatttcagtatattatctcacatttttcacaatttttgaaagtggcttttcctgacaatttttcacacttttagcatccaaaactgattgttgtctcaaacaaagtatcctttgagaatccaaaggcacccgtctactctccgttacagcaaaggagatcctagaatgaagtgagcccaatctcctttcttatttaccaatggaagtggacatgttaattgtttaaatcggtcatttagctcacgttttacttgttcaggcagaaatagatggtcctgacatgtatggaaactatgagctatttctgcatgaacaagtcaaacatgagctaaaggagtgaactaagcaattaattcttttaggtaacacatatatctgtttgggaaacaaagaaatactcagttcagtgccaaagcaaatacaagtccatatcaaagttatcatactgccagaggtctaaagatgaaacctttttttcctaacaaattagaaaatagagcatatgatgtccagaaatacctgcaaatgtgatcaacaaaatgtcgtcttctttgtagaacttaaaattttggaagcttttaatcaaaacctgggacgtctgaccttcatttttttttaacaaagtctgaccttcattcc

SEQ ID NO: 18675 - DNA, 2323 bp, Oryza sativa
  ref <308>: DATABASE ACCESSION NUMBER: AK069060
  ref <309>: DATABASE ENTRY DATE: 2001-12-06
gattcatcatcccccacctgtttccccccacgccaccgcgatggacacgccgcctccacctcctccgccgccgccgccgacgccgacgcagtcgtcgccgccggtgaactgggacgcgctcgacgccctcgtgctcgacttcgccagatccgaccgcctcctcctcccgccggcctccccgtcgccgccctcctccccgtcctcgtcctccaccaccaccgccacctcctcctcctcctcggcgccctcgccgtcctcctcctaccgctcgcgcctcctcatccgccgcgcccgcaccgcgctcgaggagggggacgtcgacgccgcgctcgcgctcctccgggcccacgcccccgccgcgctcctcgaccaccgcctcctcttccacctccacaagcagagattcgtggagcttgtgaggaggggcacggaggcggacagggaggcggcgctggactgcctccgcacggcactggcgccctgtgcgctggatgcctacccggaagcttatgaggagttcaagcatatactgctagtattgatatatgacaaagatgatcaatcatcccctgtagcaaatgagtggtctataaagaagcgatttgagcttgctggattgctatcatccatattgagaactcatttacaagcttatgatcctattctatcaatgacattacggtacttgataagcatccacaaactactttgctcgcgccaaggaatttcttcgcctatatctaatctgactgaaaggctgctgtttgatgaccgtgatccacctgcagttcctcaggaatgctcgctagaagcgccaccatttgatgaggtagatgtgcaagccctagcacatgctgtggagttgacaagacaaggggctgttgacagtttgaagtttgcgaaaggagatttatttcaagcgtttcagaatgaattgtgccgaatgaagctggatctgccacttctggataaacttatacacgagtactgtatatacaggggaatagttgaaggtggttcccatgtccttcctggattgcaaagcaataaccaaagtaatgatgtcaatttcgtagataaacaggaagacagtactgaaacacggattgattttgaaatgactaacaatcagaatggaaattgtagcaccagtgatacttcccatcatgattcctggtccaggagattacgtagggttagaagtagtgcatcggggcaacgaaggcggaagagatggagaggacgggtagatgatctggattatggttgtgagaccccattggatgcaaataaacatgctattttatgttctgctcttgacatggatgaagatgatatgatagttaaaccagacttgatggcagatactggtttgcctgattctagatgtaatcaagatcagaaatatgaagttattttagagatgagggatctcacacgcaaaggaatggcttcaaaagttgttgaagagataaacaacatggatcctgatttcttcttgaaaaaccctattcttctatttcagctgaaacaggttgaatttcttaagctagtagcttctggtgatcacggagctgctctcaaggttgcatccactcatctggggcctcttgctgccagtaaccaagctttactgaaacctttgaaggaaactttagtaacactaattcaaccctgtgaagatgtactcacaaagtcagtttcattacccgttcttgcaagttctctccagattgcaatgagcaggaggcttggtattgaagaacctcagttaatgaagataattagaacaacacttcacacgcacagcgaatggtttaagcttcagatgtgcaaggaccgttttgagcactttttgaagattgattctctaaaagaggttgatccatctgcggggagtcacaatatgtccaaggttcttacagatgaatgtgctaatggatcttctcaaatcacaacatgctctagtggcaaggtgctagatgaaggtagtagccctcaggagtcatcagaagttacctgtgatgaaaacgccatactcaaggtcatggaatttcttgctttgccaagggctgacgcgatccaactgcttatgcaatatggtgggaatgccgaggaagtcatccaacagatcttttcgtagtgctttgtgtaaatatcagatacgtttcatttgttttagaaatcaattatttgttcatacttttcttgtatatgaagttctattggaactaggtttctggtcccagtacctttgtccactacgttttcttccatgtaatacagaaacaaagatgaaaaaataatccggttcacacttccc

SEQ ID NO: 18676 - DNA, 2584 bp, Oryza sativa
  ref <308>: DATABASE ACCESSION NUMBER: AK069061
  ref <309>: DATABASE ENTRY DATE: 2001-12-06
ttgaggagaattaaacgagcaagatatatcgtcgacgaggcccatcgcgtgcgcttcccctcccctctcgcctccccaaattcgcgttcgccaccgtcgcgtcccccctcgcctctgcctcgccggaaccctagggagatcgccggagcacggcgctggctcacgggcggcggcggagatgaactcgcagaagaagcgcagccccaagatcgagcccttccggcaccgcgtggatgcggacccaaagtccttcgacaaatcgtggaagaagctcgaggacgccatccgcgagatttacaaccacaacgccagcggcctctccttcgaggagctgtacaggactgcttataacttggttcttcacaagcatggtctgaagctatatgataaactcacagagaatttaaaaggacacctgaaagaaatgtgcagatcaatagaggatgcccaaggtagtttgtttctggaggaactgcagagaagatgggctgatcacaataaggcactacaaatgatcagagatatactcatgtatatggataggacatttattgcaactaacaaaaagacacctgtctttgaccttggtctagagttgtggagagatatcgttgtccgcactcccaaaattcatgggaggttgcttgacacactccttgaactcattcatagagagaggatgggtgagatgataaacagaggtctgatgaggagtaccaccaaaatgttgatggatctagggtcttctgtctatcatgatgactttgagaagccattccttgaggtatccgcaagtttctatagtggtgagtcacaacagttcattgagtgctgtgattgtggcgaatatctcaagaaagctgagagacggcttgctgaagagttggagcgtgtttctcagtatatggatgccaaaaccgcagacaaaataactagtgttgtggacactgagatgcttgcaaatcacatgcagcggttgattcttatggagaattctggtcttgtgaatatgcttgttgatgacaaacatgaagaccttagcaggatgtacaacttgtttaaacgtgttcctgatgggcattcaacaattagatctgtgatggcctctcatgttaaggaaagtggaaaggcattggtatctgacccagagaagataaaggaccctgttgagtttgtccagcgtcttctaaatgagaaagacaagtatgatgagatcataagtatttcattcagcaatgacaaggctttccaaaatgctctgaattcctccttcgagaatttcatcaacttgaacaaccgatctcctgaattcatttcgctgtttgttgatgacaagctccggaaaggggtgaaaggggccaatgaagaggatgttgaaactgtcttggacaaggtgatgatgctcttcagatatttgcaggagaaagatgtttttgagaaatattacaagcaacacttggccaaacgtcttctatctgggaaaactacttctgatgaagctgagaggagtatgcttgtgaagctgaagacggaatgtggctaccagtttacgtcaaaattggaaggcatgttcaatgatctgaagacatcgcatgatactatgcaaagtttttatgctaatctctctggtgatactgatagcccaacaatatcagtccagatactcaccacttggtcttggccaacacagccatgtaccccctgcaaacttccacctgaaattgttgatatatctgagaaattccgggcattctaccttggcacccacaatggcaggagattgacatggcaaacaaacatggggaatgcagatatcaaagcaacgttcggaggccgcaggcatgagttgaatgtctcgacatatcagatgtgtgtcctgatgctgtttaattcagcagatggcttgacttacggtgacattgagcaggccacaggtataccacatgctgatctgaaacgctgcctccagtctcttgcttgtgttaagggtaagaatgtgctgcggaaggaacccatgagcaaggatatatctgaagatgacactttctactacaatgacaagttcacaagcaagttggtcaaggtgaagattggcaccgtggttgctcagaaagaaacagaaccagagaagttggaaactcgccagagagttgaggaagacaggaaacctcaaattgaggctgcaattgtcagaatcatgaagtccagaagagtcttggaccacaatagcgtaatcacggaggtgacaaagcagcttcaatcgcgctttttgccaaatcctgttgtgataaagaaaagaatagagtccctgatcgagagggagttcttggagagggacaaggtagataggaagatgtaccgttatcttgcatagatgccctccctgtcgaaacaacagactgtccataaacgggttgctgctatgtatacctacccatgtttcaattttcttccattcattctctttagatctgctgcagagccaaaggtggcatactaacatttctaggcctgttatctttggtacagatatagaaaacgatcttatatctttctggtaatacatagaatgttgctggtcgtt

SEQ ID NO: 18677 - DNA, 1760 bp, Oryza sativa
  ref <308>: DATABASE ACCESSION NUMBER: AK069062
  ref <309>: DATABASE ENTRY DATE: 2001-12-06
gacccctccacttctccttctcctgcgccgcctcatcttatctcgccaatcccccttcgtcgcgcgcgcaaggctaaaccctagctcctccgcggctccgcccccaccgcctaaaccctagttcggagagttgcgtgcgggcgtggtgcgggaggatggccgagccctccaaggtgatccacatacggaacgtcgggcatgagatctccgagagcgaactgctccaggtggtgcagccgttcggcactgtcgccaagctcgtcatgctgcgtgctaagaaccagatggaggatttagcttctgctgtgaatgtgatccaatactacaatacaattcaacccagtgtaaggggaagaaatgtttacttgcaatattcatcccaccaagaattgactactgatcagagctctcatggacgaaatcctgatcaggaagaacctaaccgaattctgttagtaaccattcatcatatgctttaccctataaccattgaagtgcttcatcaagtgttttctccctatggatttgtggagaagatagtcacatttcaaaagtcagccggctttcaaaccctcatacaatatcagtcacgtcaaagtgcaatacaagcttatggtgctttacatggacggaacatatatgatggttgctgccagctagacattcaatattctaatctcagcgaattgcaagttcactacaacaacgatagatctagagatttcacaaatccatctttgcctacagaacaacgctcaagatcatctcagcctagttataatgatccaagcagtttgtttggtttccagcaacctggagatccgtatgcacagatgagtaaggcagcaatgatcgctgctgcttttggtggaacattgcctcctggagtgtctggcatcaatgaccgttgcacacttctagttagcaatctgaacactgataaaattgatgaggataagctcttcaaccttttctcaatgtatgggaatatcgtgcgtatcaagatactcaaaaataaaccagatcatgccctcatccagatggctgacgggcttcaggctgagcttgctgtactgtatttaaagggagcaatgctattcggaaagaagcttgaagtgaactactccaagtacccaaccgttactgctgatccagatgcacgtgactactcaacttctcacctcaacagatttaacagcaatgtggtgaagaactaccgccactgttgcgccccaaccaagatgatccacatctcagcgcttccacaggacataactgaagataccatccattcccttgttggtgagcatgggactatcgccaactcaagactgttcgagacgaacggcaaaacgcaggcccttgtgctgtttgaaagcgtggaagaggcaacagaggcgctcgtggagaagcacgcaagcaagctggaccgaaccaacatcaggatttccttctcacagatgcagaatatatagttctttcctgggaattgtgaggagccaaagctataagcttaccttaacttttggatttcgtgcacttagcttgcatgaaccgatatatgtttcacctttgcccaaaaagtggtgtgaactgtctttcatgtatggatggatggatcagttaaacccgtgttctctgttatgtgatgccccctcttatgcaattcagcatggatatgttaaacctgtgctcatatgccctaaaaatggtgtacactttcttaatgaatatatatcactgcagtggtttgacgatcg

SEQ ID NO: 18678 - DNA, 1707 bp, Oryza sativa
  ref <308>: DATABASE ACCESSION NUMBER: AK069063
  ref <309>: DATABASE ENTRY DATE: 2001-12-06
gatctcatctcaagaagaaaaataattaattactcgcagcaaaggacggacagtttcctgcgcaaattccacgttccaccttcctcttcggtcgtctccgccggcttggagttgggagaagaagctcaaacgcggaggccaccacgaccaccacaacaccaccacctcttctcctagtcaaacccacccttcccttgtaatcttcgcaacaacagcaggacggcaagttcgtagctttcccctccgctttatacacccgcatctccaaatctgaggagtgaggggagaagataaagaaagaaaagcgcgcattttggtgtccggggaagggaaaagggcggttcttggcgtcggtggcgggttttgttttttgggggtggaagcggttggtttggggatgagcagcggccaggaagccggatcgagctccggtggatccggcgatggcggcgcggcggcgcccaggaggaacaccaggaagcccaagtattccaagtttactcagcaggagctcccagcttgcaagccgattcttactccaaaatgggtcatttcagttttcgttcttgtcggagtcatttttgtcccaatcgggcttgtttcgttgaaggcttcacgaaaggttgttgagatagttgatcgatacgatgatgcatgtgtcccagctaatacaactgacaagcttgcttacatccagaacccaacaataagcaaaaactgcagaaggactcttaaggttccaaaggatatggatgcaccaatctttgtgtattaccagctggataacttttatcagaatcataggagatatgtcaagagccggagtgatgcacagctaagagatcccaaaaaggcaaatgacacctccacttgtgatcccgagggtacagcaaatggaatggcaattgttccttgtggtctgattgcatggagcatattcaatgatacatatggctttgttcgcaacagtaagaacctgccagtggacaagaaaaacatctcttggaagagtgacagggagcacaaatttggacgtgatgtctttccaaagaacttccagaatggttctcttataggtggaaaaacacttgatccaaataaatcgttgagtaaacaagaagaccttattgtttggatgagaactgctgcacttccaacattcagaaagctgtatggtaggatacacactgacctcaagaaaggtgacaccattacggtgacattggagaacaactacaacacatatagctttagtggcaaaaagaagttggtactttctacctcgacatggctcggtggaaagaatgattttcttggtctagcatatctcagtgttggtggactctgcttcttcctggcatttgcattcaccttgctgtacttgataaaaccaaggaaaatgggtgacaacaactacttgtcatgaaacagaaaccctgcaggccgttaataagctcttcaaacttttaagttgcaaattcaacatgaagcaagttggattatggattcaaatgtatcttgtactagatagcggttttatttgttagccgtgctggagtgccaatacggcttataccaattagggcagcgtttatgagcaacactgatgtacattatgttgcaaagaaaaatatatatatatacagccttcttttgttgaaaattttaaatatcccagaagttaaatggaatgatttttatattgtt

SEQ ID NO: 18679 - DNA, 1092 bp, Oryza sativa
  ref <308>: DATABASE ACCESSION NUMBER: AK069064
  ref <309>: DATABASE ENTRY DATE: 2001-12-06
gaacccgccatagctcccggcctccgaagatggagacctcctccttcctccgcaccaccctccccaccgcgaagcccctcccggcgttccagaccctcgcaccccgcccccgcccccgcccgctccgccgctccaccatcagcgcggccatcacccgaggccgcaaggaggacacggtggccgccgtccgcgagcagctggagggctgctacctcctcgccgggatccgctacgagggcctcacggtgaagcagctacagggcatccgcgacaccctcccggagacctgccggctgctggtggcgaagaacacgctggtggggaaggccatcgagggcacgccgtgggaggcgctcaagccgtgcatgaaggggatgaacgcgtggctgttcgtccacaccgaggaggtccccgccgcgctcaagccctaccgcgccttccagaaggaggagcgcctcgaggagaccaacgacttcgtcggcgcggtgttcgagggcaagttctacgcccccggggacttcaaggcgctcgagacaatgcccagccgcgccgaggtgtacgccaagctgctcggctcgctgcaggggcccgcgacctccgtcgtcaccacgctgcaggcgccggccagggacgtcgtctccgtgctctcggcgtacgtgcgcaagctcgagcaggaggtcggcgccgcctgatggctgttgagagatggttttgtggcttcgtttctctcatctcactcatttcttgtagaattcctgtacttttactgcctcacgtttgaattgaatcacaaaagttttacctcttacaacgcatgcctactggtctgatttcataagattaccgagttctgatgttattaggattacgttgcgtacttagagggaatgcttgttccacaactagtgttttgataatttaattttacctgtagagactacagagatcaaagtttagtaggttgaggggcaatggcaatgcacaattagaatggtcaataactactagtgcttgtgtagttgtaccatcaatcagtgtatccaggtttacaacaaagttgttcagagcagtatgatgagatgttttaaaacc

SEQ ID NO: 18680 - DNA, 1675 bp, Oryza sativa
  ref <308>: DATABASE ACCESSION NUMBER: AK069065
  ref <309>: DATABASE ENTRY DATE: 2001-12-06
ggcctcctcctcccctcccctccactccgcgagccgccacctcctccgccgccgacgacgacgacgacgccgcatccccaaccctagccgccgctcggcggtgctgcgacgtaggagcgggtctcctctctgcatggtccgttagggctaccgagccgatcgaccggcgggcctaaaaccctagccgagagaggctgcgggttgggtgggggtgggggcgtgctcgactctccggcggcgccatgaagctgacggtgaagaccctcaagggcacccagttcgagatccgggtgcagcccaacgacaccattatggctgtcaagaagatcattgaagagatacaaggaaaggatagctacccatggggccaacagttgctgattcacaatggcaaggttttgaaagatgaaagtacattggaagagaacaaagtcagtgaagttgggtttttagttgtcatgcttagtaagagtaaagcttctggttccagtggagctttaagttcactgacttcaagcacccctttgaccaggcaagaaactcctgcggatgcttcacgagcagctcctcaacccctagttgcacctacaagaacaccccagcccgaaaggccacctgcggtagccccttcaaacgcatatggtcaagcagcatcaaatctattgtcgggaagcaatcttgacactacgattaaccagctgatggaaatgggtggtggcagttgggacagagataaagtccaaagagctctacgtgcagcttataacaacccagagcgtgctgttgaatatctatattctggcattccaattacagcggaggttgctgttccagcaggtggtcaaggggcaaacacaaccgagccatcttctactagggaagccagtctgtctggaattccaaacgcatccccgttaaatcttttcccacagggcgatgcaaatgatggaggtggtgctggtggtggaacacttgagttccttagacataaccaacagtttcaggcgcttcgggaaatggttcatactaacccacaaatattgcagcctatgctccaggaactgagcaagaagaatcctcaacttctgaggttgattcaggagaaccatgatgagttccttcagttaataaatgagccctttgatggtgctgatggggacttcttagaccaacctgaccaggatgagatgccccattctatcaatgtcacacctgaagagcaagaggcgattggacggcttgaaggcatgggatttgacagagcacgtgtcatcgaagcattcttcgcctgtgacaggaacgagcaactcgcagcaaattaccttcttgaacatgctgctgatgaagattagatggaattatttaaacccgcttattctgtacacctgccctgcaatttatcagacttttgaagtttgcgggtgctttggatccaaattgaacaagctgagatggagctaacaccgcgttgcatcgatttatctcttgtacaatacttgctttatttaattgctggcttagcattcaaatacatggcttaacatttattcgagctgtctgagggacggatccttttgtccatccgtttttagccagaaatttcaatggatgtgaattgtgttgaccacattttctgtcctgtttgtgttattcaattcgtgatttctagagcagt

SEQ ID NO: 18681 - DNA, 2877 bp, Oryza sativa
  ref <308>: DATABASE ACCESSION NUMBER: AK069066
  ref <309>: DATABASE ENTRY DATE: 2001-12-06
gggtttctttcacgcgcgctcgccaccgccctccttgctcgtccttccttccttgcatgacatgtccgcggccgcggtgctcgccgtcgtcgccgccgccgtcgcagcgctcgccgcggcggcgtcgggctacgagctgaccaagaacgggaccgtcatcacctacgaccgccggtcgctgatcatcgacggccaccgggagatcttcttctccggctccatccactacccgcggagcccgccggacacgtggcccgacctcatcagcaaggccaaggagggcggcctcaacgtcatcgagagctacgtcttctggaacggccatgagcccgagcagggcgtctacaattttgaagggaggtatgatttgatcaagttcttcaagctgatccaggagaaggagatgtacgccattgtcaggatcgggcccttcgtgcaggctgaatggaaccatggaggtctgccatattggctccgggagatccctgacattatcttccggacgaacaatgagcctttcaagaagtacatgaagcagtttgtcactctcatagtgaacaagctcaaggaagcaaagctcttcgcatcacaaggaggccccatcattctggcacagattgagaatgagtaccagcacctggaggtggcattcaaagaggctggcaccaagtacatcaactgggcagctaagatggccatcgcaaccaacactggtgtcccgtggatcatgtgcaagcagactaaagctcctggtgaagtgatccctacctgcaatgggaggcactgtggagatacttggccgggtccagctgacaagaagaagcccctcttgtggactgaaaactggactgctcagtacagagttttcggtgatccaccgtcccaacgttctgcggaggacattgccttctccgtggcgcgcttcttctccgttggcggcacaatggcaaactactacatgtaccatggaggaaccaactttggaaggaacggcgccgcgttcgtgatgccgagatactacgacgaggcccccctcgacgaattcggcctgtacaaggagcctaaatggggccatctcagggacctgcaccacgctctccgtcactgcaagaaggccctcctctggggcaacccctccgttcagcccctcggcaaactctacgaggctcgggtgttcgagatgaaggagaagaacgtgtgcgtggcgttcctgtcgaaccacaacaccaaggaggacgggacggtgacgttcagggggcagaagtacttcgtggcgcggcggtcgatcagcatcctcgccgactgcaagacggtggtgttcagcacgcagcacgtcaactcgcagcacaaccagcgcaccttccacttcgccgaccagacggtgcaggacaacgtgtgggagatgtacagtgaggagaagatcccccgctacagcaagacctccatccgcacacagaggccactcgagcagtacaaccagaccaaggacaagaccgactacctctggtacaccaccagcttccggctggagacggacgacctgccgtaccggaaggaggtcaagccggtgctggaggtgagcagccatggacacgccatcgtggcgtttgtcaatgacgctttcgtagggtgcgggcacgggacgaagatcaacaaggcgttcacgatggagaaggcgatggatctcaaagtgggcgtcaaccacgtcgccatcctctcctccacgctgggtctcatgaacagtgggtcatacctggagcaccggatggccagggtgtacacggtgacgatccgggggctgaacacggggacgctggacctgacgacgaacgggtgggggcacgtggtggggctcgacggcgagcggcggcgggtgcactcggagcaagggatgggcgcggtggcgtggaagcccgggaaggacaaccagccgctgacgtggtaccggcggcggttcgacccgccgtcggggaccgacccggtggtgatcgacctcacccccatggggaagggcttcctcttcgtcaacggcgagggcctcggccgctactgggtctcctaccaccacgccctcggcaagccgtcgcagtacctctaccacgtcccgaggtcgctgctccgccccaagggcaacacgctcatgttcttcgaggaggaagggggcaagcccgacgccatcatgatcctgacggtgaagcgggacaacatctgcaccttcatgacggagaagaacccggcgcacgtccggtggtcgtgggagagcaaggacagccaacccaaggcggtggccggcgccggcgccggcgccggcggcctcaagccgacggcggtgctgtcgtgcccgaccaagaagaccatccagtccgtggtgttcgccagctacggcaacccgctcggcatctgcggcaactacaccgtcggcagctgccacgcgccgcgcaccaaggaggtggtcgagaaggcctgcatcggccggaagacctgctccctcgtcgtctccagcgaggtctacggcggcgacgtccactgccccggcaccaccggcacgctcgccgtccaggccaagtgctccaagaggcctcctcgttccgccgccaccgcgcaataagctagccagccgccacatctctcttcttgtctctcatcagattctcagatagttaaagctttgacctgctgctgctgccgccgctgctattgtactttgattggttccatccatcatcgatctcactcacttcactggggaattatttaggcaaacaatcaattcatgctcagctccttgtatgcaccatcgtccatggttttatatgtaggtaactgtagattgattaattgttgatgcaaataaatactagtccattccatttggtg

SEQ ID NO: 18682 - DNA, 1352 bp, Oryza sativa
  ref <308>: DATABASE ACCESSION NUMBER: AK069067
  ref <309>: DATABASE ENTRY DATE: 2001-12-06
gagatcggagtctttcgactcgccgagtacgcgacccgcgagccaaaccctaccttcctccgcgcgacctcgatccccccacccccacccctcggcggcgatgagctcctccaacaacggcggtggcggcgacaagaagccggcgtccggcggccgctggggccccaccatccgcaccctcgcggacatcagccgctgcccgtccggcttccctgggggcggcggcggcggcggcagcgactccgacgagccccaggagtactacaccggcggcgagaagagtgggatgcttgttcaggacccaacaagaagaaacactgtggactcaatcttcgatcaagctagacagatgggtgctctccaagagtcaaccgctccatttgaggatcaatctctcagttcaagaagctttacagggactggtcgacttctttcaggagagacagcaccagctgcacctccaccgcctgggaatgtacttcacaatataccattctggaacaatggattcactgtagatgatggtccgctgagggactatgatgatcctgcaaatgctgatttcattgagagcatcaagaagtcccagtgcccccaggagttggagccagctgatagaagaacacctgttcatgtgaatgttatcaacgactaggaagactatcaggctcctctaaggcctccatcacccttccagggtgttggaagaacccttggtggtggatcttctgcagaagagagccaggcaccagctcctgccactcaagaaccccgcaggtccgttggaatagttgtggacgactcgctcccatttacatccatacagctaaggctggccgatggcactcgcatggttgcccgtatcaacatgcaccacacggtgggcgacataaggtctttcatcgacgcctctcggcctggggctacaaggccctatcagctgcagactggtttcccgccgaagcagctggctgatccagcacagaccgtcgagcaagctggtctggcgaactctgtcatcattcagaagatgtagacctaggagcacgtctcatatgctatctttgaaacaagaacccggtgtccttaaattgtcgattatcatgccagatactgtactggaatacattctgcatcgaaccagactgctggtttcatcgacagacagacgataacaatagccatgtcggtttttaagtggcatcagtgaagttcataatcctattaatagtaattacctgaattgcaacaaactgtcgtgcctcaatttgatcctgactaattgttgcttgaaaagctgttaactgttcatcgagatatatcatcaaatcattcgtgttcatatcaacttc

SEQ ID NO: 18683 - DNA, 3615 bp, Oryza sativa
  ref <308>: DATABASE ACCESSION NUMBER: AK069068
  ref <309>: DATABASE ENTRY DATE: 2001-12-06
cggggaagcgcgaccatcccctgaatcccccaacacccccaaaccctcgcgagccccaaaccctaggatccattccattcccctctctctctctctccccgcggccggccgcgatgatgcagatgctggggctacgcggctccgcgtccaaggaccgggaccggggccgccgcggcggggacgaggcgtcgccgggccacggctcgccgtggaccccgtcgtcgtcggcgtcctccccgcggtcgccgttcgcggggggtgggggtgggcggccgctgcggctggtgtactgcgacgagcgggggaggttccggatggacccggaggcggtggccgcgctgcagctcgtcaagggccccgtcggggtcgtctccgtctgcggccgcgccaggcagggcaagagcttcatccttaaccagcttctaggaagaagcagcggatttcaagtagcaagcacccatcggccctgcaccaagggcctttggatgtggagtgccccaataaaaagaactgcacttgatggaactgaatatagtcttttgcttcttgatactgagggcattgatgcatacgatcagacgggcacttacagcattcagatattctcactggcagtcctactttcaagtatgtttatatataatcagatgggtggtatcgatgaggcagctcttgatcgcctttcacttgttactgaaatgaccaagcatatccgtgtgcgggcaaatggtgggaagtctactgcatcagagctcgggcaattctcacctatcttcatctggctactgagggatttttacctagatttagttgagaacgacaggaagataactccacgagattatcttgaaatcgctctgaggcctcttgaaggcagaggaaaagatatatcttcaaagaatgagatccgtgagtccatccgtgccctctttcctgatagagaatgtttcacactagtgcgcccattgaacagtgagaatgaacttcaacgccttgatcaaattcctatagagaaattgcggcctgaatttcaagcaggactcgatgaattaactaggttcattttagagaggacaaggccaaagcaagttgctggtacagtcatgactggacctgtacttgctggtgtaacacagtcttttttggatgcaataaacaacggagctgtacctactatatcatcttcttggcagagtgttgaagaagcagaatgccgtagagcatacgattctgctgcagaggtctatctttcagcttttgatcgcactaaacaagctgaagaagatgctttaagggatgcacatgaagctgctttaaggaaggcacttgaagcatatggtaccgttgctgttggaactggcacttcccgtatgcattatgagaaagttcttagcaacttctgcagaaaaacatttcaggaatacaaaaggaatgcctttttagaagccgataagcagtgctcaaacatgatacaaattatggagaggaaactccgagcagcgtgttctgctcctggagtcaaagtttctaatgtgattcaggtcctggaaagtttgctcactgaatatgaaacttcttgttctggcccaagcaaatggagaatgcttgcagcctttttaagacagtgtttggaaggacccatattggatctctgccttaagttagtaaatgaagctgaatcagagaggacttccttcgcattgaaatatcgttcaaatgaagatcagcttgagcttctaaaaaggcaacttgaagcaaatgaggcccataaatcggaatatctaaaacgatatgaagctgctataagtgaaaaacaacgagtttctgaagatcacagtgctcatcttacaaacctgaggaccaagtgtagcacactagatgagcgctgcttgagcttgtctaaagaacttgatcttgtacgccatgaatgcactgattggagagtgaagtatgagcaatatgttactcagcaaaaggctgagcaagatggattcatttctcaactagcaactcttgagtccagatatagctctgcagagggaaagttgggagcagcccgtgaacaggcagcggctgctcaggatgaggccacagagtggagggataaatatgaaacagctgctgcacaagctaaagctgcattggagagattagcatctgtgcaagagcaaattaacaaaattgcccatgaaagagagagtggtataagggctgagtttgcttcacatctggaggaaaaggaagaagaaatgaagagattagttgcaaagatcagacatgcagagagtgaagaaagtgtgttggctgagcgcttgcaggtagcggaatcaaaggcacaaagccataacaaggaaactgcagccttgaaggatgaaataagagaactaacaggaaaattagaatttctaagagacagggcggtatcatttgaaaagcaagcaagaatgcttgaacaggaaaggaaccatcttcaagagaagttcttatctgaatgcaagaaatatgatgaagcagaagaaagatacaaagctgcagaaagggaagcaaaaagagctaccgagttgtctgatgtagctcgaaccgaggccgttacagcccaaaaagagaaggacgaggcacagcgcttgtcaatggaaaaattagcagtgattgaaagaatccaaagacaagttgacagactggagcaggagaaagtaaatctactggatgaagtgcagaagatgcataaatcggaaacagatgccttgtccaaggttgccttgcttgagagtagggttgccgagagggagaaagaaatcgaggaattaatgatacagagcaatgaacagaggtccagtaccgtgcacgtccttgagtctcttttgtcaacagagcgtgcagctagagctgaagcgaacaagcgtgcagaagccttgtctttacagctacagtctacccaaagcaaacttgatgtactccaccaggagctgacatcagttcgccttgttgagactgcactggacagcaagctccgtaccaccactcatggcaagaggttgagagaaaatgaagtaggcatggagtcggtccaagatatggatattgatcgtccggagaggagcagaaagagatctaaaagcaatactagccctctaaagcatttccaatctgaagatggcggttctgttcatatgggtgaagacagtgtcacagtcagcacagacactaaagatggcaatccagatgggtataaaaagctcacgattgcaaagctgaaagaggagcttaccaagcatggatttggagcgcagttgctagagttaaagaatcctaacaagaaggatatacttgcgctctataagaagcttgtgttgggcaagtaaattacccccggtatctgcagaaatgcttgaccttatgcttgctgagctgtgtgaagtatgtggtggaagcgtttcagtttgcaatgtgcatttactgtttattagtacatagagtagcatgctaccaagtaggttatatttaacaagagagatgcctgattgtttagggcatttggtggtcctgctgattcgattgtatcttggtgtaaattgatcgatggttggtttgcgattaggattgcgtttgctagtt

SEQ ID NO: 18684 - DNA, 945 bp, Oryza sativa
  ref <308>: DATABASE ACCESSION NUMBER: AK069069
  ref <309>: DATABASE ENTRY DATE: 2001-12-06
ggggtcccactcgtcatccctaacctccagccatcctctctctctccggccgaattccaagcgacggcaacctccgattcgcctcctccacttgccgtttcatcaaattaattgaggggaattaattcccacctcatcctctccaatttccccataatttcccactcaatcccgcattattcgtggtggattttgatgatgttctttaatggtgagctccaccatggccggcgtcgatctccctacccggcgtctctctccctcccctccggcctataaaagggacccccgactccctcctctctcccctcacaccgccgccctctccctcctctctccgcggcccacgtgccgctctcttcttgtgccgccgccgtcgcaactccggccgcccctcgccggtggtcgggacctcatcggagcccggcgtcgccaccatccgcttcgccgcttcctcctcttccccgtccacccctccgtggagcatgacgaccgcgggaacgacgacgacaccgacgacccgaagttcctcgccgtttcttcctcactgccgacaacaccgtcgatctctcgccgccgtgtctgctcgatcctgccgttccggaagatcggctcttcatcgccgtcgacgtcgaagactttgtgagtgatcaagaggatggacctgaggaagatgaaggcttggatctctagttcactccgccgtcgagtgcctgtggctgctgctgttccgtagtcttccgctgttttatttgtttatctttgagtgcgagggcttgagtcgtccatgtaataaagtacttcctttacacttccgcaagtgtggctagttcactccgccgtcgagtgcctgtggctgctgctgttccgtagtcttccgctgttttatttgtttatctttgagtgcgagggcttgagtcgtccatgtaataaagtacttccttt

SEQ ID NO: 18685 - DNA, 1236 bp, Oryza sativa
  ref <308>: DATABASE ACCESSION NUMBER: AK069070
  ref <309>: DATABASE ENTRY DATE: 2001-12-06
gatcttgctgcccccgcgcgcacgccacctcgccccgtccccaccccaccatgcctcactcctcctacctcgccctcatgggtctcggcatggagaaggtgtccgtgcccagcatcctcgccagcaccggcgtcgtcaagtcgaacagcttctccatgtgcttcagcaaagacggcctcggccggatcaacttcggcgacaccggcagcgccgaccagtccgagacgccgttcatcgtcaaatccacacactcctactacaacatcagcatcacgtcgatgagcgtcggggacaagaacttgccgttggggttctacgccattgctgactccggcacgtccttcacctacctcaacgacccggcctacacggcctacaccaccaatttcaacgcgcagatcagcgagaggagggccaacttcagcggcagtactcgttctggtccatttcctttcgagtactgctactcgttgagtcctgatcaaacaacggtggaactgcctgttgtgagcctgacgaccaatggaggagccgtgttcccggtgaccagccctgtttaccccatcgcggctcagatgacaaacggagagattcgtatcattggttactgcctggctgtcatcaagagcgatctccccatcgacatcattggccagaacttcatgaccgggctcaaggtcgtcttcaaccgtgagaaatccgtcctgggctggcaaaagttcgactgttacaaggacgagaagatgacagacgacgggtcgagcgtcgggagcccgagcccatcgccggggccgaccactcacgtcttcccgcagccgcaggagagcgactcgccggcgggcagaacgcccatccccggcgcggcgccggtgccgcggtcgagcagcgcggcagctggcggccgtgcaggcttccggctcctgtcgtccatggcgctcttgctgctggctgctgctgctgcagctgttttctgatgattttttttttacttggggagtttataggtgatttcattcgtggtggctgctctgctgtgtacataacacatgcatgcattcgagatgatttttattcagaaagcgtagatagatcgatcgatcattgtaggatttagtaatttgttcttgtgatgatgattgatgtgtatatggttacgaggattttcgttgttggattcggtgataagcgagctacgttcatttattatacgaataaagatggataaaattatactgc

SEQ ID NO: 18686 - DNA, 2386 bp, Oryza sativa
  ref <308>: DATABASE ACCESSION NUMBER: AK069071
  ref <309>: DATABASE ENTRY DATE: 2001-12-06
gaataatggaggcggcggctagaggcaacaagaagctgcaggagagggtgcccatccggcgcaccgcgtggaggctcgccgacctcgccatcctcttcctcctcctcgccctcctcctccaccgcgtcctccacgacagcggcgcgccatggcggcgcgccgcgctcgcctgcgaggcgtggttcaccttcatgtggctgctcaacgtgaacgccaagtggagccccgtccgtttcgacacgttcccggagaacctcgccgaaaggatcgacgagctcccggcggtggacatgttcgtgacgacggcggacccggtgctggagccgccgctggtgaccgtgaacacggtgctgtcgctgctcgccctcgactacccggccgccggcgagaagctggcgtgctacgtctccgacgacgggtgctcgccgctgacgtgctacgcgctgcgggaggccgcccggttcgccaggacgtgggtgcccttctgccggcggcacggcgtcgccgtcagggcgcccttccggtacttctcctccacgccggagttcggcccggcggatggcaagttcttggaggactggacattcatgaagagcgagtatgagaagttggtccaccggatcgaggacgccgatgagccttcccttctgcggcacggcggtggtgagttcgcagagtttctggatgttgagagggggaaccaccctactatcataaaggttctgtgggataacaacaggagcaggacaggagatggcttccctcgtctgatatacgtctcaagggagaagagccccaacctacaccatcactacaaggctggcgccatgaatgccctgacaagggtgtcagcactgatgaccaacgccccattcatgctaaacctagactgcgacatgtttgtaaacaacccccgggtcgtcctccatgccatgtgccttctgttaggttttgacgatgagatcagctgcgcgtttgttcagacgccgcagaaattctacggtgccttgaaggatgatcctttcgggaaccagctggaagttagtttgatgaaagttggacgtgggattgcagggcttcagggcatattttattgtggaacaggctgctttcaccgcagaaaagtcatttacggcatgaggacagggcgagaaggcaccacaggttattcatctaacaaggagctccatagtaaattcggaagttcaaataattttaaggaatcagccagggatgtcatttatgggaacttgtcaacagagccaatagtagatatatcaagttgcgttgatgttgccaaagaagtagctgcctgcaactacgagattggcacatgttggggtcaggaggttggttgggtctatggatcactgacagaagacgtgttgaccggacaacggatccatgcagcgggttggagatccacgctgatggaaatcgaaccaccagcattcatgggttgtgcaccaaatggagggcccgcctgcctaacccagttgaagagatgggcatcaggttttttagaaatactcatcagtcggaataacccaatcctcacaaccacatttaagagtctccaattccgacaatgccttgcatacctgcacagctatgtgtggcctgtgagggcacctttcgaattgtgctatgcattgttggggccttattgcttactatcaaaccaatccttcttgccaaagacatcagaagacggtttctacatcgcattagctctattcattgcctataacacatacatgttcatggagttcatagagtgtgggcagtctgcacgtgcatgttggaacaaccacaggatgcaacggatcacctcagcttctgcttggctactggcatttcttaccgtcatcctcaagaccttaggcttctccgagactgtgttcgaggtcacccgcaaagacaagagcacatcagatggtgattccaacaccgatgagcctgagccagggaggttcaccttcgacgaatcgacggtgttcattcccgtgacagcacttgcaatgttaagtgtcattgcaatcgctgtaggagcatggagggtggttttggtgacaacggaaggcttgcccggtggccctggtatcagtgaattcatctcctgtgggtggctggtgctgtgcttcatgccattgctgagaggtctagtgggaagtggtcgatatggcattccttggagtatcaagatgaaggcctgcttgcttgttgctatattcttgctcttctgcaaaagaaattaattgcagctggtgtgcagcaacaattagtccatactattatttgagcatgcaaacactaggtttcatcttcatattattatgtccgcaaacgttgactaagctctagaaaagggaacaattcaatcact

SEQ ID NO: 18687 - DNA, 1906 bp, Oryza sativa
  ref <308>: DATABASE ACCESSION NUMBER: AK069072
  ref <309>: DATABASE ENTRY DATE: 2001-12-06
ggcctctcctcctctctctccgctctctctcctgccaagcgacggccgccgccgctgcttgccgtccccctcatcctcttcttcccgcagttggcgacctcccccgcgcactccctactgcgagccgctgctgtcgccgtgccgtcgtcctgccatcgccatcctttcgctcccgccgccgcatccgccaacgaggaggccgggactgtcggatccggtgactccggcctcctcgccggcagatccggccgccctgaagcgggggaagcctggagccgccctctactcttctccctctacgcccggcacagcccctccctctccctctccatcttcatttccggatcgatggatgcctgtgattaggtggcctagggctcatggttgacggcgttggttgatccggcggcgcagcacacgatctggtggtggtgcgacgcaaagggatcgacacagttcagccaagcaagtagcagattgttggtaaggtacagggacgcccagttgctccgaaagattgtcttcgcccgcagccccctgttgctgtcttgagctccttgcttactgcctctgcatcgaagaccagccaatctggaagattgaaaaaatggattgcttgaagaacagaagacattgtaggagttctctttgtatggctacaacaagatggttgttgtagcactgagcatcagaagtcattgttgccaaactcataatctgaatggccatgatctgccaatggaactcaacagctcatcagtgctaattaccagaggagataatgaagtgaaggctttggttgctcctgcatcactgcttgcccataatgctgaattggaggggaagtggtggttcagaagatcgaggacagtgagtgtaaagtcagttacaatgcgatgaacattaagtatgagaactcgatcaaggccattgttattgagcagccgaagcccaaggctcctgtttatcagctaacagagggaaccaacacactatttcaggataagccacatgacatgctgccaaaaacctggtcatgtcaaggacaaatcctgacacccgatccagagccggtggggaagttggatgtgacagatcaaggccgccggatctgttgagctcagcagcggcagcagcttggcgatgatggcagcaatgtctcagacatgccctcctccccactggtgacaagcatgaggccacggccgaagcttatctttcgcacctccatcagaccttgtaattctagggaagaagctcggccaactgcgaccttctaacgcagggaaggatggaaaggagtggctcctgcttgaagagctgcagggacagatcgccaggatacagggcagcctcgaggaatgtgaaccatggcaatctgcatagcccttcatttggaagctatgtccccccaactattgagtactatttttttagctccacctcccttttcattcaagcagggcagctttgctcttatgcaagtgacatgttaacactgcagttgttatactataggctgtgtgatagtgtgctggtcaagtcggacgcatactaaatgtttgtgatcttttgatgattaatttaccttgttttataggtgtagaaattggtggaagcatagttggtttgtttctgctctcatttcaggtctacttgtcccgtactgtttgctgccggcgtggacgctgctgagtccccacacatcagccacgactagaatcctggaatagccgctaccatatatatggcgtttgcttcctagaatccttttgctttacataaaactgcaatccagactatgaacaaacacttatggttcaaatcctataacccttaattattattactctaaatgtctactgctttgatatgatccttatcttcagcttaaacatatgccatg

SEQ ID NO: 18688 - DNA, 3763 bp, Oryza sativa
  ref <308>: DATABASE ACCESSION NUMBER: AK069073
  ref <309>: DATABASE ENTRY DATE: 2001-12-06
gaagggaagggaaatactactcctccaattgattgattccctttctcctccggagttgtcttctcctcagccgccgcctcgccctcctcttcctcttcctctcgactcgcagcttcgtcggcggcgatggcggcggcggcggcgctgtggcagccgcaggaggagggcctccgcgagatctgcaccctcctcgacgcgcacatctcccccaactccgaccaggctcgcatctggcagcagctccagcactacagccagttccctgacttcaacaactacttggttttcctcctcgcccgcggagagggaaaatcttttgaagccaggcaagctgctggacttctgctgaaaaacaacctccgagctactttcagctccatgcctcctgcttcccagcagtacgtaaagtctgagttgttgccatgtataggggcaaccaataaggcaatcagatccacagtcggaacagtcatcagtgtactctttcaaattgttcgagttgctggatggatcgagttgtttcaagctctacatcaatgcttggacagtaatgatctggatcatatggaaggtgctatggatgctatatacaagatctgtgaggatgttcctgaggagcttgatgttgatgttcctggtttgcctgaacggccaatcaatgtattcatgccaagattactgcagtttttccaatcaacacatgcaatccttagaaagctagctctgggctgtattaatcagtacatcgtggtcatgccagcagctttgtacatgtcgatggatcagtatcttcagggtttattcaaccttgcaaaggatccgtcagcagatgttcggaaactggtttgctcagcctgggttcagcttattgaagtaaggccatcaattttggagcctcatttgaaaaatgttaccgaattgatgctgcaagctaataaagattcagatgatgaagttgctctcgaggcttgtgaattctggtcggcatactgtgatgtcagcatgcctcctgaggggttgagagagttcttgccacgcttaatcccaacactcttatcaaacatgagctattctgatgatgacgaatcacttgctgatgctgaggaggacgaatcgtttccagacagggatcaggacttgaagccccggttccatgcctctcgactacatggatctgaaaccggagaagacgatgatgatgatgatgctgtaaatgtttggaatttgaggaaatgtagtgctgctggcctggatgtcctttctaatgttttcggtgatgacattcttcctactttaatgcctttgatacagcaaaatctggctcgaactgacgatgatgcgtggaaggagagggaagctgctgttttgtctattggtgctatagcggagggatgcattactgggctatatccccatcttccgcagattgttgcttttcttattccacttcttgacgataaatttcctcttatacggagtattacttgttggaccctctcccgatatagtaaattcattgtacagagcctagagcatcccaatggtcgtgaacaatttgataaaatcctcttaggtttattaaggagggttttggatactaacaaaagagtgcaggaggcggcgtgttcggcatttgcaacgcttgaagaggaggctgctgaagagttagtaccacacttgggaattattttgcagcaccttatgtgtgcctatggaaaataccagagacgaaaccttcgaatactctatgatgctctcggcactcttgctgatgctgttggagctgagcttaaccaggcaaaatatctagatatatttatgccaccactaatcacaaaatggcagcaacttgccaactctgataaagatttattcccactgctcgaatgctttacatctatcgctcaggccctgggaccaggattttcacagtttgctgagccagtatttcagagatgcatcaatcttatccaatctcagcacctggcaaaggttgatcctgctgcagctggtgcattatatgataaggaattcattgtgtgtgcattggatctgttgtcaggacttgcagaaggacttggcgctggtattgaaagcctggtttcacaaagcagtttgagagatattcttttgcaatgttgtatggatgaagcagcggatgttcgacagagtgctctcgccctcctgggggacctttctagggtttgccctatacatctgcatccccgccttcaagaattccttaatgttgctgcgaagcaactgaacccgcaatgtgtgaaggaggctgtgtcagtggctaacaacgcctgttgggcaattggagaattagcaatcaaggttttgtaccacttttgcaaccctagttttttttatttcaaaagatattgcaaccctagattgatacacatagatgtttcctttcttttctgagcaactagtaccatacctgtttcccaggatataccttaaacctttgttactgcttctactgccaatcacatttgccacatggcaactttgacactaaacttggccagcaacatgcactcctagtttatttctgtgcctatgacgtgctagtactcattggtattttgtaaaattgttgtgggtatgtctaactgattattcctttccagattggcaaagaaatttcacctgtggttatcactgttgtttcttgcttggtgcctattttaaaatctcctgagggcttgaataagtcacttctcgaaaatagcgcaatcactcttgggaggctttgctgggtctgtccagacattgtggccccccacatggaccatttcatgcaagcctggtgcaatgccttgtgcatgatacgagatgattttgagaaagaggatgcattccatggtctatgtgcaatggtacatccacgcttttgcttactgttacaatttacaaagctgtctgacttacacaaaatactgtcattctatactaggtagcagcaaacccaactggagctgtgggttcactaacttttatctgccaggcctgtgcaagttggaacgagataaagagtgaaggtttacacaatgaagtgtgccagattttgaatggatacaagcagatgctcggaagtgggggttgggaacagtgcatgtccaccctagagccagcggtcgttcagagattaggcagatacggagtatgaggataccgacggaatttgttttggttgtctattctttactatacgttgggacggaagcaaagagaagaaagggaactcatcgtgcagcgccagtgtgtgatttttatgatgtgatggattctggccggttagttttgtatgctccactgctagtgatatattggttcgcacaggactgctgtctgagagcatcatgtgcgttgtcctcagcacaagtgagtggtaagaaagaattaccacgacagacagaatgaaggctagtaccttcccttttggtttattgagtcgattgggtcgaagagctgtgcttgattgtaggttctattgtactggtcagttcagtggactcggttctgtttttttgtcactccactggcactggcactggcaccccagcagcaacatagagttgttggaaaggttttgtagcgtgtattttatgggtccaagagtttaggtgtagggtcttctctcttttattttattttttttccttttgtgctcgacagggttgtattgattcattccccaataaaaaaaaagtattgaacaaacattgagactgaaacaaaaggaagattg

SEQ ID NO: 18689 - DNA, 2704 bp, Oryza sativa
  ref <308>: DATABASE ACCESSION NUMBER: AK069074
  ref <309>: DATABASE ENTRY DATE: 2001-12-06
gaccgggctggtcgatctgcctcgttggcggccggccgccggccgatcgtgatctgacaggacagccatttgcacgcgtctctccctcgttttactaccatccacaggaggcccgaagtcacccgcgtctcggccctctccgtcctcgttgcttccgacgccggaggccgagagacaggcgacgcgcacgtctgtctgcgccgttgccgcagatcagcctgacgagataccagctctaccaacaactcccgttacttctctgtatgatgcctgttctgaactgagtcttcatagatagagagaaatgggttctctcacagatatcggcgtcgccgcaggaataaacatactgtccgcattgggttttcttctcgcatttgcggttctcaggatacagcctatcaacgacagggtctactttcccaaatggtacctcaaagggacaagaagcagcccaagaagcatgggaacggttttctcaaagtttgtcaatgctgatctctcgacgtatatccgcttcctgaattggatgcctgcagcgctgcaaatgcctgagcccgagttgattgagcacgcaggcctcgactccgcggtatatgtccgcatatatcttcttgggttaaaaatatttgtgccgattgctgtgctggcattcattgtccttgttcctatcaactgggctagtggaactttggagaaggaaaagagtctaagttatgatcaaattgacaagctttcaatatctaaccttggaaaaggatcgaaaagattttgggcacacatagtgatggcctatgtatttacgttttggacgtttttcgtgttgtatcgtgaatacaaggttgtaacaactatgagattgcgctttcttgctattcagaatcgtcgagctgatcagtttacggtcctggtgagaaatgtaccacctgacccagatgaaacagttagtgagcatgttgagcacttctttgctgtcaatcatcgtgatcattatctcagtcaccagaccgtatacaatgcaaacacccttgccggtttggttgagcagaagaaaggcttgcaaaactggctggtctactacgaaaaccagcatgctaaaaaccctgcaaaaaaaccaactatgaagacaggattgtggggcctttgggggaaaagagtggatgctatagaacactacaccactgccattgaggagttatgcaaacaggaagatgaggagagacacaaggtgatcactgatcctaatgctattatgccagctgcatttgtatctttcaaaagccggtggggagctgctgtttgcgctcaaacgcaacagacgagcaatccaacgttgtggcttaccgagtgggccccagaacctcgggatgttttctggcctaatctcgcgatccctttcgtcgagctctcagtccggaggcttatcatggccgttgcactcttctttctgacctttttcttcatgattccaattgcaattgtccaatcaatggcaaacttggatgacattgaacggatgcttcctttcctgaaacctataatagaaagaaattcactgaagtcaattgtgcaaggtttcttgccaggaatcgcattgaaaatcttccttatacttctcccaacatttcttgtgatgatgagcaaaattgaaggtcatacatcactatctggattggacaggaggactgcgtcgaagtattatttgttcctatttgtcaatgtgttcttggggagtgtaataactggaacagcgttccaacaactcaacaattttatccatcagtcagctaataaaattccagagattgtcggagaatccatccccatgaaagcaacatttttcatcacatatgtaatggttgatggctgggctggtgttgccgctgaggttcttaggttgaagccattggtcatgttccatataaagaatactttcttggtcagaaccgagcgagatcgagagcaggccatggaccctgggagcctggattttggcaccacagaaccaaggatacaactgtactttctgcttgggcttgtatatgctgtcgtgacaccaattcttctacctttcatcatagtgttctttagccttgcctatctagtattcagacaccagatcattaatgtctacaatcagcaatatgagagtggcgcgcaattctggccagatgtccaaagacgactggttatagcattgatagtatcacaaatcctcctgttgggactgctgagcacgcaggaagcagagaaatccactgttgctcttcttcctcttcctgtactgtccatatggttccactatgtttgcaagggccgctttgagccagcgtttataaagttccccctgcaggatgcaatggtaaaggatacactggaacgggcaaatgacccaaccctgaatttgagagagtacctgaaggatgcatatgtgcacccagtgttccaaaaaaatgacatatatgagtttgctggcatcgacgaggaagagaagaaccccatggttgcaacgaagcgccaatcgcgaatgaacacaccagtagatagcaagttcaattccagttctggcactaatgaaggagagttcagtcggatggctcctacctgaagcttgatttttcatcagtcaatgtaaacattttgcagtttggtaatattgtaaatgttcaggcaaaaaggaaatacaaggtttaaacaatgttgg

SEQ ID NO: 18690 - DNA, 1789 bp, Oryza sativa
  ref <308>: DATABASE ACCESSION NUMBER: AK069075
  ref <309>: DATABASE ENTRY DATE: 2001-12-06
gaatccgacccgcgccgccgccacctcttcctccgctgcccaagagcgatggccgcctcccccgccgccggggccgcggccgccaccgtctcgtcgttcgtctcgccgtcgtccttctcctccgtcaaggcatcgaagcccgaccgcctccgtccggcgaggagggcggcggccgtcaacgtccgatgcgtcagcagccctccggccaccgaaacttctttcaagacgaaagtaccacgaaatgccaatatggccaagctgcaagctggctatctgtttcctgagattgccaggagaagggcagctcacctgctgaagtttcctgatgcgaagattataagccttgggatcggtgacactacagagcccattccagacgtcataactaatgccatggcaaagagagcacatgctttatccacagttgatggttatagtggttatggagctgaacagggtgaaaagaaactaagggcagctattgctgcaacctactatgcggatcttggtattgaagaaacagatatattcgtctctgatggtgcaaaatgtgacatttctcgtctgcaggtcctttttggatctaatgtgaagattgcagttcaagatccatcatatcctgcctatgttgattcaagtgttatcatggggcaaactggtttatatcaggaggatgttcagaagtatggaaatattgagtacatgaaatgcagtcctgaaaatgggtttttccctgatctgtcaagtgttccacgaacagatataatcttcttttgttcacccaacaatcctactggtgctgctgcatctcgggaccaattaaccaaattagtcaaatttgcaaaggacaatggatccattatagtttatgattctgcttatgccatgtacatatcagatgacagcccaaaatctatctttgaaattcctggagcaaaggaggttgccattgaaacagcatctttctccaaatatgctggattcactggtgtgcgtttgggttggactgtggttcctaaggagctccttttctcagatgggcatcctgttgctaaagatttcaaccgcatagtctgcacttgcttcaatggtgcatcaaacatttctcaagccggtggtttaggttgtctatctccagagggtctaaaggccatgagtgacgttgtcggcttctacaaggaaaatactaaaattattgttgacacatttacatcacttggattcaacgtctacggtgccaagaatgctccatatgtgtgggtgcacttccctggccgtaattcttgggatgtcttcgccgaaattcttgagaaggcacatgtggttactactcctggtagcggatttgggcccggtggtgaaggcttcgtaagggtcagtgcatttgggcacagagagaacattattgaagctgcgagaagactgaagcagctgtacaaatgagcagtgatccggcctttatattctcaacctcttggggagccatatcaaataaaaccaagcagagttcgaagacaaaatttactctgtcgggctatcagtagatgttagaattgaaacctaatactttataggcagttgttctgttccgctcggtatttatccattcagagccattttacattctgaacttctcttgttgtttagccctgatgcacctgagtgaatcgcaagcttatttatctccttttgctaagttcgtttctactactctgcttaatttgctgctgccgtataaggctcagtgatatctccctggatgcattgaaacgttaggcacacttgagtc

SEQ ID NO: 18691 - DNA, 2399 bp, Oryza sativa
  ref <308>: DATABASE ACCESSION NUMBER: AK069076
  ref <309>: DATABASE ENTRY DATE: 2001-12-06
gcaggactttgctcaccaaatttcgtcaaccgaaggagagtcctcttcttcgcccaccaaaccccattccaatcacaccgccgccgccgccactttgatcggcaggatggccggcgatccggccgccggcggcgacggcggccgtggctcctcaggcggcaagggctcgtccccctcctcctcgcggcaccagcagttccgcaacctcgccaagacccgcgtcgacgacctccaggagatgttctccggcctccagtccgcccgcaaggagagccgctccgccgacgccgccctcctcgaggagcaggtccaccacatgctccgggagtggcgcgccgagctcaacgtcccctcccccgcctcctccctccagaactctcagtcgcagggtaacaaccgggaggcgtcggatccgccatcggagacgctgcggttgctgcagctggccggggccgaggaggaggatgacgccaccagcaagctcgtgatgccgcgatcgcctatgccgatgcaatcttctcatgagggccataatctcagccccgtgctacagggggggactatggcggggggagccgctgagctgatggttccccgatcgccgctgcagcaaatgccatcttctcatcagagccatgggcatgggcaggatggcggccagaatctgcagggtgaggctgtcatgggaagtactgctgctactgctgccccgcatctgggtcagggaatgcagggcgattgcggaggaatggctggtgttaccaatgcaatgttcaatgatcagctgtactatatagatcatgaactcaacattgatgattttcttcaagatgatgattataagataaatcttcctggctcaaacccagacggccccaataccatgcaggggattggtcagctggaacatcaacagtacaacctgccattagatctgccacctaactcatttgttgatgcaaataactctgcgcagagttctggagatgtttttttccacatgtcagacttgctcacaacaatgtgcccatcaccttctcaatatttggggccaaaatgtgcactctgggactgcggtcgacctgttcgaggatcagatgagtgtcaacattactgcaatccttaccatgccggtttagctttgaatgatgatggccttctagggactagacctgtgatgtgtccaagggggattgatttgaaagatggccctctgtttgctgctcttagtgcaaaagtccaaggaaaaaatgttggtattcctgtgtgtgaaggggctgcaactacaaaatctccttggaatgcacctgagcttttcgatctatctcttcatgaaggtgaatctcttagagaatggctattctttgacacaccaagacgggcatttgatagcggcaatcggaagcaaaggtcattgccagattacaatggccgtggatggcatgaatcaaggaagcaagtgatgaaagattttggaggtctgaagaggtcctattacatggatccacaaccatccagcaactatgagtggcatctttttgaatatgaaaccaatgattctgatgctctagcgctgtatcggcttgagtacaagtcttctgatactaagaggggtgttaaatcaaaattggcaagcagtccactgagtgaaatacagcagcaaatggtcaggcttagtgcagacagtcctgtggaaagcaaacggactgctaggagcagggcaaaggctaatcaaaaggataacaattcaaacgcctatccagctctcaatacccctgttcaagtcagtgcttcaaatgctcatcaaacaatgtctgtcaacacccctgatcaggtcaatgtttcaaatgcatatcaaacaatgcctctcaacaccccaaatcaacccggtccttctaatgcttatcatgcagcatcacagatggaccagatgacgtttctggatggcagtgttgtttatggacctcatcttccatatggatactccaccgaaagaagcgatttctactggaaccctagtgacgggacatgaagatggcatattgggtttcatacattctactgcatctgtcagctgggaattttaacagcatcagctaaattatggggctcaacagtgtggcccaaaagttttctgattgtatgacctcttttaaagatggcatgtttgcaatacagtgctatactttgcattaacacttgactgtaaaaatatatcccagcacgccctagctcctgttgatggcaagttaaatggtcaaatggcttttaccaggaaccaatgctgctgtgctgggtgtatttttagcttagcctgaagccttatgaagttctgaacttctgaaggtttcgttttatcctttgtatataccctgattttctgaggcgttgtggcatcc

SEQ ID NO: 18692 - DNA, 2531 bp, Oryza sativa
  ref <308>: DATABASE ACCESSION NUMBER: AK069077
  ref <309>: DATABASE ENTRY DATE: 2001-12-06
gtcagtagctagctctcacggggcctcctcaccctcggcctcgctcctctccggcggagcctgggcacggccgccggccttctccccctccgccgccgctccacgcgcgcgcgcgcggcggcggtcgaaggccagggccccgaaggcacgtcgtgcacacggcctcctctcccctccccgatcccgccgctcgctcgcgcgcgcgccgccgggcctaaggttgtcaggatttcctttcctctctgaagatgagtcatagttcggatgaagattcggaaatcagtgattctgagatcgacgagtacgcagacaaattttatgcacgactggtggcaggggaattcaaagtaaaggatgggcagagttacagctgcccattttgcagtggcaagaagaagaaagatttcaacataaacaatcttattcagcatgcctcgggagtaggcgctgcgtctaatcggcaggctaaagataaggcaacccatcgtgcccttgccaagcacttgaagaatggcctcactaagtcgtcaggacaacagtcacagacagctgttgtggagccacaaccgcttccaaacagagatgagaagttcgtgtggccctggatgggtgttctagttaatgtgcctaccgaatggaaggatgggcgccaaattggacgaagtggaaatcatttgaaggagcaactgtcacgcttttgcccacttaagatcattccattatggaattttagaggtcattcagggaatgctattgttgagtttggaaaagattggcatggcttcagaaatgcgcttgcctttgaagattactttgggaaagaaggatatggtaggagggactggaaggagaaacagaatcaagggtcaaacctctttggatgggttgcaagagctgaagatcacacttctccagggctaataggcgaccatttaagaaaaaatggtgacctgaagactatcaatgatcttgagaatgaaggagcacgtaaaactgacaaacttgtagctaatttagcaaaccaaattgaggtaaagaacaggcatttgcaggaacttgaagttacatacaatgaaagaactacatcacttgagaagatgatggggcaaagggaacagcttctccagaaatataatgaagaaattcgcaagatgcagcagctagctcagagacattctcagaagataatcgatgagaatcaaaagctgcgttctgaactggagtccaagatgagtgaacttaatacgagatccaaggagcttgatgagattgctgcaaaaagtgattatgaccgaaggatcattgatcaagagaagcagaagaatgctatcaaatcaagccatcttaagttggcaacgttggaacaagagagagctgatgaaaatgtgctgaagcttgtaagagaacataagagagagaaagaagctgctgtaaagaaaattttgaagttagaacagcaggtggatgcaaaacaaaagcttgaattagatatacagcagttaaagggcaaattggaagtgatgaagcatatgccaggggatgaagattcagcattgaaaaataaaattgatgaattgagtgaggagctgcaagaaaagatggatgaactagatgctatggagtcacttaaccaaactttggttattaaagaaagaaaaagcaatactgaaatgcaagatgccaggaaggagcttgaaaatggcttacttgatctcttagatggtcaatcacatataggaataaagagaatgggcgagcttgatctggaagcattttcaaaagcatgcagaaagatgtcatcggaagaggatgcagagattactgctgccattctttgttcaaagtggcaagctgaaattaaaaatcctgattggcacccttttaggtttgtcttggttgatgggcaggagaaggaaattatcgaggatgatgccaaacttcaagaattaaaagaagagcatggcgaagacatatacagattggtgagggacgcgctgtgtgaaattaatgagtacaaccctagcggcagattcccagtaggagagctgtggaacttcaaggataaacggaaggccactctgaaggaaacggtccagttcgtcctgagacagtggcgagcgaacaggaggaagcgctaagcccacctgttcgatgccattgcgtgtagcgctgctgtttgcgttccacctgatctggacatcatgctacttaagcattagctcattcgagatctgtagtaactatgtagtggggttagaccatggctgtttcattccttgttggacacaaaataagttggtactattgcagtatctgcattggtggccacctatggtccacctgtacaagtagatctgttttcacctgttttaggtatgctatgtacagccatgaaccgaggtactttattcatctgcttggtatgcagatgcagcggaatatgtagtagtatgactgtatgaagtactgcttgtccgattgaagcctgtatgagcaaagtagagagactgtatgaagtgcttctctgattg

SEQ ID NO: 18693 - DNA, 2809 bp, Oryza sativa
  ref <308>: DATABASE ACCESSION NUMBER: AK069078
  ref <309>: DATABASE ENTRY DATE: 2001-12-06
tttagcccgctttgctgattctagactgcacagaacatcctcatcgccgcagcaagatgctcaatacaatcctaatgaacatattcttggagcaatgccatctctgttgcatagaacttcatcatacccacaacaagagcctcaatacagtcacacagaaccaattccggtacctaaatcatcattcattccgtaccctccatctggtgcagtatcccattcttcgccaggtcaaccacataacatgaacatgccatctcctcccacttcattccaaatgcctgtatctgcacaaaatgagttacaccatccccagtttcctcgtggtggtatgcctccagggccacttggtcggagcatggctcatttggattcagcaggtttatcaactaataatttgcaacagaatgctctaaacagtgggccagttcgtccaaatggtgccatgcttacaccaggtttggtgcagcacaatctgcagcgtccaaatggattggtcccacctcaaatgctgtcacgccatccacaacatggaatggccccaattcaacactctccgccacaattctcacagttccatgctcagatgcttggtcctcggcatcctccaccaaaaggttgtcagatgtacaatcctcagcgtccatcacaaatgatgagtggatttgatgcaaatttggcaatgcctgacttgagtgatccgagagcaagagcaatgctgcaccatggagtgcatggccagcattatctcccccaaggttttgagcttgctggtatgaggatggataatgggtggccgcggttcagatccaagtacatgtccacgcctgaaattgagaacattgcaaggatgcagcaagctgctactcagatcaatgatccgtacattgatgattactatcatcaagcctgtttagctaaaaagtcagcaggaggtcaactcaagcaccacttctgtccgaccttgattagagatccatcatcccgtgcacggagtaaagatgagccacatgcgtatctccaggttgatgctcttggaaggttaccattttcttccatccgcaggcctcgtccgctcctcgatgttgaacaaacctctgaatcaagtgatgacgttactgaaaaatctgcttcaaaaacacttgaccaagaaccaatgctggctgctagaatcacaattgaagatggcctctgcctactgcttgatgtagatgatattgatcgcttgctgcaatttagccagcagcaagatggtggcttgcaactgagaaacaggagacaggccctccttgagcagctggcagaatccctgcaactagttgatccacttacacctagtaacaatgcacctctctcaccaaatgatgatctggtgtttctccgaatagtctctcttccgaagggccgcaagctactttctcgttaccttgaacttgtgagttctggcagtgagcttgctagaattgcttgcatggcagtcttccggcatctaagatttatatttggaaatttgccatctgatagtagtgctgttgagacaacgacaaaacttgctactgctgtatcaacctgtgttgttcggttggagttgagtggactaagtgcttgccttgcagctattgtgtgttcttcgctgcaaccccctctgcgaccccttggacatgctgcaggtgatggggcttctttcatcataaagtctgtactggacacagcaacagagcttctcactgatcagcatgtggcctctacctacagcatgcaaaacagagctctatggcaagcatcatttgatgccttctttgggctgcttacagagtactgcatgagtaaattcgatagtgtgattcatgcattgcaaacacaacctgctgtggcagcagttataggcagggaaatgccagttgaattgttgcgtgctagccttccccacacaaatgagtatcagcggaagcagttgctcggttttgctcagcgcacggtgcctgttaacaaccatagttctcatgggtccagtaatggacccatgacatcagaatctatcccaagttcagaaagctggaaaatatgagtgaaagcatagtgtttttgcttctttgggtaatcagtatactagatacaatggctctttaaaatggagactcttccctcattttcccagtaaagaaaagtcaatagtaatatgaatccaggaaacaaagatcgagagggttggagcatcgataaacagtggtaatataaggcaccaagtttactattgttgcgacatgtctggtttattatgttttgtagggatgcaatctgttttgcatgtattatgcagatggatgtgtttttgttactgggaagtttcttcctgagttttgttgctcatgaaacctgcctggtatctatctctggctgtagaaggtgcttgttgaagacgctgtttgattgtgtacttgaagatgctgtttgattgttcttcaagacaagtgtcctggaaccatcaaggtggtatttcaatcaagactcaaagtgtcctggtgccatcaaggtggaatttcaatcaagccgccttctttttctcattttgttgtgttgaagggttgaaatgttactagttgatcatgccctcgtactgaaaaaatcctagctagcattggtatatggtactatgttttgttattattatttattaatttctctttcccgactttttctattctagcggaaggtataatttgggattttagctgagtagagatcgagaatgtagtagtagaaacttgggtggctgtaatgatgtttgcaagtttaaatgcaacaagtc

SEQ ID NO: 18694 - DNA, 1307 bp, Oryza sativa
  ref <308>: DATABASE ACCESSION NUMBER: AK069079
  ref <309>: DATABASE ENTRY DATE: 2001-12-06
gaccgcgcacgcggcgaggctgcttgctatctcttccggccttccctctgctctgctcccccttgccggctcgggctctcggttcttgcattgcaccgccgtccacggagatggtcgctgcggcggagtggtgggaggccaccatcgcggcgtacacggggctgtctcccgcggcgttcttcacggccgtggcggtggccgccgcgctgtacgtcgcggtgtccggtctcctcacgcggcggccgccgccgctgcctaggagacaggaggaggcgagggcgtcgcagccgctgccgccaccggtgcagctcggggaggtgacggaggaggagctgagggtctacgacgggtccgaccccaacaagccgctgctcatggccatcaagggccaaatctacgatgtcacgcagagcaggatgttctatggacctggtggcccatacgcactgtttgcaggcagagatgctagtagagctttggcgaagatgtccttcgagctggatgatttaaccggcgacgtttctggcttaggccccattgagctcgaggctctacacgaatgggagggcaaattcatgagcaagtacgtgaaggttggaacaatcaagaagatcatcccggtgtcagagggagatgctgcaactcatggtgggacatctgatagaggcatcgatgtaggcacaatagagagcaaccgtgtgccagaaccagaggaaaatggagctacaagtcatgcagatgcagtggaaaaatcagatgctgatgtgagcacacacaaccacgaggatgttgtagagaagtcggatgagctgctggaatcaggtgtggatactagaagcacccatgaagatgcagtggggaagccaaaggaagaaacagaagatgcagatgttcagaaaacgatcagcactgaagttgcaggtgagggaaagggagcacctgatgaagatgacaggaacacgtgcagtctggaagacgcaattgagaagccaaaggaaacggcatacattgatgtgaaggatacaagcggccatgaagttgctggagaaccaaaggaagcaccagatgtggatgggaacaatacaagcagcaatcaagatggcagtggatgagccgaaggaagcgtcacatgaagcgaaggaagcgtagagttgaggctattgctgtgataatatctgcaggtagttagcataatacagtgttgaatcaacagagaaccagcaggtgagctctgttgggttgaatctttgtgtagtgtggaaataccactataatgcaataagaatgtaataagcttgcgctggtcc

SEQ ID NO: 18695 - DNA, 2101 bp, Oryza sativa
  ref <308>: DATABASE ACCESSION NUMBER: AK069080
  ref <309>: DATABASE ENTRY DATE: 2001-12-06
gtcagactcatgactcagggcaccaaccaaacaggcgttttcttcagagtttcagagcagaagcagagacaccaacaagaaggcgatcagctcgttcttcttctccctctcctccagcggcggccatggcgagattaggccttgccgtctgcgccgcctccttccacctcttccttcttcttgcgtcgacctcctcgctccggcgagctcccacggaggcggacacggccaaccatgccagaagaactgcctatcacttccagcctgcaaagaactggcagaatgatccgaatgggcctatgtaccataacggtatgtaccatttgttctaccagtacaacccgcatagcgcgctctgggacatcggcaacctctcctggggccactccgtctccggcgacctcctcaactgggccgctctcgacaccgcgctcgaccccacctcgcctttcgacgccaatggctgctggtcgggctccgccaccatcctccccggcgccctcccggccatcctctacaccggcatcgacgccagcaaggagcaggtccagaacgtcgccttcgccaagaacccctccgatccgctcctccgcgagtgggagaagcccgcgtacaatccggtcatcgcgctcccggccgatgtccccggcgacaagttccgtgacccctcgacggcatggctcggccgtgacggcctgtggcgggtcgccgtctccgccgaggtggacggcgtcgcgtccacgctcgtctacaggagcaaggacttcgtccggtgggagcggaacgccgcgccgctgcacgcgtcgcgcgccgcgggcatggtggagtgcccggacctgttccccgtagcggagcgcggcgaggatggcctcgacacgtcggcgaacggcgccggcggcgtgcgccacgtcctgaagctgagcgtgatggacacgctccaggactactacatggtcggcacgtacgacgacgcggcagacgccttctcgccggcggagcctgagcgcggcgacgactgccggagctggcggcggctggactacgggcacgtgtacgcgtccaagtcgttcttcgacgtgcgcaagaaccggcgcgttctgtgggcgtgggcgaacgagtccgacagccaggccgacgacgtcgcccgcggctggtccggcgtgcagacattcccgaggaaaatgtggctagccaaggacggcaagcagctgctgcagtggccgatcgaggagatcaagacgctgaggaggaagcgcgccggtctctggcaaggcaccaggctaggcgccggcgcggtgcaggagatcgtcggcgtggcgagctcgcaggcggacgtggaggtggtgttcaagattccgagcctggaggaggccgagagggtggacgaccccaaccggctgctggatccccagaagctgtgcggtgagaagggcgccgccgtgcggggcggcgtcggcccgttcgggctcctcgtaatggcctccggcgacctgcacgagcacaccgccgtcttcttcagggtgttcaggcaccatgacaagtacaagcttcttatgtgcaccgacttgacaaagtcgtcgacaagagcaggggtgtacaagccggcttacggcggattcgtggacatggacatcgacgatcacaaaaccatatcgctgagaacgttgattgaccattcggtggtggagagcttcggcggcggcgggcgggcgtgcatcacggcgcgggtttacccggagcacgtggcgacgagcagcagccatttgtacgtgttcaacaacgggagcgacgccgttaaggtggccaagctggaggcgtgggacctggcgacggcgaccgtcaacgttgttgttggagaccaccacggccttgttgcgccggcgttggagttggagccgacacgcacgacgcagtgatctgaggcctgaagcggctggccggcactggcacagttggttcgatagtttgatggcatcgtgcagccgattggttgtgtggtgatttgttcgattgttgtgaacagggtgtatgatctgtgacagaaagaagagcacaaaagaaatcattcgatagtatacgtcacgtgctttatatgttttgc

SEQ ID NO: 18696 - DNA, 2358 bp, Oryza sativa
  ref <308>: DATABASE ACCESSION NUMBER: AK069081
  ref <309>: DATABASE ENTRY DATE: 2001-12-06
gttgattttctcatcaatagtttcctatttatgaattattgaagtacctagatcaactagatgtcgtcatataagaaaactcatatttcccttattttttgaagaatttaaaataaaaatggatataagtgcattcttgggcacaccagtaggtgttgtaggaagagtgatgacatttgacagtgaaaactaaaggttctgatttttttagttgtttaatgcagcaacagtgccttagtaagaatatgttcagcacttcgaagtgactatctattaatgaggcaaacataagttttggttccttctacttgcaaacatgacaggtcttaagtcatgtataatgcaagatatttcggggacacttagcaaagaaataattccttttgttgccatgtagaagttggttatttttgtagcaattgatgaggcagtggtacttaataacttcttatgcatataaataccttcaattaatgcgtaatgtaactatataagcacatacaaaaagctgtctgcattattcattaacactccaatggaggtgcttgatggtgtgttgtactctatagaaccatgtatggattgatggtcctatattgtaaaaataagatataagaatatttgaatccgtggagtattttatggttctaattaatattttggatgccccactgttaacaatgtacatgtcaatctgaattttcttacttgttacctgaataaattacttcccctatgcatatttcttccatgtgtatttctctgcatttttttcatgagttgcagatcctggaagcattaacaacaaagaaatgccaagaagaattttcacaggaatcattagaaacacttggggattctttcctcaaatatgttacaactcggcacctttttagtgaatacaggcttcaacatgaaggcatattaacaaaaatgaagaaaaacttgatctccaatgcagctctgtgccagctggcctgcagcagtaatcttgtggtactctagatcctgttgctaactgtatttttcttattgagctaggcatgtagaaattttttttatcgaacacgcaggacagctgcatatcattgcgttaaagaagggtaaaaggaccttagaaacacacacctacacactacagaactgattacatgcacatccttgctaattttatgcaatattaatagtcctacatctcccagtatctttcataccatgtcagcctatttcaattcttttgtgcaactgctatatcacaattaggcaatgttccacatatttcctttttaggaaaatgggaactctattgttgcattgaattgtttgccaagttgccaatatagactattgtaggtgaccaaaaccttgtggtgctgaccctaagttaatacaaggctgtggctcagaccatattactccttgttgggccaacacctagccctcaggtcacatggcacctgtagtcagatctgaggttggcttgacgtggtctgctttcatgaccgttgaagcagcggtactttgcctggcaagcaagaatggcgggaagaatggtagcatctgcctatccttgaaacggattctatcttcggcgtgtgcagtgagatagtaaatagctttctttaatccgctcaaccgacttgtaatcctttcagccaatcaattttaaaggtctaatttttgtttctggtgctatgtggctagggctatgtcatgaaataaaataatgctttgcatacaaatttgttcatcacaaaatgaattgtgttatttttcaagtaccataaaatatttctattcaccttttcatgtttcaaagaagacttatctgtcttttatcactggtactagatgatactcttgccctttatgtttggttggcagggttacattcatgctgaggagtttaatccaagagattggatcatcccttgcttggactatgatgagcgtggtaacaaaaaaatttcctttctggcacccaatggtatgtacagccaaaggaaaatgtctattaaaagtaagaggattgcggattcagttgaggccttaattggggcttacctcagtactgctggggaaaaggcagcatttcttttgatgaaatcattagggatgaatatagaatttcacactgaaattccagttgaaaggaaaatttcaatgaaagctgaagagttcattgatgtgaggagcttagagggaatgcttggttacaagttcaatgattctttattattgctcgaagcattgacacatggctcatatcagacttctggccctacttcatgctatcagaggctcgagtttcttggagatgctattttggatcatcttttcactgaatattactacagc

SEQ ID NO: 18697 - DNA, 1404 bp, Oryza sativa
  ref <308>: DATABASE ACCESSION NUMBER: AK069082
  ref <309>: DATABASE ENTRY DATE: 2001-12-06
gagctgcacccttgcatcttctctctctctctcttcttcttcttcttcttctccatatctcctactcctcgtgaagatcgatcgaccatcggcaatttcattcggtaatagttaagctaagatcaaatcaagattggcgaaacgatggagatggtgctgcagaggacgagccaccacccggtgcccggggagcagcaggaggcggcggcggagctgtcgtcggctgagctccggcgagggccgtggaccgtcgatgaggacctcaccctcatcaattacatctctgatcacggcgagggccgctggaacgcactcgcacgcgccgccggtctgaagaggactgggaagagctgccggctccggtggctgaactatctccggccggatgtgaagcgcggcaacttcaccgcagaggagcagctgctcatcctcgacctccactcccgatggggcaaccgatggtccaagatagcacaacatttgcctgggaggaccgacaacgagatcaagaactactggaggaccagagtgcaaaagcatgccaagcaactcaattgtgatgtcaacagcaagaggttcaaggatgccatgaagtacctatggatgcctcgccttgccgagcgcatccatgccagggctggcgctgttgatgatagcggagactacagcaacaacgacttatcatgtgtatctggtgtaacaatggccactgttgctaattgttttgatggctctccgagcatggtgactagctcatcttccgattcgttcacgtcggagtcacaagatttgaagaagattaacttacatgtgcatggtgatgatgagaagatgaactctgaagactggatgcaggaggtggaccatgagttttggtctacagagattcagcctaataatgaacagtttcaggaccaacagcttaacggttgggtgcaaggtttttctgagggtttgtccgaaactctatggagtctagaggacatatggaagatgcaataaattttacatttacaaaggacatatttgtaaaatagaatagagagacatcaaggaaggcaaagagaaaaagttctttagtcatatactgtacgttgagacacttaagttctttgccaacttcaatgttttttttcttttatttttgctgcctctttcgatccctgaaggggtttttgccttctagatgtctaggggttcaaagaggaccagaggagatatatatgtgtttggatatgttgatatatgagctgatatatgccttactatatatatactccagaattgcactgaggattacatatccaattcagacatgcaaaccttaccagttgcaatattgtaaattacatgtccaattttgtagtttcatcttcctcatcataaaaaaattatgttgtgtcg

SEQ ID NO: 18698 - DNA, 2173 bp, Oryza sativa
  ref <308>: DATABASE ACCESSION NUMBER: AK069083
  ref <309>: DATABASE ENTRY DATE: 2001-12-06
gagaggagccccgcctaccgccgccctcacgcctcctcccacctacctcacctcgaagctgacgtcagcaatggcgctcgccaccaactccgccgctgtttccggtggcgctgcggccgcggcgtcgtcggcgccccagccgcggctcgccgccacgttcctcccgatgaggaggcgaaccgtctcggcggtccacgcggccgacccggcgaagagcaacgggcccgtgcaggccgcggcgaaggcctcgtccccgtcgacggtggcggcgccggagaagaagccggtggggttggggaagtggacggtggatagctggaaggcgaagaaggcgctgcagctgcccgagtaccggagccaggaggagctcgactccgtgctcaagacgatcgagacgttcccgcccgtggtgttcgccggggaggcgcgccacctcgaggagcgcctcgccgacgccgccatgggccgcgccttcgtcctccagggcggcgactgcgccgagagcttcaaggagttcaacgccaacaacatccgtgacaccttccgcatcctgctccagatgggcgccgtcctcatgttcggcggccagatgcccgtcgtcaaggtcgggaggatggctggccagttcgccaagccgaggtctgattcgttcgaggagagggacggggttaagctgccgagttacaggggagacaacatcaatggcgacaccttcgacgagaagagccgcgtgccggacccgcagcggatgatccgcgcgtacgcgcagtcggtggcaacgctcaacctgctccgcgccttcgccacgggagggtacgccgccatgcagcgcgtcacgcagtggaacctcgatttcatggatcacagcgaacaaggagacaggtaccgtgaattggcacaccgggtggatgaggcacttggcttcatgactgcagcagggctaacagtcgaccatccgataatgacaacaactgacttctggacatcccatgagtgcctcctcttaccatatgagcagtctcttacacgtgaggattccaccagtggcctcttctatgactgctcagcccacatgctatgggttggtgagcgcactcgccagctcgatggagctcatgttgaatttctccgtggtgttgccaaccctcttggcataaaggtgagtgacaaaatgaacccccgtgacttggtgaagctcattgagattttgaacccatcaaacaagcctggaaggataaccataattacaagaatgggggcagagaacatgagggtgaaattgcctcatcttatccgtgctgtccgcaactctggacagattgtcacatggattactgatcccatgcatggaaacaccatcaaggctccatgtggtctgaagactcgtccattcgattccattctggctgaagtacgtgcgttcttcgatgtccatgatcaagaaggtagccacccaggaggtatccacctggaaatgactgggcagaacgtgactgaatgcatcggtggatcaaggaccgtcaccttcgatgacctgagcgaccgctaccacacccactgtgacccaaggctgaacgcgtcgcaatccctggagctcgccttcatcatcgcggccgccactcgccgcagcgtgtcgaccagacaaggcagcgcctccgaaaccctagctccccgccttcccctccgcggccgccaaaatggtgaacgttcccaagaccaagaagacctactgcaagaacaaggagtgcaggaagcacacccttcacaaggtcactcagtacaagaagggtaaggacagcctgtctgcccagggaaagcgccgttatgaccgtaagcagtcaggatatggtggtcagaccaagcctgttttccacaagaaggcaaaaaccaccaagaagattgtgctgaagctgcaatgccaaagctgcaagcattactcccagcaccccatcaagaggtgcaagcatttcgagattggtggagacaagaagggcaagggaacatctcttttctaaactacctactggatactgaagttgtgggtctattgtgcttcatacttcaatgttattaggaacttaatttaagcagaccatatcatgtattcaagtatcatcgtctgacatttactctagcaaggattggctttctgctgaatcaagttttcttgctt

SEQ ID NO: 18699 - DNA, 1842 bp, Oryza sativa
  ref <308>: DATABASE ACCESSION NUMBER: AK069084
  ref <309>: DATABASE ENTRY DATE: 2001-12-06
gttatgttgtgcaggaggctataattgttattaaggacatcttcaggcgctaccctaatacgtatgagtcgatcatcgcaacactctgtgaaagcctagacaccttagatgaaccagaggctaaggcatcaatgatttggattattggagaatatgctgaaaggattgacaatgctgacgaacttcttgagagcttcttggaaacattcccagaagaaccagcattagttcaattgcagttactaacggcaactgttaagttgttccttaaaaagccaactgaggggcctcaacagatgatacaggctgttctcaataatgcaacagttgaaacagacaatcctgatttgcgcgaccgagcttatatatactggcgacttctttctactgatcctgaggcagctaaagatgtagttttggcagagaaacctgtgatcagcgatgattccaaccagcttgattcttctctcctagatgatctgctagccaatatttctaccctttcatcagtttatcacaagcctccagaagcatttgttagccgcgttaaaacagctcctagggctgatgatgaggagtttgctgatacagctgaaacaggatattcggagtcaccatctcagggtgttgatggggcatcaccttcctctagtgctggcacttcttctaatgttccagtgaagcagccagcagcaccagctgctcctgctccaatgccagacctccttggtgatttgatgggtatggataactccattgttcctgttgatgaaccaacagcaccttcaggccctccactacctgttttgttgccatcaaccactggccaaggactgcagatcagcgcacaactagtgcggcgtgatggccaaatattctatgatatatcttttgataatggcactcaaactgtgctagatggattcatgattcagtttaacaaaaatacctttggccttgcagccggtggtgcacttcaggtctctccactgcaacctgggacctcggccaggacgctgctacctatggtggcattccagaatctctctcctggagcgccaagctcactgctgcaggttgcggtgaagaataatcagcaacctgtgtggtacttcaatgacaaaatccctatgcatgccttctttggtgaagatggcaaaatggaacgaacaagttttcttgaggcctggaaatctttacctgatgacaacgaattttcgaaagagttcccctcttctgtcgtcagcagcatagatgcgaccgttgagcaccttgcagcatcaaatgtgttctttatcgccaagaggaaaaactcaaacaaggatgttctgtacatgtctgcaaagattccgcgtggaatccccttcctgatagagcttactgctgcagtcggtgttcctggcgtgaagtgtgcggtcaaaactccaaacaaggagatggtggctctcttcttcgaagccatggagtctcttctcaagtgatacaaaattgaaggatcattgttccttccaaattgatcagttcatgagctattgtaggtttggatgcggcgttgtttcacaggagctggtgtgaattgtatttgttgttctttgtattagattactgtatttaaactgctagtttcctggtttcaaagttttttcacgacgaacactcgacatggccattttgtctgcgtaatttgtatatctcggacctgaacctcttttcatgccatagcatatgaaatataagtagcttgcaaactcgtaattgatgaggtacagatatcatttttatcaactacattgttgtttcacttgtctactttaagcaatgatttccttttatctgcttccg

SEQ ID NO: 18700 - DNA, 1181 bp, Oryza sativa
  ref <308>: DATABASE ACCESSION NUMBER: AK069085
  ref <309>: DATABASE ENTRY DATE: 2001-12-06
gaaggagaaatccaagctcgctttgacgaagccctcctcctcccatttctcctccccgagctagggtttcgccgccgccgccgccgactagccggagttgccatggggacgccggagacgtcgagggagccgtgcccggaccggatcctggacgacgtgggcggggcgttcgggatgggcgcggtggggggctccctcttccacttcctcaagggcacctacaactcccccaacggcgagcgcctcgtcggcggcgcgcaggcggtgcggatgaacgcgccccgcgtcggcggcagcttcgcggtgtggggcggcctcttctccgccttcgactgcaccatggtcttcatgcgccagaaggaggacccctggaactccatcatcgccggcgccgccaccggcggcttcctctccatgcgccagggccccggcgccgccggccgctccgcgctcatgggcgggatgctgctcgccctcatcgagggcgcgggcctcatgctcaaccgcgtcctcgccacgcccccgccgctccccgtcgatgaccccaacctccccgccgtcatgggcggcggcggcgggatccccgggatcccgcaggtccccgtggcgccacctgaggtcgcgagctccagcggcggtgggagtggatggttcgggagcctgttcggcaagaaggaggaggagaagaaggcgagcccgagcggcggcaagtcggagatgttggagagcttcgacacgccgagcactccgatcccaaccttcgagtacaagtgaagaagaagaatcgcaggatggctgagtgcactgaagctcaggcagagattttgggtagtctggaaaaaaaagctacatcagagcgagatggaatgcttatttgacgaactcatgcgtgcgcacgacttgtttctagggctataaacctcccacagaggaaggtcttggcccctggctcttatatgtattaataatgtcataatgtatgtgaggctgtgatccgttttaatttaccatggtatgttttgcaactttgcaaatgatgtagcagtagcagtaataacctatagcattcttgtcattcagtgtactgggctcttaaaaagcctcaacttatgcttcaagctggcttataaagttttgacacttttgagttaggatgtggaagttatgcatcctgtcttccc

SEQ ID NO: 18701 - DNA, 1369 bp, Oryza sativa
  ref <308>: DATABASE ACCESSION NUMBER: AK069086
  ref <309>: DATABASE ENTRY DATE: 2001-12-06
tataaaaatgttctggatgttacaggctgagctgatgtatgagacaatatgtgaatggccacggtacatcgatgttcctcttcctattgcaagggtatgaacttaaataatatcttgtgttggtcaaggcgaatggccacggtacatcgatgttcctcttcctgttgcaagggtatgaacttaaataatatcttgtgttggtcaaggcaacctgagtattggattgtctcgtcttttgaccgtcatgctttgggttgtgcaggctatcgcatctcctgaaagctgatagattgggatttttttttttcaatactctaagcctctaatgaaaggtgcatatggacttttattttagatgttctaactttgttttgtctctacctctcaaattgttactatatatgtactcttcaacctgccgcataggttggcacatgtttataaggtcaaatggaatatatttcttgtgtttttactatcatttggtttagttctttcacacagcaatgttgctatttctattgttgcttcccgccctggaaaaaacacggctcaagccgtgaggtcttcatttgcttctcttgtgaccaattaatctgtaggtttgggtccaaagtatgctttcgcaaccaagtgatgaaaaaaaaaacaatctggttggggatgtcaattggttggttcatacaagtgagttgatttgattatttaatttcctctaaacaatacctctaatatttaatggtcaaggatgccataccatatatactgttggcacttgtataccacgtgcttaggctgccataaaatgatttgccatttctggcaaatgatgtaaatgatgacatagaaaagtaaaaaattgcaggaataaacctatgacattcgcaactttttcaagtgagggatctgttttttggttgcagctgacagtgtcatcacgttgtgggatcctggtaataatatcacatttgttggtatgattaaagaggcactatttagtggtatgctactatctttgaaatgttgtggatgaagcactgtgagttgcttgtgaggaagatcaagcacatggttgctgtaattctgcttctacctacaatatctttttagatttttttttatcaatgaaggattctcctattttagtagttagtaccacatattttgtagcagtttggttgaggtcttgatgaaaaacgaaactcgaaagttctctacatattcccatctttgttatattagaaatcataacattctttgcttaatagtcatttactctgaatatttctattttttgctatagtccaagcattaaatgaccatgctctgatttatagtgttttcaagaatgccgagctattggaatttc

SEQ ID NO: 18702 - DNA, 2464 bp, Oryza sativa
  ref <308>: DATABASE ACCESSION NUMBER: AK069087
  ref <309>: DATABASE ENTRY DATE: 2001-12-06
gtcttctcgcccgcgtcgcctcgccctcctccctcgcccgccctcctctcctcacgcgcatcgcgtcctcaccctcctctcaccgccgctgcaccgcccccgcctctctccccagtcaggccacttcatctgccagcgaggagaccaggggcgtcgaatccggtgaccccctcctctctacaggcgattctggccgcccggacgaaagggtcgtgagccaccaccaccatcttctccaccctgctttgtgtagtgccagatccgctagcaggccgtcgatacggcgcttcgtctccccccggtggatctggccgctcagagcttcactggcgccgaggacagcgagctcgcacggcggctcaggggccccgccgtggccgtgagggagcgccttagcttcatgaacgagtacctcgccgaggaccgcgaccccgtcaggtgctaggtcgtcgccgccgccgtcgcgttcgtcacgctcatcgtattaggtgtagggagtgttgatgataccccagtagaactgccaaagaaactctacataggtcccccaagtgccaaaacaattcaactttctgatggaaggcatctggcttataaagaacaatgagtcacagctgacagggcaagattttcactgactgctcctcattcttttctttagtcgaggttaccaagtaagaccaaatgttgcattgtttggtttaacgcatcatcacagcatgacatcattacatatttgatctacatggtttcttcgtgtacaggaatcccaggaatcaaaccatcgatccctcctggaggaatttggggcacgacttttgatcattaattaacactgtaaaagcaacactatgaaaaatatgggtaaatcatctactatccaggctttcttatgatctcatagtacctctccatttttttttttcgtgtcagctgtagtgtgtacatctgttgtttatgctcgcatcatcgtctcctctgagtcatctagagggttggtatgccaaaaataattcaaactgcttgagttcatataattcagtgtgccttctaaaattgaagaataacctttacatttagcttttgggatagccagctaggtagcatctaggtctgcgggtggtttgaaatacattcccaaagaaaaagcatttttagcactacaatttaggtgccttcatgaaaaaaggtctcatctgatcggtacaatctacaggcctagacttttagaaagcattaatgatttacaattattgctgtcacacatgacaatccattgtttctaccttcagttttgcctatttttatctatgtgaggttcagcagcatgtaaggagccttagcactgctattactgatgtgttgagtcggattgtattatatctgaatctcacaaaaaaacattgcagaccattatattttaagaaatattagaatgtatgcaagtatatatcatcctatgttcctatgaaatatgtatctatggaatgtgggacactattctttttgttggatataggatagtttacttacgaaatggaagtcaactctgttctaatttaaaattcactgttaatttcattctttatgaatattacgtggtgctgcgtatatgtattggttcccaatgtgtaataattatattggcaaaaggtgatatttgtagatatacaaaaagttaagcttagttaggtgacttcattgtttcaatagatagcttttctttccattttctgaattgaggtcatgagggacatgaatctgtaaatgtcttgccaacagtttactcttgctgttatcagggcattcagtcctactgtgctacactgctatgagttcttttatcggactgctggctacaagccataacatttgggtttagcatgcccattaccttataagctataacaggatggatatatcatatatgtaatgtatcatatacatatatataggcagcagcttgcccaaattgttgtctagcatggtaaaggtacattcttagaaatgtgcaaatgcctggtaatatttggtcatatatgttttgtactgaaggtgataatctacatcctttttatatatgtatatgtcagtaaaataaatagtaatacttcataccacacctaatgtatctattatttcttattttgcaactatctgcctttagcctttgcaatttgtagatggacgagctcatgaacacaaatgcaagtatgaacagttggggagcctcatatgtgagataacgactaatccggaggatatgttttttttcttagtttttattcataatgtccacattttgtaggagttctccactaacatgctctgctgtgtgattctcagttctgtagtgtggtcacaacactagctgtcaactactcactgctctcttggctcccatatttggaccaacactatttgttgacactttaacatttggtgatatttatcatgtgcactg

SEQ ID NO: 18703 - DNA, 1559 bp, Oryza sativa
  ref <308>: DATABASE ACCESSION NUMBER: AK069088
  ref <309>: DATABASE ENTRY DATE: 2001-12-06
ggctcatcgccatccacccgcaccctcccaattcttcccacgaaaacctcccaaattccgtagccgatctctcccccccaccggcggccgccgccgatggagacctaacgccggatcgatctctcccaccggcccgaggcgggtgaggcagggcgcgtcgcctccatggagaccgagcggatccgtcacctcctcctcctcacgctccgcgcgccgcacgcccgcctcgccctcgtgggtggcaaccacaccgccgcccgcttctgcacccgctaatccccccctccctcgccggaagactcatcatcctcttcgtcttcgccaccgtctctgtgcggtatagctctctctctcgctcgctcgctcagatgccggacggctgcgtggtgatccggctcccggacccgcgcgtcctccgcgtgatcgcgcgctcggtgctcctcgccgtcgcgctgctctccctggcctggctccgcgatgccgaggcccccgccggggacgcgctccaggtggggctcctgctccgcgacctccgccgcgagggcctgctcgcccccggcgcgcgcgccgtcttcctcggcgccgccgatggagactgccaccaccaccctcccgccctcgacggcgacgacatgcgacgcatcacgccgcgggagttgctgacgacgggggacctgtccgtcgacttcgtgctggatttcggctacttcgacaaggacggcgacagggttggcctcgtcgacagggtgctcaaggatggcggcatctttgccgccccaattggctcggcgagcgagttccgcttgccgccgaactaccgcgtggtttacatccgtcggttcaccgagactttcgtcgggatcaagaagattgcccgcgtcggcggcgacaatgggattgccggcgccagaacagggatggcagcgacgactcctgctctgaaggaaggagttcttgcgttttctgctcaaacagctgacactgccctcgctgaactcaagaacttcaggaggaagctcttactgcctcacatcactggagcatcagcggctcacgcgcatcaagcgtggctaaaattgcgtcatcgtccagtgattgcagttgatttcccagcaatgtggaatgtgaataagctgcagccagcacatcctctcgtccttcaggataaggctgttcatggagcgcaacagcagcagctcaacaggagcgtgagactgaacccatctacaggatattgaaacgaagcctgaattggaacagggaaaaagctcaactgaagaagagcattcttgtccattgcaaatccaggggggtgatgctctctgcctgccaaaagaaatggttgggttgcttttttctgaagttctttatttaagttgtctgtcgtgcgtgatgattgagtttgatggtgtgctactgcttaccagtatgtgtgtatgcttcgttcgatagtctccaatttgttgttttgtattcagtggtgactggtgatctactgatctccaattgcactactgtatggtatccgtttggaatgagcattgttcgtcttgatcacc

SEQ ID NO: 18704 - DNA, 3756 bp, Oryza sativa
  ref <308>: DATABASE ACCESSION NUMBER: AK069089
  ref <309>: DATABASE ENTRY DATE: 2001-12-06
gagggtttccccctcctccgctctcacactgcctcgcctccccggatggacgagaccctagcctccctgcgccgcccgaagcgcgggcggccgccgcggccgcgggaggaccacttggccgccgaggacttcgaggaggagggggaggatgaggaggccgaggcggaggcgctcgcgcggccccagacgaagcgcaagcgcgcggccagcgccgcggccgcggccgcgctggaggaccaaaccctcatcgatattattaaacataatggcaggcttatcagccatgctgtcaaaaaattggtcgaggattatgaatcagatccaaaatctgtgatgtttcagatattagcgatgctatttgaggcttgtggagctaggcataacttttatgcagactacctgtatgaggcagatgtggatggtgttgtgttttcccttgtcgagctagcaaaaaagggaatggttgaagataattacaacaccaaacagaaggatctcaagaacttcaaagaaaatcttgtttccttttgggataccttggtccatgagtgtcagaatggccctttatttgatggtagcttattccaaaaaatcaaagactatgtggttgctttgtcatgtactcctccaagggtttatcgccaagtagcttcattggttgggctccagcttgtgacgtccttaatatctgttgctaagactctcagtggacagcgtgagaccactcaaagacagttgaatgcagagaagaagaagcagactgatggaccgattgttgaatctctaaacaaaaagctagctcatactcacaaaagcattacttacttggaggaactaatgcggaaaatattcagtgggttattcatgcaccgctatcgtgatgttgaccctgagatccggatgtcgtgcataaaatcacttggtatttgggttgtctcgtacccatcacttttcttacaagatatatacctgaagtatctaggatggacacttaatgacaagaatgctggggttagaagaacttctattcttgccttgcaaagcctgtatgaagtggatgaaaacataccttctcttggtctctttactgagagattttacagcaggatgatccagcttgcagatgatgttgatatttcagtagctgtgtcagctatcggactcatcaagcagttactgaggcatcaacttttgagcgatgatgatttaggtccactatatgatttgcttattgatgagcctccgctgatcaggcgtgcaattggggaattggtttatgatcatctgatagcacaaaacatcaaaacctcccagtctggagcaagagatggaaacaatgattcatcagaggttcatattggtcgaatgctgcaaatcctgagggaattttcagatgacccagtcctgagctcttatgtcattgatgatatttgggatgacatgaaggctatgaaagattggaagtgtataatctccatgcttctggatgaaaatccattaaccgagcttactgacatggatggaaccaatctagttcggatgctgcgagcctctgcaaagaaggctgttggggaaaggatagttcctgcaacagacaatagaaagatgtactacaataaaggccagaaggaaatattggaaaacagcaagcatgaaataactactgctttgctgaagaaatatccacagcttttaagaaaatacatatctgacaaagctaagatatcacctctaattgatatgatgatgcttatgaaacttgagctgtactcactaaaaaggcaagatcagcatttcaaggctgccatagatctcattgcggatgccttctttaaacatggtgacaaggagaccttgaggtcttgcatcaaggcaattactttctgttgcactaactgtcaggcagatcttcaaaattatgctgaaaacaaactgaaggatcttgaagacgagttggttttgaaagtcaaaactgcaatcaaggaagtagaggcaggtgatgatgaatactccctcatggttaatttgaagcgattttatgagcttcagttgtcaaaacctgtcaaaaatgatggtttatttgaggacatgtacagaatcctgagtcatctaaaagatatggataatgaggtgaagagctttctcctccttaacatgtaccttcaattagcatggtgcctgaatgctattgatggtgaaaacccatctgaagcttccattgacgaacttttatccaggcaaagctctctttttgaaaaactctattattacttggtggttctgcctacttatcagaaagagggaaggagcaccactatactttcctgcagagtctgtgtcattactgctgagatgtggtgcctgtttaagaagccaaaatattcttcaacaaggctcgagagtttgggatatctcccgcaactagatgttgtccagaatttctggaaactatgtgaacaacagctcaacataccagatgaaatagaagatgaagatgcaaatgaagaatatattgaagacacaaacaaggatgttgtcatgattgcagctgcaaagctagtgctagctgatacagtttcaaaggattacctgggcccagagcttgtttctcactatgcatcccatggaacaagtactacagagataatcaaacatctaatcacctcgcttcggaaaaatgctgacaacaacatgggtgccttatttttcgaggcactgaaaaggggatatgagcggtatatggcccatgtaagtgatggggaaaatcaaaccctcattggcaagtcttattcagaatgccaagatcttgctggtcggctcgcggggtcctatgttggtgcctcgcgcaataaaaacaagtctgagatcttgaagataatccaagacggtgtttcttttgcatttgtggaccttccaaagcaattgtctttcctcgaggctgctctactgccatttgtttctaaacttccatcgtcagatataccagacatcctgatagatgtacagaagaggactcaagatactaatactaatgaagatccaagtgcttggcgcccgtactttacgtttgtagagcatctacgcgataagcatgcaaagaatgaggttttgcaggaggaaaaggaggaaaaacctgtaaagcgcaggggtcggccaaggaaggttagagatgtacctgcaaggaatctttttgatggacacaagtctagcgatgaagagtctgttagtgactctgatcagcaagggcatggtgaagacaatgacgacgatgacgcagatcagcctctgatcaacacgtttaggtcttccgcatccaagctaagatcactgaaggtttctcagcaaggaacaagcggtcagaaaggaccttcgagggcatcaggaagcaatagctgagggcacgcactgacgtcgttacgcatgactgaacttggcacaaatgaatgcagcagatttgtggcgttgtagatgatttgtacctaggtgctcacccttttggtaaacaacgtgacatagacatttgttaggtttttaccccttcgccatgtatattatgttcagtaataatatatgtagaaaatcgcatgttgcattgtaccaatttgatcgatgtatttctcctgggttccgagactaaagaacacttgcatgcgagagatagggagagcagcaaccattttttatttattcaatggagaatccgaaccttggattggtttgcatgggaaccaatgagcccggcaatccttgcatacc

SEQ ID NO: 18705 - DNA, 1244 bp, Oryza sativa
  ref <308>: DATABASE ACCESSION NUMBER: AK069090
  ref <309>: DATABASE ENTRY DATE: 2001-12-06
catgatcaagggctgtgccatgcaggctctgcttgagcaaggtgctcaattgcatgctcaagtgatcaaaacggatttgatcagggactccttcgttggttccaccctagtggatatgtatgggaagtgtggccttataagtttgtccatgcagttatttaatgagattgaatacagaacagatattgcttggaatgcggtaatcaatgtattcgcacaacatggtcatggaagggaagcaatccaagctttcgataggatgatctatagtggtatcaggccaaatcacattgcatttgtcagcctgctcacagcatgcagtcatgctggattagtggatgaaggactcaagtatttttactctatgaaggaagcccatggtattgagcctaaagaggagcactattcctgtatcattgatacgtatggtcgagctgggagattagatgaagcatataagttcatatctgagatgcccatcaagcccaatgcctatggctggtgctctttgcttggagcttgccgtatgcgagggagcaaggagctgggggaggttgcggcacaaaatcttatgaagcttgaaccaggtaacactggtattcatgtgtccctttctgggatctatgcatccctgggccaatgggaggatgtgaaggcagtcaggaagttgatgagagatagcaggattaagaaacttcctggttttagctgggtcgattctaacaaaaaaacccatgtgtttggatccgaggattggtcacatccacagcagaaggacatatatgaaaaacttgaggaactcactacgaggataaaggaggaaggttatatcccggatacaagcttcttgccatgtaatttagaagacatcgcaaaagagaggattcttcgttatcacagtgagagaatagctgtagcttttgctttgataagcatgccagctacaaaaccaatcattgtgaagaagaatttgcggatatgtatagactgccacactgcattcaagttcatttgtaaggtagaaagaagggatattattgtgagagataattccaggtttcaccattttgtgaatggtaggtgttcctgtggagattactggtgattaactcttatcctttttcgagctagaaaggtacaataggaacttctacactgctggcaactgacctttttacagtgcttaaatttccatgttagttgttactgttttttttatgtacttgtatacagttgctagttgt

SEQ ID NO: 18706 - DNA, 1046 bp, Oryza sativa
  ref <308>: DATABASE ACCESSION NUMBER: AK069091
  ref <309>: DATABASE ENTRY DATE: 2001-12-06
gatggctacaggtggaggaagtatgggcaaaaggcggtcaagaacagcccattcccaaggagctactacaggtgcaccaacagcaagtgcactgtgaagaagcgcgtggagcggtcttccgacgacccttccgtcgtgatcaccacctacgagggccagcactgccaccacaccgcctccttccagcgcggcgtcggcggcgccgccgtcgcggcgcacatccacggcgcggcggccgtcgccctcgccgagcaaatgtcggcgttcgtctcgccgccgccacagccgcatatgctgtacggtttaccccggttgcacccgccgtcctccgagaccgccgtcagctgctcgatgccgacgacgacgtctttgcaggagctgaacaatagcgaggggctacaacgccctggctataataatagcccccaggcggcggtgaccatcgcgcagcggccgccgtcgccgtcggtgcctccggctgtttcgtttgacaaggggctacttgatgatattgtgcctcctggagttagacttggatgacaatactcaaatatacatgcatgacttatctccctacactagatatttgaagtgtcatctcatctcttggcatggaggcagctggcaggaaggcaaatcacgcagctagggttctttgattagctcctgctgaaatccaccgtctcagtcattacctaccaattaatggcttggaaattaggagtatatattaattaagcttattgcaacgatggagagctgacttacaagtgattgcaaacctcattggtcagccggtggagtatttttcatggcgaacttttatgtgcccgattaaccgtagtctgtgtatgcagttggcagcactaggcattccctgactgtatcttcttggcagaagaatctctacctatgttaactacttctgcattataatgtgtatgtaggttggtgtagatatatactactagctatatctatgtacacttatgctaaattaatgttgtgctgtagtataatgacaaccattcaaccttttgttcttc

SEQ ID NO: 18707 - DNA, 2731 bp, Oryza sativa
  ref <308>: DATABASE ACCESSION NUMBER: AK069092
  ref <309>: DATABASE ENTRY DATE: 2001-12-06
agtctttctgctggccaccaccctccccgtcttccttggagataggtggcaggtggctagagagggatcaagggtaggagggagaggaacggatcgcgcgcgcgcgacacgtacaccacacacatccactcacggcacggtacggccggccatggctcctgaggcggcggcggcggccttgaagccgatgaaggcaacgtcggacggcgtgttccagggggaggaccccctggaagcggccctgcctctggccatcgtgcagatttgcatcgtcgtcgtgctcacccgcgtgctcgccttcttcctccgcccgctccggcagccgcgcgtcatcgcggagatcatcggcggcatcatgctcggcccgtccgcgatcggccggaacagcgcgttcatcaacacggtgttccccaagcagagcctcacggtgctcgacaccctcgccaacatcggcctcctcttcttcctcttcctcgtcggcctcgagctcgacctccgcgccatccgccgcacgggagctggcgcgctcgccatcgccgtcgccggcatctccctccccttcgtcctcgggatcggcacctccgtcgtcctccagaacaccgtcaaccgcggcgtccccacggggcccttcctcgtcttcatgggcgtcgccctctccatcaccgcgttcccggtgctggcgcgcatcctcgccgagctcaagctgctcaccaccgacctcggccgcatggccatgtccgcggcggccgtgaacgacgtcgccgcgtggatactcctcgcgctcgccatcgcgttgtcgggctccggctcgcctttcgtgtcgctctgggtgctcctcagcggcgtcggcttcgtcctctcgtcgttcttcttcatccggccgctgctctcgtggatggcgcggcgatcccccgagggcgagcccgtgaaggagctatacatatgcacgacgctcaccatcgtgctcgccgccggcttcatcaccgacaccatcggcatccacgcgctgttcggcgccttcatcgtcggcatcatcgtgcccaaggaagggcccttcgctggcgtcctcctggagaaggtggaggacctcatctctggcctcttcctgccgctctacttcgtgtcgagtggcctcaagaccaacgtcctgaccatcaagggcggggactcgtgggggctcctcgtgctcgtcgtcgcgacggcgtgcatcggcaagatcggcggcacagtgctcgcgtcgctcatcgtgcgtgtgccgctccgtgaggcggtgacgctcggggtgctgatgaacaccaaggggctcgtggagctcatcgtgctcaacatcggcaaggaccggcacgtcctcaacgacgagaccttcgccatcctcgtgctcatggcgctcataaacaccttcatcaccacgccgctggtgatggccatctacaagccggcgcggcgcgcccccccgtacaagaaccgcgccgtccagcgcccgaaccccgacgacgagctccgcatgatggtgtgcttccacagcacgcgaaacatccccaccatgatcaacctcatggagtcgtcgcgtgggacgcggcggcgcggcatcaccgtgtacgccatgcacctcgtcgagctctcggagcggtcgtccgccatcaacatggtccacaaggcgcggcgcaacgggatgccgttctggaaccggcggcgcaacggggacggcgaccagctcgtcgtcgcgttcgagacgtaccagcagctgagccacgtgtccattcgcgccatgacggccatctccgacctccacaccatccacgaggacgtggtcaccagcgcgcaccagaagcgcgccgcgctcatcgtgctccccttccacaagctccaccagatggacggccacatggagtccctcggcgacgagtaccagcacatcaaccagcgggtgctccaccacgcgccgtgctccgtcggcatcctcgtcgaccgcggcctcggcggcgccgcgcaggtcgccgccagcgacgtgtcctacaacatcgtcgtcctcttcttcggcggccgggacgaccgcgaggccctctcctacgccacgcgcatggtcgagcacccgggcatcgcactccacgtgatacgcttcgtcccagagtccggcggcggcggcgcgaacgacaaagccgcggcggacgatgcgttcctcgcagagttccgcggcaaagtcgccggcgggaacgactccatccggtacgaggagaggacgtccagagggaaggcggacgtggtggaggcgatcaaggcgatgggtccgaccaacctgttcctcgttggacaggggtcgccgtgcgcgccgctgatggaaccgagcgctgagtgcccggagctcgggccggtggggagctacctggcgatgccggacttctcgacggtggcgtcggtgctggtgatgaagcagtacgacccgacggcggagcactacgaactcgtcgaggaggtcgcggacaccgccgtggacatcgacacaccggggcctcgtagagggtgatgcccttagtcgtaagtcgtaattaacaggcatatacttctactaatacaaattgtgtaatatgatagtgcaatttaattgtagacgtattttcatccctcaggaggatggaccttgatcctccaatgtgtttttacatctgttgtacacttgtaaaatacaatagttctggaattttatgaaagcacttgacacaatatagtgtat

SEQ ID NO: 18708 - DNA, 823 bp, Oryza sativa
  ref <308>: DATABASE ACCESSION NUMBER: AK069093
  ref <309>: DATABASE ENTRY DATE: 2001-12-06
gggctgcatgccttcctttgactttgcgacggagaagtggagtgtggccctccaagggccgttgaacagaattctcgaggaatccaatggcacgctcagctatcatgaccttgccaatcagcttatgttatctggacttaaaggcactttgtgtacatcgcactggaatgatcaattttataccgtggatctatggtttctaactgattctgaaaagggtacatggtccaaagatcataggattaatgttgatgctgtttttcatgggattggagattatctgaaagtgcaacctttgcttgtgacggatgagggaaagatagtactctcgatgcagatgggatcaaaaggggttgtgcagatttatgatccagtaactgacacttcctcggatataattcagattagtatctacactggagcaagtgtgttcactggaagtttattatgtccacagagtgtgtgacaaggttggcagggcattgtacgaggtgctaccacaaagctgggcacttaggatctctactgctctgatgatgtttcggtttggtgtcatcaaggtgtagctgatgtccctcgaaaatgtaacaaaaaaaatggtgtagctgatatttgctgtgtcttcgtcatgtctctgaatctctgatcgatcgcgttattgcgatatgttctgtaatcatatcaacaattctggagttaagcatatgccgttagctcgagtttgagggatcgtgtgctcctgtctcgagttttacctgatgcaacgactttatgcaaatagtaggatgaaattaatgctcgtcaacgtaagtttcgttttcgc

SEQ ID NO: 18709 - DNA, 3778 bp, Oryza sativa
  ref <308>: DATABASE ACCESSION NUMBER: AK069094
  ref <309>: DATABASE ENTRY DATE: 2001-12-06
gatccgtgtctaactcgaacggtctgctccaatcgaccgttcctcctacaaaacggtggccgaattgatcacgaggggaattcgttcccgggctcgatccgattccttcttccaactccaaaccaacatacccttcctcgccgcggcgcgggatcccctcctcctccgtaccaaaccctagccctagctggttccctcgggtctccatggccagcgaggaggccgcccgctcgcacctctccccgcgcaagcaccgccgctcgccgcacgacgacgacgacgcggaggacggcgcctcctccccgaagcgccacaagcgcggccaccatcgccaccgccatagggtctcgccggctgcggcggatccggcggagggcgaggccgaggacggtgagatactagaccaggccaccgcggccgtgggtgtgggtgtggggagggggctggatgctgatgccggtgagacgggctcagtgcaaggtgttctacctgctccggagcatggtgataactccgatgcagacttgaatatacatgtaaatgagttgcatacctcccagctagctagaaacccatctcaagagcatgattatccagcaaagtcagatcatgctgctcatgaagccattgtggaatatcattctagaagatctcctggctcaagaaaccataatgaagctcattccaaggactgcttacgatcctgtcatgctagcagagaaactggctttcaaactgatggctcaagaaacagtgtgaggcttgattatgaacatgggattgatgacagacatggtgagccggataggtattcaaacaggaggtgggagactgaagaaagagggtgctataagaaaaggaaaaagagtggctgtcacattggtaggcacactgacatctgtaatagcgaggaaaaacacctggacgagagaaaacatggcagtttggtagaaaagaaagttgatttgcatggccttgcttatcatgagagacgaagtggcgatggtagatttgatcaaaaggcgagtgcacatcatgggcatggagaaggtagggagatggatagatggaatagtagcacaaggaagaaagacgaagaatggagaaatcggaaaaatgatacggctaggaacagttacaaagaaacagatagagttggcagtagatatggagaggagaaactcaatgatagtatagataagagagataagagaggctttaggggtaaggaaatggatgcttgttggtctagagcagtaaatgggaacgaagggagtatcagctacacgcatgcaaactatggtatgtctggcatttacaaagatggatcaagccttggtggggatgatacaaaggccaaatgcaaaaggagacctgaagaagagaagaaagaaccttacagggaggaagatgaagagaactacctggagaacatcgaggatcggaagcaacaggaaaaatctgctcattacattgacaataaagaaataaacaatgatcctgctgctacaaaacagagatcgaacaatttaagagccaaggaagatattacaaatgatcatgaattatcaaatgtatttgtcggtgcaaaattctacaatgtgaggaagtctcctactttgcctaaaatttcaatcagcttagggacatcagataataaaagggcgacaagtgcttcaggtcttcaggagggaagctcgaggatatcacataataaaaggacgacaagtgcttcaggtcttcaggagggtattcccatgagaggtaaacaagttattcttggcaacgttattgatggagaacaacctattgatcgcaagctgggcaatgaaaacagtatgcttgccaagaaaaacactcttcatgacaactgggaagatgaagagggatattacatttatcattttggagaagtgctacagggccgttatgaaattacagcacgccgtgggaaaggagttttctcgactgttgttcatgcgaaggatcttaaagctcaaaaggatggatgtagagaagtagctatcaaaattatatgcaacaatattgaaaagtacaggtctggtaagagggaaatttctatattggaaaaattgggaactgcagatcgtgaagacaaacaacactgtgtgcggattatttctagttttatgcatcaaaatcatctgtgtttagttcttgaatctcttcatatgaatcttcgtgaggttataaagaaatttggtcatggcactgggcttaaactgactgctgtaagggcgtacacaaagcatatttttatcgcgttgaagcatctaagacactgtggtgttctccactgtgacattaaaccagacaatatactggtaaataaagataacaatttgctgaagctgtgtgacttcggtagtgctatgtctgctggaaataatgagatcacaccgtatcttgtgagccgcttctaccgggcacctgaaataattcttgggttgccttatgatcatccactggatatgtggtcagctgggtgctgcttatctgaacttaaacaggaaaaatcttatttgatggttcaacgaacaatgacatgcttcgccttcacatggaattgaagggccccttccctaagaagatgcttcgaaagggtgccttcacaatgcaacacttcgaccagaacttgaactttcttgctagaaagaaggatcctatcacgaaaacggttgtgaataggttgcttttgaacattaaaccaaagggtgttggttctgcaatttcaagctgccccggcgatgatccaaaaatgatttccagcttcaaagatctcctggaaaaaatatttgtgctagatccaaagaagaggattactgtgccagaagcactcagccatccattcatcactgcaaaataggccattgaattctcagaatgtagccgatgcgttgcaaaagtttagcctcaagaagaccgcagtgcaaaaggcattggatgcattggctgacagtggacagatttccttcaaggagtatggcaagcagaaaatatatcttgctcgtcaagatcaattcaacatcccaaatggggaagaacttgaggagatgaagaaagcaaatatcaagctacaggaagaacttgcggatcaaaagaaagcaattagtgaggtagaatctgaggtacgaggtctgcagtcaaacttgactttagcagagatcaagtcaaaggaagctaaattgcaaagagaagtccaggaaatggaagagaaactaaataaattgaggaatggtgttatcttggtgaaacctgaggacaagaagattattgaagagagcttctctgagaaagttaaccagtggagaaagcgaaagaggatgttcaaggagctatgggataatatcactgagaatagccctaaagaccagaaggaatttaaggaagagcttggtctcgagtatgatgaagatgtcggtgttaacttgcagtcttacagtgacatgctgacgagtctcagtaaaagaaggaaagtatcccgctgatcatccagcatgggagtttctcaaatcaaatgtaggttacatgagagaagttttaccagctacaggcctacagttcatgaatactcgtagtccagacccggtcatatctgctgttgaaatttctagttaatgcatataagttagtagtatcgctgcattagtttatttccccagaggtaacgagattagaggaatattttggtcccagttgttgtaatataaaatcaatccatcctctaatatatctacaatcaatgatgaaacctgcc

SEQ ID NO: 18710 - DNA, 1960 bp, Oryza sativa
  ref <308>: DATABASE ACCESSION NUMBER: AK069095
  ref <309>: DATABASE ENTRY DATE: 2001-12-06
ttgcgctctctcggcatattctcttccacccccgaaaccactccaaaaccaaaccaaatctcgcggcgcatggcggcggcggcggtggcggcgaacggcggcggcgacggcgcgcaggcgtccaacgcgcccgcccccaccaggctcgcgtcggtctacagcgaggtgcagaccagccgcctcaagcacgcgctccccctcccctccgtcctccgctcccccttcgccctcgccgacggccccgccagctccgccgccggcaaccccggtgagatcgcgaagctgttccccaacctgttcggccagccgtccgtgtcgctggtgccgtcgccggagccggcgtccaccaggccgctcaaggtcggcgtcgtgctctccggcggtcaggcgcccggcggccacaatgtcatctgcggcatcttcgattacctgcaggaatatgcaaaaggatccgtcatgtatggattcaagggaggtccagctggagtcatgaagtgcaagtacgttgagctcactgcggattatgtgtacccctacagaaaccagggtggatttgatatgatctgcagtggtagggacaagattgaaacaccagagcagttcaagcaagctgaagacactgtaaacaaacttgatttggatgggcttgttgtcattggtggtgatgattcaaacacaaacgcatgccttcttgctgagtacttcagggggaagaacatgaaaactcgtgtcattggttgcccaaagactattgatggagatctgaaatgcaaggaggttccaacaagctttggttttgacactgcttgcaagatatactctgaaatgattggtaatgttatgactgatgcacgctcaaccgggaagtactaccactttgtgaggcttatgggacgtgctgcttctcacattacattggagtgtgctctgcaaacacatcctaatgttgcactcattggagaagaggttgctgcaaagaaggaaactcttaaaagtgtcaccgactacattaccgacattgtctgcaagcgtgcagaacttggttacaactatggtgtgatccttatccagagggtctgattgatttcatcccagaggttcaaaaactcattgcagaattgaatgaaattttggcgcatgatgttgttgatgaggcaggggcttggaaaagcaagcttcaaccagaatccaggcaactgtttgacttcctgcccaaaaccatccaggagcaacttttgcttgaaagagatcctcatggaaatgttcaggttgcaaaaattgaaacagagaaaatgcttattgccatggttgagactgaattggagaagagaaaagctgaggggaagtaccccgcacatttcagaggccaatctcacttctttggatatgaaggaagatgtggccttcctactatttttgattctaactattgctatgcgttaggctacggttctggggcacttctccaatgtgggaagacaggactgattacgtcggttggcaacctcgctgctcctgtggaagaatggaccgttggtggaactgcattgacatcgttgatggatgttgagaggaggcacggaaagtacaagccagtgatcaagaaggctatggtggaacttgacggggcaccgtttaagaagtttgcttcattgcgagatgagtggtccctcaagaaccattacatcagccctggtcccatccagttcagtggccctggaagcaacgatgcgaaccacaccttgatgttggaactcggcgccgaggcatagagagacacgacgataccgacgtgtaccttttaaattttttgttcttacagttttgaaaagttgagatggaacctcgcagagtgacctgcaggctccatatttgtggagtgctcaataagaggttccattgggagtttctgtggagtagagatatgtgtaccaataataactgatgttagctttgcatg

SEQ ID NO: 18711 - DNA, 1172 bp, Oryza sativa
  ref <308>: DATABASE ACCESSION NUMBER: AK069096
  ref <309>: DATABASE ENTRY DATE: 2001-12-06
gtcaagcgagcattgaagcatacatattcagatttgagcatctccgacaactgagtaatttgagcaaatgggaggtgcccacggtgtctgctatggcgttgtcggcaacaacctcccgtcgcggagcgaggtcgtgcagctgtacaagtcgaaaggcatcagcgcgatgcgcatctactacccggaccaggaagccctcgccgcgctccgcggcagcggcatcgccgtcatcgtcgacgtcggcgacaagggcgcggtggccaacctcgccaacaacccctccgccgccgccgactgggtccggaacaacgtccaggcctactggccgagcgtcttcatccggtacatcgccgtcggcaacgagctcggccccggcgacatggggaccatcctcccggccatgcagaacttgtacaacgcgctcgtgtccgccggcctctcgaacagcatcaaggtgtcgacggcggtgaagatggacgtgatcaccaactcgttccctccgtcgcacggcgtgttccgccccgaccttcagcggttcattgtgcccatcgcgcagttcctcgccaacaccatgtcgccgctgctcgtcaacgtgtacccctacttcgcctacagggacaacccgcgcgacatcccgctcaactacgccacgttccagccgggcaccacggtgagggacaacgacagcggcctcacctacaccaacctcttcagcgccatggtggacgccgtgtacgccgcgctggagaaggccggcgcgcccggcgtccgcgtcgtcgtgtcggagagcgggtggccgtcggcgggagggttcgcggcgaacgtggagaacgcgaggaatcacaaccagggcgtgatcgacaacgtcaagaacgggacgccgaagcggcccgggcagctggagacgtacgtgttcgccatgttcaacgagaaccagaagcccggggatgagaccgagaggcattttgggctcttcaatcctgacaagacgccggtctacccgattacgtttcctccgaactagcggctgaccatgtcaatgcgaataaggatttccttagacgaataatccatgcttaaataattaatgttggttgaatgttaatgtactctgtatggcacattgtgctttgaaaatgctacatgaataaaagttccaaatttatttcttt

SEQ ID NO: 18712 - DNA, 3192 bp, Oryza sativa
  ref <308>: DATABASE ACCESSION NUMBER: AK069097
  ref <309>: DATABASE ENTRY DATE: 2001-12-06
gctcgtggagccccaacccaactacgccgccgccacctcatccccccggcgagcgacacggtcgcatcccaccggagctccgaccgccgcagcggcggtcgcctcgccggagaagaagccgcgtgggggggagggcggaggagggggggggtgggggtgcaatggagacggaggtgttccccgtggttgacctccgcgtgctctcgcagtccgacctggaagcgctcgccgccgcctcagcccacgcggtggccccggggggcagctgccccgacgccgaccaactcccgccgctgaagatcgaccgcgccgtcttcaacgagagcgccggctcgcgcaagcagaccttctcccgcgtccgcttcggcgccgccgccgccgtcgccgcctccccttcctccccctccccctccgccgccgccaagctgcccaggggcaacgacaaggaggacagcttcatcgcctaccacctccgccgcctcttcgcgcccgacgacccctcctctccccaaatccaaaccctagctctacccgcgccgccgtctcccgaccccgaccagttgaccaccaactccaagggggtctccgttgatctggtgagcctctcacggcttgccgacccgtacgacgcggagctcgggaagcggactgcggggatgaccacggaggaggagctgatgggcttcatctctagcctcgcgggtcagtgggtgagccagaggatgcggaggaagttagttgatgcgtccttcttcggggatcacctccccagcgggtggaggctgcagcttgggatcaagcggaaggaccgcaaggcctgggtgaactgcttcagttatgtgagccccaagggacagagttttgctacttgccaagaggtttctgcatacctcatgtcccttcttgggtatccggagttcaaaacggataatattgagtatggtagcacacaacaacatggcttgtgtgctgacgatggtgttaatgttttaggtgttcaacaccaaattggtacaggtatggacagtcaaagtattttgccagttgcttctattaccttttctagtcattcaagagatcaagacgaaacagatgcagatgatataaattcttatgaatgtcaacaatgcaatttaacttttcatggtcagagtgcctatgcgcatcacctgatcacttttcacaaaatgggttctaaaaggcgtaagattaacaaggttggcaaatttggtgagccagtgataggcaaagatgggaaatttgaatgcccagtatgtaataagacgtttgaggaacagtcacggtactttggtcacgttggatcccatgcaaagtatcacgggctgactcctgaagcattcctacaaaccttgtcaggaaaggttggtaacgattcttttgcaggtttgtcatgtagccttcaagatttggtcggatcaccacaactgaatgagaagactactgctagtgaagcacgatcacagcatcacaattgttcaactaaacatggaggcaatagtacaagaggtatagacctttttaactcaaattgtccagctaacttcaatgggcataatcaaacttggtgtagacctgatgaaattcctcccaccacagatgctccaagcacatggacttatagaaataatgtgacgaactgtgctgatagaactgttccgagaacagcacctcagcccaatgatcacatggattgcagggttagtggctttgctgaagcaactaattttaacgatcaagcaggaagacaccaaggttttagaccttcctcctttggaactaccaaccattgtcaaggccagataattgatcatgcagtagctgcttccaagcatgctgaggttaataatagtatgaaatcaagagatgtcaacctcaattcacgcctgaacacaatatcctttcctattgcaactgcgaacaatgaaacatcgactgcccttaatgacgtgaatcggtcatgcattactggaaaaggttttagtggaagtttcagtaacaatgatggtgctgcatctatcgtgttgcccagttctggattaaacaataaaattcctagctccctcggtgtagctgacagatcatctattgctgcaagatctttcaatgctggttatgttaatgaaaatggtgcttctgaagctaacaatattggcaacaaaaacaataccatggtgtatcagacaagtttggccatgcgcccagtctctccttgtgatctgcaacttggatttagtggtcagaagcagcagatattgcctggttatggagaacttagaccagctgcgtctgggtcccctcagcttgggggcatggcagcaaacagttcaattcccaccagaccctctcagccgcagtttgggagtatggccagaaccgatgctttgcctactggaccctctcaaccagggagcttggccagacctaattttgtgcccacaggattttctcagtttgcaagcaggccacctacttctgtaccaccagccgattcctctcagtttgcagggggcatggccaggcaaaacattccgaccacgtctgaaccaactctagtattgggctatactcctcagatggtcaatggccctccagcccagctaggatgggatctatctttgtcaaggatggtcagtgaaggcatgctcccagtgttatgtatatggtgcaacagccaattccaccattttggccccattgatgcacagcaatctggttcgtttggtttcatttgcccagcttgcaaggagaagatgtcaggcaatcctaatgcgcccaataacggtccatggcaaccatgataactgttgtggctggtctacaatcatttctgttgctggatctttggtctaaggttagctgcggtgtgcctgcaccccagagttttagtagggtatctaggaacgatgtctgtattttgtggactctcttctgtacgtacttctgttgaaatgtgaagaaaaccccaagagaaaaacccactgaatgttgtacttttggcaggatggatctccagtaagattcaagggttgtacgcagccatcatccaaaaagagtttatgagatagattttgatgtagtattattgtttggcaacaaaggtacaagttgatcgcacgctgatcgcgtgatagacctggtactggtagaatccatacgacaacgatttggacg

SEQ ID NO: 18713 - DNA, 806 bp, Oryza sativa
  ref <308>: DATABASE ACCESSION NUMBER: AK069098
  ref <309>: DATABASE ENTRY DATE: 2001-12-06
gccccacacagagctcacaagcccaagtcgcgtcgcaccgaagcagagtagagaaggagaggagcggagcgccatcagcggtccgatcgagtgatccgatggctctcgctctctccacctctgctgctgctgccgctgccgccgcggcgcgggcgctcgcggcgagggtgacgacgacgaggggttacgccgcgtcggcggcgtcgtcggcgatgaggcgggcggcggcggcggtggaagggaagggcgctgcggggatgacgcaggcgaaggacgggtcgtcgtcgtcggcggcgagggaggtgtcgtgggtgcccgaccccgtgacgggccactaccggccctccaacttcgccggcggcgccgacgccgccgacctccgcgccgcccacctcgcccgcagctacgcccgcgcgtgatgcgcgcgacctcgccgtcgtccgaccgacgacgacgccatccatccatatatatctgctccgcgtcaactactcatcacctctcgaccgcgccgcgccgcacgccgctccgcctccgcgtgcacctgaacgacgacgacgacgcatcatcgccgggcggcggatcggccggcggcggcggcggcatccctaccgtttccttgctgcgtgtgggctggatgctctgctcgtgtgctggttcttcgtgcacctctcatgtaacagcgagcagggcctcactctactactactgtttttgttttttaactttcacggtttcaccacgtacccgagtgtgatggttttaatggaacaagtaataaatcagtttaatttcctttcaatttc

SEQ ID NO: 18714 - DNA, 857 bp, Oryza sativa
  ref <308>: DATABASE ACCESSION NUMBER: AK069099
  ref <309>: DATABASE ENTRY DATE: 2001-12-06
gtctctcccatggcgatctcccacctctcccgccgcctcctgagccccgccgccgagacggccaggcttctccctaagccgcatcccctcctcttcctccacccgcaccgccacttctccgctccctcgcaacccgatggcggcggcggccccgctccggtgtccccggagtcgatgaagcaccaggagatcgaggggcccacggtggagcgcgacacctcgccgctcgcggacgagacgcggagggagctcgacgcgctccgcgccgccgtgcagcggatcagcggctccctcgcgctcctcggcggggcgcacctcgccgcgggcgcgtggatcgcatcgggcgcggcgcccgtcggcgtggggtcggccgcggccgtgcagggggtggtggcgttcgcgttccccttcacggccgccctggtgctgcgccgcgccatcaagcccatcgccttcttccagaagatggaggccaacgggcggctgcaggtgctcacgctgtgcctccaggccacgaagaatgtgaacctcatgctgctccgaacgcgggtggtcgccatctcgtgcgctctcggggtgtctgtcgggtcagtagctacgatcttgatgcggtgaaactctctaggaaggatggttagtttcattgttcggataataaaagtgcactggtggtaggcatgagagtctgaactatgaaatttgggtgcttttggatgtcgatcattgctagagtaatttttttttgtgtatgcttacactatcaaggaaatcgtaatgttactgtctcgacttttacctgcaaatgtagagattactcttcctatgaccactatgttaatggaagtcaaagcaatgtt

SEQ ID NO: 18715 - DNA, 1597 bp, Oryza sativa
  ref <308>: DATABASE ACCESSION NUMBER: AK069100
  ref <309>: DATABASE ENTRY DATE: 2001-12-06
gccctgaccatccatccgttcctccgatcagttccaacttccaacctccgatcccaacgagaaaaccaatactgacacctctgcctcgcaacgcggcgcgcggccgtgctgcgatcgatcgaccggccggagtccggcatgcaaatgggagctgcctggcgcgggcggcggcggcggtgatgggcgcggcgagctctaggctggagaaggcgctgggcgagcagttccccgagggcgagcgctacttcggcctcgagaacttcggcaacacctgctactgcaacagcgtcctgcaggcactttacttttgtgttcctttccgtgagcaattactggagtactatgcaaataataaaagcaccggagatgtcgaagacaatatgttaacgtgcttagctgacctgttctctcagatcagcaaccagaagaagaaaacaggtgttatcgctcctaagcgtttcatacaacgactgaagaaacaaaatgagatttttcgcagctatatgcaccaggatgcacatgaatttctgaattttttgcttaatgagctagttgacatcctagagaaagaatctaaagttgttgcagaaccttgtgaaaattcctctttgaaaaagaattcaaacgggcctataaatgttcaactcaatggtactaaaaaagaaccagttcctactttggtccacaaatgcttccagggcatattgactaatgaaacaagatgtctaagatgtgagactgtgactgatagagatgaaacgttttttgacctaagtctggatattgaacagaatagttcaattaccagctgtcttaaaaacttcagctcgactgagactctgaatgctgaggataagttcttctgtgacaaatgctgcagtttgcaagaagcacagaaaagaatgaagataaagaaaccaccaaacattcttgtaattcatctcaagcgcttcaagtatattgaacagcttggtcgctacaaaaagctatcatatcgagttgttttccctctggagcttaaacttatcaatactgttgacaactcagacttggaatattccctttttgctgtgctagttcatgttggaagtggaccaaatcatggccactatatcagcttagtgaagagccacaaccactggttgttcttcgacgacgagaatgttgagatgactgatgagtccatggtacagacattctttggctcagcacaagagttcagtggtaacactgataacggctacatactcttctatgaaagccttgctgaaaaaagttgatgtctctctcacatttttcgatagttatacagttatcattttattaccacactgcctgcacctgataatatagaagattcagtaattagaataagttgaatgaaagaccattcaactttagatattatatggtggaatctgcggtaggcaataaaagaaaatgacgagttttgtggaaggtgctatagcggcataaatccacaggtttcttgttttctgtttatttttctgttctttggtttatgcgtacaggttgtaccaatcctgggataatgtttatttaaagtttaccatgtataaaaatatgcttgtactgg

SEQ ID NO: 18716 - DNA, 2606 bp, Oryza sativa
  ref <308>: DATABASE ACCESSION NUMBER: AK069101
  ref <309>: DATABASE ENTRY DATE: 2001-12-06
gtcggaggaaaaaaaaaaaagaaaacccacgaacaaccgctcgctctgcggcttctccccacgccgagcgccgacgcttccctccccttctgtcgacgcgtgatctcctcccccaccacgagccacttccctcgatccctcccgtcgaccgcgcgccgcctccgcctcggcgagaacccagccacgggcatgcagggagggaatcgctcctcctcgccgaccgtctcccatgcctccttccatcgcctatgcgcctcaccggtctctgccctccccttcgccgttgcagcacctcgccggcctccacccccggttgaaatcccgtttttttttttgttttccatcggttacctgcaaatttgagcctacattgttttattgaaacgtggtctgtggatttggttgtttcagccaacgtggtttatggattttcaagtgatctgtggatttagtgagttgcattgtaatatggtattgtagatcatgtattttaggactgacttttacattaaacatgccccatggtccatggatctgtgcatcgtaatatggcctttacttatctgaaaattgcttgtgaattttgcttctttatattcatcagaattttacttatctgaaaactacttgtgaattttactttattatttactaataatagcttatttgtatcctgaatcatttgaatagcttttagatataagggaagaaaaatggaggagctgttggcctgtgcttggctaacaaaattggtggagaggtatcatgtaaccaaatcaagcacataatcccttttcccttttaacatttatagtttctaatataaagtgttctaattggggtgagactgttgactggcttaccatcttggcccctcttagtacaagagaatatatcacatcgaagttttccttctggacttcatgaaggaattaatttttcacaagtatctttggcctaatcactaatcatcacactttgtgcgaagaagtcgagcatttctttgtcggtcatctcacaagtatcgttggcatggatgtcatgctggcctaccccctgaatggtgctgcttcagtatttggtggacttcaatttcagaatgatgtggtgctctaaattttttttccttttttttatctcaggtttgacctttggattgcatcttaggcttttgcatggtcttcgactggtaataatcttcagaatattcacatttcctgtgaccaatacatacctaaagtctagaatgtcactatactttggcatggtgcaaactttggcgagttctgaaataaatattcatgaatcatgagctaacctctggttaataagttttaacattaagatcattgatttactacatccaacattgatgttttaatttgttgggataaaaatacatgaattgctggttgatcaaaataaaagttattgcttagggagcaaccatagaatttgctccagggaatttttttttgtcctaatgacacattgattttcaaattctatcaatccttttgtgtgtgctgtgcaaatctaattcattggaaaagatgttagaaaaaggttttccgaaaatgattgataggttttgtgcaaatctaccccacaaattggatttgaaaggctggttgcttagttagatccaaaaatcaaacttttctatggccttgggccctaatagtcaaccttttttcagaaaccaaatcttcatttcgccggcacaaggattgctgcacctttacatttactaataacactcttattccatatagtccatgcaccgctgccaaccttgatccacatcaagcctccgcctccaaagctacaggagaagatggttgcatcaaactcctgccttctttctcttcaagtaacatcttatctgtgttttgatggaattttggaacatgcatggataattttggtccgtgttttgatgatttctctaatttctaagtattgaccatccagagaaaattcaggtcttctgttactcatagtaaatatcatgatgataataatagtttactcctaatggttctctttgttccgctagaaagaagtggacgattgtttgaggaagtaggggagagagtgaagcatgtgatttttcaggcaagtttgtcaaagccatttgaatgagaggctcaggatagctggtggtaaagcacagaacagcattggcgctgctaaggaggctgatctccgggcaacctaatgttcattcatttgcgacatcagatttgggctgcaactattgttgctctctatgcagcctggactcctcgaaatcttcgaccagcataacttaggtcgcgtcccatgaagcacgacaaagtatttcgtagggatgcaagcggagtgggcaagtcggcttttttatcccgcttgtgccacttctagtttattttttcttctaaattttatactatcatgtgaaaaatagactagcaagcgggtttttatgtgggtagcgggactacccacttgcatccctagtatttcgacccattcgactcgagttgttggtgaccctgacactactacacaaaaaattctctgtacgatgacccttataagttgtagatgaactataattgatc

SEQ ID NO: 18717 - DNA, 2776 bp, Oryza sativa
  ref <308>: DATABASE ACCESSION NUMBER: AK069102
  ref <309>: DATABASE ENTRY DATE: 2001-12-06
gaacctcctcctcgccttcccacctgtccacctccccccctccgccgccgccgccgccttcttcccgggggcggggcggggagaggaggcgcgggggtgcgggggtttagtatctcctctcgccggtggccgcgcggggaggtgacggcctgagattctcgccgcgtccgcccgtcgttctggtggtctcctcctccgccgccgccgccgcccgcgtgttgggggagagcggtttggcgtgaatcgggccggggtgagcggacgccgccgccgttggtggctgcttcatggagtgcttcctgctcagcctgaacccgttccggttcaagccgatttggccgccgaggaccgcgcccaaatctccctgaaaccctagggtttcccctcctccctgcccggggatttcgagaaaaaggaagtcccgggcggcgcttccccccaacccctcgttttttttttgggttcatctcgtgtgttccgtgaaattctcgtcttctcggaggtttctgaggggagggagaggctgggctgaccggctcaaggtgttgtgaaaggacatgagcttgctgcgagaggctccttgtctcgtttagtttgagttcgggctgggcgtcccttcttctataggtgacggtggtggtggtgctgctgctgcgagggatggcgaaggaggaggacggcggcggcggcccggagttcgtgaggtggagggaggacttcgtgtcgcaggagaggggcagccgcgtcgtgcattactacctcgaggacgccgcgggcgcgtcgcacctcgccgtcgtcggcacggagcggagcctgcgccacatgctctatgtggtctcggaggatttccgggaggcgcagggtgccgatggcggcgggccgggggtgtttgcgcgcaagtggcggtcacgccgtgaggtggtggattggctcgcctccttccttccggcgaagtccctcgcctcgaaactttcaaaatttggatcacatatgggtaatgacattggattggatggatacagtgaacctgatagctttatgggtcacaatctggggaaagcctgtagctcggacattatgtggtctggttcgtcctggacttgtggcaagcagctttaccactataaagctttttgtcgtaatggtaccacaatatctacccactcttttgtgcttgtcatgtctgaggaggaaagtcgctatcttgcatacttggaagatatgtacgaagataagaaggggcagaagaaggttaaagtgcgatggtttcatcaaaaccaggaatttgcttgcgctatacctcctccccctcctcatccttgcgaagttttcatcactccttattctcaagtaatcagtgtggagtgtgtcgatgatattgcaactgtgttaactcctgagcactatgaaaaatgcgtcaatacattgccaaattcttctatgagcaagaaaaggatgatggttctgatatcataaaaacttttgagcaatggacacctgggaagacaaagtttcctaagcagtttgagaggctttactcaaaatgtttgggaactaaaatctgccgaggcccacaagaagactccatagcatcttatcagaaaccaagcagtaagcaatctcccagaaaacatctctcagtcaagttcatagggccccagaatcagcgtatgccaacctacaatgttggtgacagaatagaggtcttgtctcaggacagtgggattgtaggctgctggttcaggtgtacagttctcaagtcatgtactaatcataacaaattgaaggttcagtatgatgatctccagaatgctgatgatagtgggagattggaggagtgggtacctgtatctacattggctcgtcctgataaactgggattgagatgcccagagcgacgcagagttaggccacgccctcaacaaaatagtttggctgacggaactaatcttttacctggagctgctgttgatgtatggcaatttagtggctggtgggaaggagttctagtcagtgcagacaacatttcagctgatagcctacaaatatattttccaggcgagaacttctttagtgtatgccagctaaagaatttaagaatttcgaaagattgggtcaagagccactgggttgatatagaaatgaaaccagatgtgttatcgaaaataccttcggttggtgttcaaacaaggcaacctgataatctgacatctgttgagaggccggactccagaaattctgcaatgtctgaccaagagcttgcagccatacaaacaaactctagtgaagataaacaaacaggagctgatcagccagcagaagttagtttgactgatatggcctctgcttttgcagaggaccagaaacaaacagttctaggaaagcgacctagggatgatgatgctgtacaacattgcaatggggaagtaggcatagatgttggcaaattgtgaagtttgggaagcgcaacctcattagacgtatgtacatagctatagatatggtaattggaccccagcagaggggttttttactaggttgctgatatcagtgagcatcgacatcttttttcatacacgtgttcccttgttttactgttagcttcccactttcaggctttctgtcaccagatacagaggttgcaaactaaatattacccttaccagtcatattgtatagcagtctgattgatcattgcttctcttatgttttcctccggagtctggactatagtttcagtttattctcaattgttaatatagtttaagttcatacg

SEQ ID NO: 18718 - DNA, 1134 bp, Oryza sativa
  ref <308>: DATABASE ACCESSION NUMBER: AK069103
  ref <309>: DATABASE ENTRY DATE: 2001-12-06
gatattctcgtcatcattggaggctttagcaagcaagaagagaggcagtggtggtggtggtggaggaggagctagctagcctgtgcttgctgatcggtgctgagctgaggaatcgttcgatcgatcgggcgagatggggaggggaagagttgagctgaagcgcatcgagaacaagatcaacaggcaggtcaccttctccaagcgccgcaacggcctcctcaagaaggcctacgagctgtccgttctctgcgacgccgaggtcgcgctcatcatcttctccagccgcggcaagctctacgagttcggcagcgccggcataacaaagactttagaaaggtaccaacattgttgctacaatgctcaagattccaacaatgcactttctgaaacccagagttggtaccatgaaatgtcaaagttgaaagcaaaatttgaagctttgcagcgcactcaaaggcacttgcttggggaggatcttggaccactcagcgtcaaagaattgcagcagctggagaaacagcttgaatgtgcactatcacaggcgagacagagaaagacgcaactgatgatggaacaagtggaggaacttcgcagaaaggagcgtcagctgggtgaaattaataggcaactcaagcacaagctcgaggttgaaggttccaccagcaactacagagccatgcagcaagcctcctgggctcagggcgccgtggtggagaatggcgccgcatacgtgcagccgccgccacactccgcggccatggactctgaacccaccttgcaaattgggtatcctcatcaatttgtgcctgctgaagcaaacactattcagaggagcactgcccctgcaggtgcagagaacaacttcatgctgggatgggttctttgagctaagcagccatcgatcagctgtcagaagttggagctaataataaaagggatgtggagtgggctacatgtatctcggatctctctgcgagccacctaatggtcttgcgtggccctttaatctgtatgtttttgtgtgtaagctactgctagctgtttgcaccttctgcgtccgtggttgtgtttccgtgctacctttttatgttttgatttggatcttgtttgaaaataatcttaccagctttgggt

SEQ ID NO: 18719 - DNA, 2787 bp, Oryza sativa
  ref <308>: DATABASE ACCESSION NUMBER: AK069104
  ref <309>: DATABASE ENTRY DATE: 2001-12-06
gattactccgccacacccaagccacggtacggcctcctccgccgcggcgatctccatggcctcgcaaaccctagccaccggcggcggcggcggcggtggaggcggcgcggcattcttctgagaggctccgatccgggggcggagggtggtggtggggggtttcgtcgatgaacccgctctgctgcatcgcgccggtctcgctcgacagcgccgtcgagcaccaccaccagccgccgcgcatcctcgcggcggcggccgcggcgccgacgtcgcccactccgccagcggcggcggtggctgcgcaggtggtgctggatgcggcgcaggcggcggttgcgggggtgctgcacaagtgggtgaactacgggaaggggtggcggctgaggtggttcgtgctcgagggcggggtgctgtcctactacaagctccgggttggagggggcggtgattccgcggcgtcgccggcggtggcggcgagggtgatcggggagggtggcgcgctgcggcgggcgcgggaggaggccgcggcggcggggaagcagtggaagccgttcggggagatacacctcaaggtttcgtcaatccgtgcaagcaagtcggatgataagaggttgtatatattcagtggaacaaagacgttacacttgaggtgtgaaactgaggaagataggaatgcctggatacaggctctgcaagcggcaaaggatcgcttcccacgttcactaacgagcaatgattttagtcccatgtctgatgttttgttgtccacggagaagctgagggtgcggctgctgcaggaggggctgaatgaaacagtggtcaaggaatgtgagtctattatgatgactgagcttttggaactgcacaaccagatgaagtcacagcagcagcagtattctattttgatagatcggctccgacaactagagacagagaaagttgagctggagagaactgttgtgcatgaaactaaggagagggaagcacatggatatgctaatggcagatatagtgatttttattcagttttatcaggaggaagtgcaagcgagtctgatccagatactgcaagtcaagtggcagatgttgaaactgatgaagatgaagtgatgtactttgatacaagagacttcttgtctgcagagtctcttcgaagtgcttcatgtcgaaggagagaacttttgacaaatggttgcaatggattagaacatacagaccctgctgcaaatgtcgtcaaaactactcagtatccctctgttaaacgtcgagataagttacctgagccaaaagaaaaagaaaacccagtagggttgtggtcaataattaaagaaaatattggaaaagatctctcgggtgtttgtctgcctgtttatttcaatgagccactgtcttctttgcaaaaatgttttgaagatctcgagtactcttacttggttgaccatgcactacagtggggaaaacagggcgatagcttgatgaggacacttcatgttgcggcatttgcagtatcaggctatgcttcaactgaaggtcggcaatgcaaaccgttcaatcctttactgggtgaaacatatgaagctgattatccagataaaggacttcgatttttctctgaaaaggtcagtcatcacccaatggttgttgcatgtcactgtgaaggaagaggttggaagttttggggggattcaaatctgaaagggaagttctggggtcgatcaattcaacttgatcctattggtgttctaactctccagtttgatgatggggaaacgtttcaatggagtaaagtaactacttccatatacaatatcataataggcaaaatttattgtgaccactatggtacaatgcgcatcaaaggaagtggcgactactcttgcaagcttaaattcaaagagcagtcaataattgatcgaaacccacaccaggtgcatggatttgtgcaagataatagaacagggcagaaagttgctatgttaatcggaaaatgggatgaagctatgtattatgttcttggggatccaagtgcaaaacccaaggggtatgacccaatgtcagaagcagttcttttgtgggagagagacaagtctctgaaccaaacacgatacaacctttccccttttgcaatttcactaaatgaattgacagctaacctggcgaagaagttgcctcctactgattctcgtctgaggcctgatcaaaggcatcttgaaaatggtgaatatgagatggctaatgcagagaaacttaggcttgaacaactgcagcgacaggcccgaaggttacaagagaaaggatggcaacccaggtggtttagcaaggatgacgacgacagctaccgctacattggcggttactgggaagcaagggagaaggggaactgggatgggattccagacatcttcggtcagcgcagcgcttcacctgggtggtcatagcttacctaccccctctccctgtgtagtgtaatcccacatttctttacagaaaaaaagtatgttaccttctatatatacatatattgaagcaatgtccatatgtgtgccgatgtactggattcagagagccgagatgtactggtaaaaacacggcaagattacgttagtaggaattcggaccccaagtaggttagattaatccaaagtttgagtataattttattgtcggccagaagatgtcctggttctgaggctactcttgtacatttaaattttctcaactcacgagtacttgagagctgtttcctgctagaacctcaagtacaaggcaatatattagttgtttcct

SEQ ID NO: 18720 - DNA, 1182 bp, Oryza sativa
  ref <308>: DATABASE ACCESSION NUMBER: AK069105
  ref <309>: DATABASE ENTRY DATE: 2001-12-06
ggtcccctacacacctacccgaggaagaggaggaggtggggtggccatggcggcggcggagaagacgaagcccgttctttacagcgagtggatgagctcgtgctcctacagggtccggatcgccctcaacctcaaaggtattgattatgagtacagggcagtgacacggggtgatccagattatgggaagatcaatccaattaagtatgtgccagcattagtagatggggatttcactatttctgattctctagcaatcatattgtatcttgaagacaaatatccccagcatcctcttttacctcaagatctaaaaaagaaagctcttaacatgcagattgcaaatatcgtgtgttcaagcatccaacctcttcaatgctatgctgtaattggtttagctgatggcaaaatgagcgccaacgagagccttcagatagttcagcattacactgacaagggatttagagcaattgaaaaacttctggaaggatgtcgcagtaaatatgctactggagatgaagtccaattggcggatgtgtttctagcgccccagattcacgcaggaataacacgtttccaaattgatatgtcaaaatatccaattctgacgagattttacaaggcctatatggaacttccagcatttcaagctgctgtccctgaaaaccaaccagatgcaccttcatcctgataattgaagggtgctgctccatcaagatgcctgcgtggaagtctgcatttctgcaagtctccatgaagtatacccacgacatcatgcatttcaagctgcacatcctcaaaaccaaccagatgcacctctatcccaataatcaggattccaagcgagccgtatacattgatattcatgtaacttttacttaaaaaattggatgagtagtctccagtgccatacatgtaatttcagtgtaaaatgttcagtgtaaacaagatagtgggacatgaattacctgtgacccacaacattatccatccagtactccagtacctagggatatggtattgttgtatatgtaattgatgatgcactgtctgaacttcagatgcagtatgtgattagtccactgatgatgcacatacgtatgcactgacgtaagcagaattgaatgttggtacacatgtaaacacctcaactattactgaataaactctcatactggcccg

SEQ ID NO: 18721 - DNA, 938 bp, Oryza sativa
  ref <308>: DATABASE ACCESSION NUMBER: AK069106
  ref <309>: DATABASE ENTRY DATE: 2001-12-06
gcttttccaacgacttcttcttcttcctgctctaccttcttggcttttgcctctgttcctcttccaagatttgcgagatggtggcggtgacgccgggcaggcgccgccggcctgcaggatgcgccgcggggcaccaccaccagcaccagcagcagaggctgctggccgtcgccgcccgcctcgccgcggcgaagccggcggccactacggaggccgccgtgtacggtggcgtaggaggaggaggatgctgcctcgagttcctcgactgcgtgctccgggcgatgggcgtcgccaccccggccgagatcatgccccccgcggacttcaggtgggccgcgcgcccgatgcggcggcgccgccgcgggggctcctcgtcctcctcctcctcgccgcgcgaccgcgagccgagggacggccggatcgccgccaacggcgcctccgctgccgcctcgctctacacgatgcggggcaacaagggcgtcaaccaggacgccatgcttgtctgggagaatttctgttcaaaggaagatacaattttttgtggtgtttttgatggccatggaccatatggccatttggtgtccaagagggtcagagatctcctccctataaagttgagtgcaaatttaggaagagatggacacaaagaaacttcaactaacattgtcacaagcagcatgactgaaggtggtggcaccgaacgcatggatagagatactgaaactcccctgggaacggaggagaatggagactaccccgagatgtttgctgcattaagaacttcattattaagggcattttatgtaatggacagggatcttaagtttcataaaaccattgactctgtgttcagtggtactacagcagtcacagtgatcaagcagggacatgatctcctgattggaaacttgggggattctagagctgtcttgggaact

SEQ ID NO: 18722 - DNA, 1151 bp, Oryza sativa
  ref <308>: DATABASE ACCESSION NUMBER: AK069107
  ref <309>: DATABASE ENTRY DATE: 2001-12-06
gtgggtttctggagttcgacgaccgccgccgccgtcacgctggttcccatcgccgaaggagagaggatggaggagagccgcgcggacgggcggaacccgaaccagctccgccccttctcctgcacacgcaaccctctcgaccgcgcccatggctccgcgcggtgggctcagggggacaccatcgtgctcgccgccgtgtacgggccaaagccgggaaccaggaagggggagaatcccgagaaggcatccattgaggtcgtctggaagcccatgaccggccagattgggaagcaagagaaggagtatgagatgacgctcaagaggacattgcagagcatttgcctgctcactgttcatccaaacaccaccacctctgtcattcttcaggttgtgggcaatgatggttctcttcttccatgtgcaattaatgcttgctgcgcagcccttgtttttgctggcatccccttgaaacatcttgcagttgcaattggttgtggagtactggaggatggtgaagtgattttggacacaaacaaagcagaagagcagcaattgaaatcatttgctcatttggtgttccccaattcacgcaagtctgctagttcaaaagaaccaaaccagaaagaggaggattctgagagaggattgataacttccattacccatggagtgatgtccgaggaagattatttcagctgcatagagaggggccttgctgcatcgtcacggatctcggattttatgaggacaacattgcagaagcaggcacctggagatgtctgagaggaggcaatcatgcgatagaaaacgcctcaacattgcagaagcacaaggttgtagcagctcatgttttgaatatgaaacgcgtggggactcttggtgcattattgatgtttgaaattggctcatagatgtgcatggatggtggagcgatccggcaggaaatatgtagcgccttgttcgcattttttgtgaatgttgagctgctttggtagtgactagtgagttcgtttgtagtactagtagcgagggaactgtcgtttgtttagatgagcaaggaagaaatgcctttttgtaactcaggaagaagtcaaagcagttgtgtaacaaaccactttgccatgttgctgcacatttttggtcgccctgct

SEQ ID NO: 18723 - DNA, 1883 bp, Oryza sativa
  ref <308>: DATABASE ACCESSION NUMBER: AK069108
  ref <309>: DATABASE ENTRY DATE: 2001-12-06
gtacctctacatctctctcctccaatcccctcctctctctctatctctcttcccggcctgtgcagagacggaggcaggataggccggcgagcaaaggtactaaagatcatatctcttcaaactggttaggaagcttacttaatgaagacacaattggattgattttagtggccaaacccaagccaacatacagactgtgcgcatatggctactcgcattcctggtactgtagcagctagcggggtgtactacaatgatcaatacagaatgccatgtaagctgaaaggaattcattgcatggcattgaattgtataccgcaaaaagcgaaggtaaggaagtgcatgaatggatatcaatcaacattcaggttttgtgtaaatgagaaaaatggacaaaccaccgggcagtcaaatggttccttgatccaacaaggccagaatttccggtgtcattcttatggttctcataacagcagtgaaactaaagagtgcagccttgaagatggcactgattcatacagggattttgaagaacattcaagaggagcctcccaattttcagataatcaagttgcagcaaagaaaaaatcagtcaaatctagtcaagggttggctgaagcttgcaaatttgtttacaacgatgcaaaatttgtgaatgaaagagctcaaaatgatattctcttgctttcacgtggcataacaaggctgaacaaacgtgcgtgccaggatgttgctgttttagggtcaggatttctcaagcttgatgctcgtgcaaggaaggacactaaaaaaattgaccacagtgtgaaggaaagggcagcgcggcttacccattttgcgagaatattaaaggaacaggctcagtcagacttgaagaaagcagcagatcagcattggagcgatggtgctttggaggcagatctgcgacgagctgactcggttgttagacgacgtgccatggaagatgctttcatggctttaaagtttgttcgggatatccatgacatgatggcaaacagattacaagagcaattcgcaaaggatggttcctcttctcctgctaattcaagaagtttcatcacccttgagaaaaatggaaataccttcgagctgtttcctcatgaagtttcaacggaccagattaccgccatagagcaagcatactggagtatggcatctgcgttgtctgaggctgatggtatcgactacacagatcctgaggagcttgagttgttagtagcaactctcattgacctggacgccatggatgggaaaaagagtgtttccttacttgctgaatgttcaagctctccagatgttaataccaggaaagctttagctaatgcactggctgcagctccatccatgtggattcttggaaatgctgggatgggtgcattacagagattggctcaagattccaattatgctgtagccagggctgcaacaagagccatcaatgaactcacaaagcaatgggagcttgaagaaggtgacagcctgaggtttgtactgaatcaaaatatggtttctaaagagacagccgatgacagtgcagcagcagatgacaccaggtgatcatgtgcaaataagaaggaaaaaattacactaggattaacagaaacttatacaaacatcacgtttcagagcatatatatggataaggtgaatgtctatctctgtcacagtttcagagcataatgtgctgcttggtatcaaaccagatcaccagaatcatcagaatgacagaatgcatgtaactgacacatcttttcagtgccaaactgccaaagaaattaggaacaggtgtaaagataaatgtattccttcagtaagacatagtcaatagtgttagaataattgggctaggcccaacttatccc

SEQ ID NO: 18724 - DNA, 1474 bp, Oryza sativa
  ref <308>: DATABASE ACCESSION NUMBER: AK069109
  ref <309>: DATABASE ENTRY DATE: 2001-12-06
gggaaacacactcagtatccgtctcgctctcctgcctcgccgccggcgatcgatcgccggggagagggtctctcccccaaatgccgcgccgccgcctccctctactcctcctcctccccattaccctcaccctcttcctcctcttcccctctccccctcccccgcggccgccgccgcatcagcctcagcctcagccgctcccctgcggcgccgccccctccgacgccaccgccggccgctgggtccccacccgggagcccttgccgccgccgctctacacctcctcctgccccttccaccgcaacgcctggaactgcccccgcaacagccgcccacccgtcgccgcgctctcctgggcgcccgcccgctgcggcggcggcgccgtcccgaggatcgacgccgcggagttcctggccgtggcccgggggcggcggatcgggctcgtgggggactcgctgtcggagaacctggtcgtggcgctgctgtgcgcgctccggtcggcggacggcggcgcgagcaagtggaagcggcggggcgcgtggcgcggcggctacttccccagggatgacgtcatcgtcgcgtaccaccgcgcagttctcctcgccaagtacacgtggcagcctgtagagaattccaaagagcttcacaaggatggaataaagggaacttacagagtggatgttgacattcctgctgatgaatgggtaaatgtcaccaggttctatgatgtgctcattttcaacactggacattggtggggcctggataaattcccaaaagagaccccccttgttttctaccgaggagggaaaccaattgagccgccacttggcatctacgatggattgaaagtagtcctcaaaagtatggcctcttacattgaaagggaggtcccaagtaaaacactgaaactgtggcgctcacagtcacccaggcacttctatggaggtgaatgggatcacaatggcagctgcgtgtctgatcggcttctacaagaacacgagctcgacttgtggttcgatcccaggtttggaggagtgaacaaagaagcaaggctagtgaattcggcgattcaggaggccctgattggcacagacatccagctgctcaacctgacctacatgagcgagttccgtgccgatgcgcatccggcaatctggctcggaaagaaggacgcggtggctgtatgggggcaggactgcatgcattggtgccttcctggcgtgccggacacttgggtcgacatcttggctgcacggatcttgcatcacttcaagcaggcaaatggttgatgacatgctgaagcttggaccattgtggcaactgcactgtaaatgttgtgtgggaacaaacacgatgaatggcatgctgtatttagaacaggagcattaaaaagctaggtagctactcttgttgcctgtaattcttttcttcttatggaaaaccaagataggagatggtggagttaactgtt

SEQ ID NO: 18725 - DNA, 886 bp, Oryza sativa
  ref <308>: DATABASE ACCESSION NUMBER: AK069110
  ref <309>: DATABASE ENTRY DATE: 2001-12-06
gattaggcccggaggagcgcctatctgaagtccaacacccgtccaggcaccggctctccgccgctcgaagcttctctcttctcaccggaatctcgagagcacagcgccgccccgacgacgagatccctcaccggcgccgccgccgccgcggccaggaggccgaggggccatgacgaccatccgccggttctgctgcgacgacctcctccgcttctcctccgtcaacctcgaccacctcaccgagaccttcaacatgtccttctacatgacgtacatggctcgctggcccgactacttccacgccgccgtcagccccggggaccgcgtcatgggatacatcatgggtaaggttgaaggacaaggtgaatcttggcatggacatgttacagcagtgtctgttgccacagaatttcggaggcagaagctagccaaaaaacttatgaaccttttggaggaaatcagtgacaagatggataaggcctactttgtggatctcttcgtaagagcatctaacatgccagcaataaggatgtatgaaaagcttggctatgtggtttatcgaagggtgctccgctattactcaggggaagaagatggccttgatatgaggaaagctttgtcacaagacgttgaaaagaagtccatcataccactgaagagaccaataacaccggatgaacttgaatatgattgaagttaacttctagttacttccagtgttttgtttgctgttaacttctatggtgatttgccaagtgtcttttgtctccagtagtatcatctagtgatcgtgctgttttcttttctgcatcctgataagattcaacataactctgaaggtgattctatcgttttggaatggaatgcagcacttagtaagtagtct

SEQ ID NO: 18726 - DNA, 1534 bp, Oryza sativa
  ref <308>: DATABASE ACCESSION NUMBER: AK069111
  ref <309>: DATABASE ENTRY DATE: 2001-12-06
ggtcgacctcctcccgctgctcccgttgcggcggtcgccgtcgccgccgacgatgacgagcttggaggcggccgcacgcccgagcagccgccgcgtggcaccgtgcgacccgcggggacgccctcggcttccgccatggcggctcatcctttccccctccccttcctcccgcaggctttgcactctaatttctagacaacttcccatttgcaatgcacaatcatatacggataatctgtggttagccagtggtaatgctcaaagctccgctgctgttcggtcaaggttgcttgctgcagaaagagaggaagcaaaagctgtgctatcactatttttaagacagaaaggtttgagaagtatactggctgcacgaattgccaataaggcagatggtttcattgaacacctagtttcaaagctccacattacttacagatcacgatatgctgaaggaagggagctcagcacaccggagattagagatgctttgattccatatctggaagccctttctaaagaacatggatcatgaagagatcaagaatgtcgtgcggaaattcccagcatttgcatattacaatgtggatcgcaaaataaaacctctggtggcgctgctacttgagcttggtgtgccaaggtcaaacataccaggaatcatcaagaagagacctcagctatgtggaatcagcctgtcagataatctgaaacctatgatgacctatttggaaaacgtgggtatcaacaaagataagtggagcaaggtgctttcccggttccctgcacttctcacatatagcaggcagaaggtggagacaaccgtgagctttctcactgaactaggagttcctaaggaaaacattggcaagattctgacgcgatgtcctcatatcatgagctacagtgtcaatgacaatctcaggccaactgctgaatacttccagtcaatcggtgcggatgctgcgtctcttattcagaaaagcccacaggcttttggtctgaacattgaggcaaagctaaaaccgatcacagaatttttcctggagagagacttcaccatggaggaaatcggcactatggcgaatagatttgggattattcacactctcagcatggaagataatctgcttcccaaatatgaatatttcctgacaatgggatacccaaggaacgagctagtgaaatttccacaatacttcgggtacagtttagaacagcggataaagcctcggtatgctcggatgattgattgcggagtgaggttgattttgaaccagctgttgtcagtttcagatagcagatttgaagatattctacggaagaggatggatggaatatgagatggtcataatttcggataaccatggtttaggacaatctcatttgtaacaagacttgatcgctgccctggtatatagtttatcagaacaagtagtgtcctggaaatttgtacttagccatgcttggcagctgaccaattgttattgacagtttgatgtataacttggcggtttatgatgctagtttagctattttt

SEQ ID NO: 18727 - DNA, 2009 bp, Oryza sativa
  ref <308>: DATABASE ACCESSION NUMBER: AK069112
  ref <309>: DATABASE ENTRY DATE: 2001-12-06
gctttggccgcgtgcgttcaacctctaccgcgtttgctcgctctcctctcagatcccagcaaccattcgccacttcaagctttgcctcctcctccatctctgattggcttcccatgccaccgccgccctttcttgttgcttttccttgatcgatctggtgcctaatggcgctgcctttgcttcgcctgctgctgctgcttgtgctatcatcggttcctctctcttgccagctcgcccactctactgctgcagacacacagaattggggacagacctctgttgttcatcttagaaatgcacatactagaaaattacttggcctattggacgatatcagtggtagaactggaagcctacatgctcttcttctcgaggagtcacctaaacaagctcctcctcatcatcacaataggcacggggggcatcacagagcagcacatacaccagcaccatcgcctgcaccatccccttctccattcactgctccacctaaatcagcctcacctgctgccataacaatccccatatctccttcaaccccacagccaaaggcagagagtaatcctgctgttgaagatgctccggctcaacctaggcattcctggagaaactacggtttggtcacagcaggaagtgcagttttccttgtcatgacaatagcatctgttatttactgtcgagctaagaaagtcggaactgtcagaccttgggccacggggttaagcgggcaattgcaacgagcatttgtcacaggtgtaccttcattgaaacggtctgagctggaagcagcatgtgaggatttcagcaatataattggttctacatctagttgcatgttgtacaagggaactttatcaagtggagttgaaatagcagttttgacaagttcaacagaatccgggaaggaatggtcaaaagaatgcgagtcacagtacagaaaaaagatcacaaatttatccaaagttagccataagaactttatgaatctgctcggctattgtgaagaagagaatctttttaccagagctatggtgtttgagtatgctccaaacgggacactttttgagtatctccatgtcagggaagctgagaacttggactggatggcacgggttaggatatcgatgggaatagcttactgtctagagcacatgcatcagctgaacccacctgttgtgccaaggaacttcaactcgacaactatatacctgactgatgatttcgctgcaaaggtttcagatcttgatttctggaacgacagtaagggatccttcaattctgctacttctgatgaaaccgtcatggtggagatagatagcatggtgcatcaatatggcataatactgctggagatattgaccggaagagttccctactctgagtcagatgggccactggagcattgggcatctggttactttgaaggcaagatgactcttgcagagctgattgacccaagcctgggatcattccctgaagacgctgcgcgtgcattgtgcgatgtggcgaggtggtgcattgagccagagccgagcaagaggccgctcatgtcacaggttgcaggtcggatgaaggagatcacctccctggggcctgagggagcgactccaaaggtgtcgccgctatggtgggcggagctggagatcatgtctggccaagctacctagctatgctgatgtcaacaccaccagcaacagcaattgattccccaatgtgatatagtagcaaattctttcatttcttttcttgtttgttaatcatcaagactactcaagagtttggtggttgtggttatagttatatatgtatacatacaaggtgttttgagcattgtaacttgtaagcatgcaaacgtgtgaaggaaggaaggaaggatgtatcatgttgagtttgttggcaacatgtggcaagtagcatgcatgatagcactgaataatccagctaaggccatggcaacaaaactagtgatgagaatactctgactttgaatgagaaaatacttctgtgcc

SEQ ID NO: 18728 - DNA, 924 bp, Oryza sativa
  ref <308>: DATABASE ACCESSION NUMBER: AK069113
  ref <309>: DATABASE ENTRY DATE: 2001-12-06
ggacatcgacggatcatccaatcatccaatcgctgagctgagccaactgtattagtgttcgtccatctgtgacagttagcaacagaagtagtgttgctgccatggccggagcagcgctgctgttcccggctaccgtcatcgccgccgcctgcgtcgtcctctccggcggggcgtcggcggcgccgccggggcgcgtgttcgtcgtcggcggcgacgggccgaggggttggagccagccgacgggcaccgacgagacgtacaaccactgggcctcccggaaccgcttccacatcggcgatttcctcgatttcaagtacgccaagaacgactcggtggtggtggtgtcgcgcgccgactacaagctctgcagcgccgacaagccggtgcagcggttcgacgacggcgccgacgtcaggttccgcctcgacaggaacggcaacttctacttcatcagcggcgcgccgggccactgcaaggccggccagaggatgacggtccgcgtcatggcggaccacgccgccaagggcgccggcggcggcgactccccggccggtgcgccgtcgcccgacggcgacggcgacgacgaggacgacagcggcgggtcgtaccgcacgccggggtacggttactcgtcggggtcgccgccgacgccgccgcacgggaataccagcgccgccgccgtcgtctcgccgtcgcgtggtggtggtggtggcggcggctaccaccgcgtcgccggggttgccgccgccgcgctgctcgtcttggcttgagatgctgccacgtggctacgtctgccgcttaattagctagactcagtgatgtagtttgtcgtgtgcttcttaatttaaacctatcatattagctagactggtgatgtaatttgttggctgttagaaatgttaaacctgctacttagttttcgtt

SEQ ID NO: 18729 - DNA, 1573 bp, Oryza sativa
  ref <308>: DATABASE ACCESSION NUMBER: AK069114
  ref <309>: DATABASE ENTRY DATE: 2001-12-06
gagtcgtctccttcgtcctccacttccccctcccacccaaagacgcgcagccaaatccgacgcgtgcggcggtgcgacgccggccggggtgggggacgccatgagccgcacgctcctctcccacatcctccaccgcccgccgccgctcctcgcgtcgaggggtggtgggcgaggaggagcgctcccgtcccgcctccgcactctccgactcaactgcagcgtggctgaagcgactgcctccggcgacgaggcgcctgctcctccggctaggaagaaaagagtagtttctggtgtacagccaacaggattggtacaccttggaaattatcttggtgctattaagaattgggtttcacttcaggatctatacgagacattatttttcattgtggacttgcatgcgattacgttaccatatgaagcaccacagttgtcaaaagcaacaagaagcactgctgcaatatatctggcttgtggcattgacagttcaaaggcttctatatttgtacagtctcatgtccgtgctcatgttgagttgatgtggcttctgagttcttctactcctattggttggctcaacagaatgatccaattcaaagagaagtcacgcaaggcgggtgatgaaaatgttggagtggcacttttgacttatcctgttttaatggcttctgacattctcctgtaccagtccgatctggtgcctgttggtgaagatcagacacaacatttggaattaactcgcgaaatcgctgagcgtgtaaataatctatacggtggaaggaaatggaagaaaatgggagggagaggtggttcactatttaaggttcctgaagcccttatacctccagcaggggctcgtgttatgtccttaaccgacggtctctccaagatgtcgaagtctgctccttcagatcagtctcgtattaaccttcttgatccaaaagatgttatcatgaataagattaagcgctgcaaaactgactcgttcccaggcttggaatttgacaacccagagaggcctgaatgcaacaatcttctctcgatctaccagattattacagggaaaactaaagaggaagttatcagagaatgcgaaaatatgaactgggggtcgttcaaaacaactcttacagatgcattgattgatcatctgcaacctatccaggcccgctacgaggagataatgtctgatcctggttatttggatggtgttctcttagaaggatcaggaaaagctgctgagatagcagacatcaccctcaacaacgtataccaagccatgggtttcttgcgcagatagcatgcgcttcaaccatccggaacatttcaaagattttttacgaggtcaaaaagttttgttcggtctgtgttactttgttccccttaccattggccttaagattgtttttatgcacatattggccttactagatttacaagagctccattctccaaattttataggaatatcaatcgttttgcttgatgttacgtagtagcctctttgtttctggctctacaaaaacctgtatggtccattaaatttctcatcttaatgacactgatttctttg

SEQ ID NO: 18730 - DNA, 2846 bp, Oryza sativa
  ref <308>: DATABASE ACCESSION NUMBER: AK069115
  ref <309>: DATABASE ENTRY DATE: 2001-12-06
gaatcagaaatttcacccaagtccttcgcgggtatcaggcggcggcggcgccgccgctgggccatagttccttccgccgccgagacctcgtcggcggggtggtaagaggcagccgggaggggacgcgggcagtgcaaccgcaatccctccgctcaatggggccggcggcgccttctgcaggtgcatcgggtgaaaggggagcgacgctgcgccgcggcggcggatccccagttgccgtccggcgagcgttgacggcgccgcccagctgcgtaacatccccaaacatgatgcaatggtttgcagatcttggggccaatatggagagatcagacatgtccttctctgtaagaacacaattggatgcttgtggtgaatgtgaatgggccagcagcaatggcatctcaggcctcttggcaaagaggagtaatgcgctcagccccagcttttggcgcatgatcagtgagacactcaagttcaagagggatgctctcaggtacttggaggattgtgaaaacaaccttgatctggaacagagcgagactttggggcaattcgttcagtcccatggatattgtcagttcttccaagaagcttatctttttccaatctgtggttggatgtggtcatgtccatcacaaagagttttgggcttctctgcttcctctgtgctgtcgttttttcgtaagcataatctccttcagttgtttagtcgcacccagccgctcattgtcaatggtcgctctcagtcctatttcaacaaggtaagagaagatctggaaagcaggagctgtcgaataaaaactaactgccatgtgaaatccatttcaagttttgacagaggttacagagtcttagaggttgatggttcagaggagatgtatgacagaatcatagttggtatccatgcacttgatgctctaaaattactaggagcagaagcaacacatgaagaatcaagaattcttggtgcttttcagtatgtctctagtaatctatatcttcactgcgatgaaagttttatgctatgtaattcatccacatggagtgcctgcaacataaccagaacaagaagcggctctgtctgtgtcacatactggttgaatctgcttcagaacattgaatctacaaatcattttctcgtgacattgaacccctcttatgttcctgatcatgtgttgcttaagtggaatacaaatcattttgttccgactgtggctgcttcaaaggcttctcttgagcttgatcagatccagggcaagagaggtatatggttctgcggggcatatcaaggatctggcttccatgaagatggattccaggctggcaaagcagcagctcaaagtttgcttgggaacaagattgatcccctgacgaacccaaagcagatggtcctgtcatggacagagactggggcacgtcttctggtgttaagatttctcaaacagtacatctctgttggcaacttgatcttgtttgaagaaggtggcactatgttcagttttggtgaagcttgtgaaaaatgcaataaaaaatctgttctgcaagttcaggacccactattttattggcaggttgcaacagaagcagaccttggtttagcagatgcctacataaatggctgcttctcttttgtcaataagagagaaggccttctgaatcttttccttatcctcattgccagtagagatgcacacaggagttcttgcaggaattctagtcgaaggggttggtggacacccttgctttttactgccggcgttgcatctgctaaatattttctgcgtcacatctcaaggaagaactctgtaacacaaactcgtcaaaatgtctctcagcactatgatttgagtaatgatttcttctcgctttttctggataagtcaatgacctactcatctgccattttcaaggatgaggaagaaagcttagaagaggctcagctgcgtaaaataaaccttctaatccataaggctaaagtgggacaggatgatgaagttcttgagattggtagtggttggggcagtttggctatggaagtggtgaagcaaactggctgcaaatatacaggagttacacagtctgtggagcaacttaaatatgcccaaagaagggtgaaagaagctggcttagaggaccgaataacttttctgctgtgtgactaccgtgaaataccatgtcacaaatatgacaggatcatatgctgtgagatgattgaagaagttggtcatgaatacatggatgaattctttggctgctgtgagtcccttttggctgaaaatggcatatttgtcacccagtttatctcaattccggaggaacggtatgatgagtaccggagaagctcagactttattaaagaatacatattccctggtggatgccttccttctctgactcggataacatctgccatgtctgctgcatcaaggctctgcattgagcacgttgagaatattgggtaccattattatacaactctgatacgctggagggacaacttcatggccaataaagataaaattttggccctgggctttgatgagaagttcattcgtacatgggagtactatttcatatactgcgcagccggttttaaatccaggacacttggagactaccagattgtattctctcgtcctgggaacaccaagatgggatctggcttctaaactcaaaattgacctctgccctagagcacgagccaacctatttatctttgccattgtgtaataatttacaggaaactttggtcttcatgcttgaagatcatgtttgaaaaaaatgaataagtctatatttgaaatccttcaactattggcgactcaatccatgaactttaaaacagg

SEQ ID NO: 18731 - DNA, 2768 bp, Oryza sativa
  ref <308>: DATABASE ACCESSION NUMBER: AK069116
  ref <309>: DATABASE ENTRY DATE: 2001-12-06
gggagctccaggccccaccgccaccgccaccgcccacgccgccgctccatgatccgccgccgcgcggcggcggtagcgacactacgcgcctccctgcgccgcacccgctcccacgccgccggcgactccgaggaccccctgaaggactttgggtacaggccgtctaaggtgacctacaatgcactggtccaggtgctctcgagcgcggggcaggtggacttggggttccgggttcagaaggagatgtccgagtcggggttctgcatggaccggttcaccgttgggtgctttgcgcacgctctgtgcaaagaggggcggtgggctgatgcactagacatgatagagagggaggatttcaagcttgatacagtattatgcacacatatgatcagcgggctgatggaggcatcgtattttgacgaggccatgtcattcctccataggatgcgatgcaactcatgtattccaaatgtggtcacatataggacgttgctctcaggatttttgaaaaagaaacagcttggctggtgcaagaggatcattaatatgatgatgactgagggctgcaatccaaatccatccttgtttaattcccttgtgcatagttattgcaatgaaaaggattatgcgtatgcctataaacttttaaataggatgactacttgtggttgccctcctggttatgttgtgtacaatatttttattggaagtatatgtggtcaggagaaattaccaagccctgatttgctggatttagctgagaaaatttatggagagatgctggctgctaattgtgttcttaataaggttaacgttgccaattttgctcgatgcctttgtggtgtcgggaagtttgacaaggcatttcagctcataaaggagatgatgaggaaaggttttgtccctgatacaagtacatactctaaggtgatcacttttctctgccatgctactaaggtagagaaagctttccttctgttccaagagatgaagatggtcggtgtaactcctgatgtgtatacatacacaattttgattgacagcttttgtaaagctggactcattgaacaagcccagtggttgtttgaggagatgaggagtgtgggttgctccccaactgtggtgacatatactgcacttattcatgcttacctcaaagctaagcaggtacctcaggctaatgatatttttcaccgaatggttgatgctggctgtcgtccaaatgatgttacttatggtgcattggtagatggtctctgtaaagcaggcaacatcagtaaggcttttgaagtctatgccaaattaattggaacttctgatagcgccgattctgatttttactttccatgtgaggacagacacacacttgctccaaatgttgtgacatatggtgcactagtagatggtttatgcaaagctcacaaagtggaccatgctcatgaattactagatgctatgttatcttctggttgcgagcccaatcacattgtgtacgatgctcttattgatggcttttgcaaagctggaaaaattgacagtgctcaggaggtatttctgcagatgacaaagtgtgggtaccttcccagtgtacatacgtacacctcgttgattgacaggatgttcaaggatggaagacttgatcttgcaatgaaagttctctctcagatgttaaaggattcttgtactcctaatgttgttacgtacacagctatgattgatggtctttgtaggataggtgaaagtgagaaggcactaaagcttctgtcattgatggaagagaaaggatgcagtccgaatgttgtaacttacactgctctaatagatggattaggcaaagctggcaagattgatctgagtcttgacctttttacacaaatgagcagaaaaggatgttctcccaattatgttacgtacagagttctgataaaccacttgtgtgctgctggccttttggataaggctcgtttactgcttggtgaaatgaagcagacttactggccaaagtacttacaaggataccgttgtgcaattcaaggtttcagcaagagctttatcgcttctctgggtattctggaggagatggaatcatatggcacagtaccaattgcacctgtttatggaatgctgatcgattgtttctccaaagctggcaggctggagatagctatggagttgcacaaagagatgatggaagttccgtcatctgtaaaaactgacaatgacatgtacgcttcattgatccaggcactttgtttagcatctcaagttgaggaagcatttcgattgtatagtgaaatgacaaggagaggctttgtacctgagttaagtgtctttgtttgcctcataaagggattagttgaagtaaaaaagtgggacgaagccctccagttgtgctatggcatatgtcatgagggtgtgaactggcagggtaacaaatcttttcatggaggctagagctgttttgtcttactgcatcataaatcatgcaaatgacaacacttccacctaaggagtcatgttcttgtatctcaagattgttgcgagatgtggtgactcagagacctaaagtgcaattcatgatgactcaagaaaaataactcggaggccatggaataacactacagaatgaacaatcctgcatgaaaagatgtaccatggatagctgattcatcttcagatgggcaaagccacaaaggaatctcgctatggttatcaagttcaacatttgtatataaggcaacgatggttatacaaaaggcatttgactg

SEQ ID NO: 18732 - DNA, 1461 bp, Oryza sativa
  ref <308>: DATABASE ACCESSION NUMBER: AK069117
  ref <309>: DATABASE ENTRY DATE: 2001-12-06
ggcaacgcaacgaactccttccaagctcctcgccaatggcgtcctcctccgccctcgcttcctcccccttcctcccgcccctctcaaccccaaaccctagggccctctccctccgcctccccgctcgccgcctccccgtggcgtcctccgcggctccctcgggcgctgccgctgcggcgtcggcgagggagcgccgccgcttcctggagcggtacggcctcaaccccgacgacttcgaggacgatgccgaggcggaacccagggaagagaggagaagggataggcggaaccggcggtcgggtagaggggaggcggaggatgctccggcgaaggcggcggctgagcctcgggagacgcataaaatgcttcaggtgttaggaggaaaagtacgcagaagaaaattactttcaccaaaagataggaatgttcgtccaatgatggaagttgtacgaggggcagcctttgacattttacagtcagctggtggttttccggcttcgcttagacctggtcgatggttagacttgtatagtggtactggatctgttggaattgaggctatgagccgtggatgttcagaggcacattttgttgagatggatccttgggttgtttctgaggtccttaaaccgaatctggagtgtactggatttcttgatgtttcgcacatacatatgatccgcgtcgaaaacttcttggccaatgctgaaaaatctagtggtaaatatccttcttttgattatattagtgtaacaccgccatatcttgaggtaaactacagtacactactcgatcaacttgcaaggtcaccattggttggagaagattgcttcattctcgttgaatacccactgaaaacagacatggccgaatcatgtggaagccttataaaagtagctgacaggaggtttggtaggacaaacttgctaatttatgggccaacctgggctgagaagaagaggagatcttgagatgatttgtatgctaattactggaaaggaacgctgtctcgacagtgtcaccgcactcttgaacagcaacgagtggctcagctcctctcgaaactatcaacagtgaaattcatggaacatcctgtggagatgatggactactgtctagtacactggaagattgtatgagggagagacagagagtacttctctttcattatagttcaccaatccacatcccagaagaagaaaatgatcactggctcactgcgtttcaaggcatcagcatcaagccaccatgcgatagtgacctatctccacgttgctacgagcctgactctatctagcattgtaggtcatgcctcgccggtgatatgatctgagccgtacatttatgcattcagacattcagtacactggctctagctgcacaggcatttgtgtgctcaatctccatagaacaacatgattatgttgcttattgatcggtggatgcaataagtttataagc

SEQ ID NO: 18733 - DNA, 2059 bp, Oryza sativa
  ref <308>: DATABASE ACCESSION NUMBER: AK069118
  ref <309>: DATABASE ENTRY DATE: 2001-12-06
gaagccgcggagagagagagagagagagagagagagagagagacgcagctctgttcttcttctcctctctggaaatttctggatctcgcgagagatcgggaggacgatggtgggtgggcgcgcgctcctgccgctgcttctgctctccgcgctgctcgtccagatccgcgcctccgatccgctgttctatgagccgttcgacgagagcttcgaggggaggtgggttctctccgggaaggacgactacaaaggtgtatggaagcacgaaaagagtgatggacatgaagactatggcctgcttgttagtgagaaggccaagaaatatgccataatcaaggagcttgatgagcctgttactttgaaggatgggactgttgtcctgcagtttgaagtgaggcttcagaatggccttgagtgtggaggtgcatatcttaagtacattcgtcctcaggatgctgcatgggatgccaaggagtttgataatgagactccttacactattatgtttggtcctgacaaatgtggatcaactaacaaggtgcatttcatccttaagcacaagaaccccaagactggcaagtatgttgaacaccacctcaagttcccaccttctgtcccatatgataagctctctcatgtctacacggctatcttgaagcctgataatgaggtgagaattttggttgatggggaagagaagaagaaggcaaacttcctttctgctgatgattttgagccatcacttatcccatccaagaccattcctgatcctgatgacaaaaagccagaagactgggatgagagagctaaaatccctgatccagatgctgtgaagcctgatgactgggatgaggatgcccccatggaaattgaggacgaagaggccacaaagccagaggggtggctggatgatgagccagaggaaattgatgatccggaggctaacaagcctgaagactgggatgatgaggaggatggagaatgggaagcaccaaagattgacaaccccaagtgtgaagaggctcctggttgtggtgagtggaagaggccgatgaagcagaaccctgcttacaagggcaagtggcatgcgcctcttatcgacaaccccaactacaaaggaatctggaagccccaagagatccccaaccctgagtacttcgagcttgacaagcctgactctgatccgattgccgctattgggattgagatctggacgatgcaagatggcatcctgtttgacaacattttgatcgctgatgatgagaaggttgccacttctatcctggagaagtcttggaagcccaagtacgaagtagagaaggagaaggagaaggctgaggaggcagcagcggcagcaggtgatggtctttctgagttccagaagaagatctttgacgttctgtacaaactcgctgacattccattcttggaaccctacaagactaagatcattgatgtaattgagaagggagagaagcagcccaacatcaccattggaattctggtctccatcgttgtcgtctttgtgactgtgctcttcaggatcctgttcggcggcaagaagccagcggctcctgtgaagcccgtagccgaggtcaaaaaaccaaagtctaccgagtccgaagcagctggaagcagcggtggcaaggaggacgagaaggaagaggaagagaaggatggagctgctgccccacgccggaggtcccgaagggagacatgagacacaacataagcctttgattttgacgtcttgtcgcggccattttggcggctgcttttttcctttttcgagaacttgggcttttatgttttttgagtgtataataggagattcatgtcgcctatgctccctgcagatgatgatttggtacccctgcttaaatggttagaacttcacggacagtagaagttagtcatgttgggtttatttgtgtgctgtgcctgacatataatcactttcttgatcacctagtgattattttctcgtagatagttgaaacatcaagagtctctttcagaagtgtgaggttcagtgcaagctagttattatctttgctgc

SEQ ID NO: 18734 - DNA, 1248 bp, Oryza sativa
  ref <308>: DATABASE ACCESSION NUMBER: AK069119
  ref <309>: DATABASE ENTRY DATE: 2001-12-06
gatatataggcatagccctccacagtgcacacagagtatatcagtaaccaattaatcaacctagcttaattacatagacgagctagcttagcacacatggcgtcttcaacctcgagctcgctcgccgtggcaacaatggtggccgtcgtcctcctcctgggtgccaccacccaggcggcgcgcctcctcgacgaactcgtccccggcattccgatgccgacgatccccggtgtaccggcggtcggccccaccatcccggccatcccgacgatccccggcgttccggcggtcggccccaccatcccgaccatccccaccgttccgacgatccccggagttccggcggtcggtcccaccatcccggccatcccgacgatccccggcgtgccggcggtcggccccaccatcccgaccatcccgaccatcccgacgatccccggcgtgccggcggtcggttccaccattccgaccatcccgacgatccccggcgtgccggcggtcggcccgactatcccgaccatccccggcgtgccgacgatcccgacggtgccgggagtgccggagctgccggtaaatcccggaggcgtggtgccgacgatcccgaaggtgccattgccgccggtgaatcccggagccgtcgtgcccgccgtgccagctctgccggtgccgccgatccccggagccgcggggggtgtcgtgccgaccctgccggtgccgccgttgcccgccgtgccgggagtcccgctgccggaggtgcccggcgtccctctgccgccggtgccgtccgtcgtcccgcccgtgccttaggtcaactccggcgagccccgtgccgtcgttaattaattactccggccagctgacgtgtacgtggcattgaccgtgtgcgccatgcattggccgccggcgccggcagccatctacagattaattacgtacgtgtgttaagtagtaagtacttcctccgtttcacaatataaatcattctagcatttttcatattcatattgatgttaaagaatctagataaatatatatgtgggaaatgctaaaatgacttacattgtaaaacagagagagtacaaattaagatgacttgcatgtacgttgttacgtcaagttggtatagtatttgtgtaatgaacgtgtgtgtgtgcagaccaggtgcagtatgtgtttgtggcgagtggcgacaaatgcgtcacgctctgtatacgtacgtgtgcaaaagcttaacgtgttgcttaaatt

SEQ ID NO: 18735 - DNA, 1891 bp, Oryza sativa
  ref <308>: DATABASE ACCESSION NUMBER: AK069120
  ref <309>: DATABASE ENTRY DATE: 2001-12-06
gtctagcctcctacacttaccgtcaccgaccgcgaaaaaattcccccaaaaccctagcggcggcggcgcgcgctcccctccccacctccgccgccgcggcgtcgaggcagcaccggagggcgatggcgtcgacggtgctggaggcgacgcgggcgaagcacgaggacatggagaggctggagcggctggcggtgcgggagctgcagcgggagcccgccaacacgcgcgaccgcctctaccagtcccaccgcgtgcgccacatgctcgacctcgtcatctccacctccggcaagctcgtggaaatctacgaggacaaggataatgctaggaaggatgagatctccaaccatcttagttccacagtgcaagctgaaatctttccaaagttctatgacaggctcaaagagatccgtgattaccataggcgtaatccttctgcccgtttcgttagtgcaactgatgatttcgaagagctactaaaggaggaaccggctattgaattcactggagaggaagcttttggccgatacctggacttgcatgagctttacaatgagttcataaattccaagtttggaactccaatggaatactcagcatatgttggcaccttttctcatgtggagaagatggcacaaaatctgaaaacctccaggcaatacagagaatacctggagcatattttggagtatctgacatcatttctgtatcacacagaaccattgcaagacattgagaagatttttgcaaagttggaaagcgagtttgaagaacagtggatcaatggtgaagtgcctggatgggagagcaaggacccagagaaagaatctgcacaagagtcagtaatagaccttgattactataccactgttgaagagcttgttgagctgggcccagaaaagttgaaagaggctttagctgctcgtggattaaaaagtggtggtactgttcaacagcgtgctgagcgacttttcttgttgaagcatacacccttggaacaattggatcgtaagcattttgccaaaggttcacacagttctgtctccaatgctacttctaatggtaacaatttcaaggataatttgaagaaggaaattgctttaatggaagtaaagatgaggcgcctttgtgagctactagatgagatcattgtacggacaaaggaaaatgcagagaagaagctgactctcacatatgaagaaatggaagcagaacgagaagaggaagaagtgcaagctgatagtgaaagtgatgatgaagaccaacaaatctacaatcctcttaagttgccgatgggttgggacggcaaacctataccctattggctatataagctccatggtcttggtcaggaattcaaatgtgagatatgtggaaaccacagctactgggggcgacgggcttatgagcggcatttcaaggagtggcgccatcagcacgggatgcgctgtcttggaattcctaatactaagaacttcaatgaaatcacatccatccaggaggcaaaagaactctgggagaaaattcaacaacgacaagggctgaacaagtggcggccagacctagaagaagagtacgaagatcaggagggaaatatctacaacaagaagacctacactgatctgcagcgccagggcctgatttagaatccctgatgcgatcctaacattttggcccctatgggctgctgctgaagtggttggccatttgttctattgaacttcgttgacctctgggtagttgtagcactcgatacttgtagcaccatgggtactccattgctcaaatgtttcttttctactacatggtatattgcactatatccctgtaccctgtttgaccatctggtatactgtttgcacaatccagggttaaatcgccattgtgtcgg

SEQ ID NO: 18736 - DNA, 1289 bp, Oryza sativa
  ref <308>: DATABASE ACCESSION NUMBER: AK069121
  ref <309>: DATABASE ENTRY DATE: 2001-12-06
agattctcttccattccattcccaaccatggcctcctccatcgccatgtccctccgctccctcgccgccaccgacgccttcctccccaagccctccccctcctccgccccattcctcctcctcctctccccgtccaccccgcgcctccgcctccacctccacctccgctccacccgccgcctcccgctcgcgccgctcgccgcgtccgactccttcgaatccgcttcgtcctcctccgccgccgcgctcgacttcgctgagccaggtgccgccgaggagtccgacgtgccggaggagtctgaccaggaagaggaggggtacgcgccggaggccgaggaggaggcggaggcggatgaggaggtggaggaggaagccgtcgaggcctccgcggaagttgcggaggaggccgaggacgtagaggaggtcggcgagtacgtggagccgcccgaggaggccaaggtctacgtcgggaacctaccctacgacatcgacagcgagcgcctcgcccagctcttcgaacaggccggcatcgtcgaggtctccgaggtcatctacaacagagaaacagatcggagtcgtggatttggatttgtcaccatgagcaccgttgaggaggctgagaaggctgtggagatgttccatcgctacgatgttgatgggaggcttctgactgtaaacaaggcagctcctagaggcgctcgggtggaaagacctccccgtcagtttgggccttctttcaggatttatgtgggcaatctcccttggcaagtggatgactctaggttggtacagctgttcagcgagcatggcaaagtagtcgacgccagagttgtgtatgacagagaaactgggcgttcacgaggatttggttttgtaacaatggcgacacaggaagaattggacgacgctattgcagccctcgatggacagagtttggatggccgtgcgctgagagtgaatgttgcagaggagcgaccaccgcgccgaggcttttaatgggatagcaggctttgtgggggtttaacagcatcggaggcatcatagcacgtctgatactggtttagtccctcaaatagtagctttcttgcgattcttggttctgtatcctcccaagtcctttctcatgcctgctgtttactgctcctttcttgttaactgttggttgtggccacgagttgatgcacgtaggctactgttatgatgcccctctaccccaatttgtcgatgcatccaaaagttttgtctaacatttatctatttaagcaaaagaagagcatggtgtgtgtggc

SEQ ID NO: 18737 - DNA, 1164 bp, Oryza sativa
  ref <308>: DATABASE ACCESSION NUMBER: AK069122
  ref <309>: DATABASE ENTRY DATE: 2001-12-06
cgaagcaagagatagggataaggggaagaggaggaagaaggaggaggtgtagggagaaaccggagcaacctcgaagctagtccaaactagtgggaggttgtctttccggcaagccggagcccggagctatcgatcatcaagctttctaccccgaccgacgaggaagaagacgactgatcaattgatcaaaccgatctctccatagctaggtagacaggaggagaggaggaagaagagggggagaggagacttatcttgatcgatggcgcgaggcaaggtgcagctccgtcgcatcgagaacccggttcaccgtcaggtcaccttctgcaagcgccgtgccggcctgctgaagaaggccagggagctctccatcctctgcgaggccgacatcggcatcatcatcttctccgcccacggcaagctctacgacctcgccaccaccggaaccatggaggagctgatcgagaggtacaagagtgctagtggcgaacaggccaacgcctgcggcgaccagagaatggacccaaaacaggaggcaatggtgctcaaacaagaaatcaatctactgcagaagggcctgaggtacatctatgggaacagggcaaatgaacacatgactgttgaagagctgaatgccctagagaggtacttagagatatggatgtacaacattcgctccgcaaagatgcagataatgatccaagagatccaagcactaaagagcaaggaaggcatgttgaaagctgctaacgaaattctccaagaaaagatagtagaacagaatggtctgatcgacgtaggcatgatggtagcagatcaacagaatgggcattttagtacagtcccactgttagaagagatcactaacccactgactatactgagtggctattctacttgtaggggctcggagatgggctattccttctaacactaataatggcctgggggatacttgtgttcattactagtgtgtaatatggttaataatgcttgtgttgctgtttgctttgctattctgatgtaccttatttagacaagttcccgcaggaagtgtcttttagtattgtatttgtcttgggctgtggtgctttgtttttccctaaagaactcttgaggagctctgttgttgaaccatttcaagtaattgagactattgtttcc

SEQ ID NO: 18738 - DNA, 3303 bp, Oryza sativa
  ref <308>: DATABASE ACCESSION NUMBER: AK069123
  ref <309>: DATABASE ENTRY DATE: 2001-12-06
ggcatccatccacgccctcctcgttcccccctgaacctcccagaagctccctctcctccccgccgccgcgacgcccaccgccacctatttatacccgcaccccgcctcgccacctcaccgttctatcctcgcgctcgcctccgctccaatcccaatctccgatctcccgccgccgccgctgaagaactgaacaatctacttctagtatctcaagagaattctgagatcaagcctgccatggccgcagcgccgccgctcgccgcggggctccggcccgccatggcggcggcacaggcgccggtcgtcgccgcggcgtggggcgtgggcgctaggaggggggcggccttgtcgtcgtcggctcggtgtagggcgcttcggttgtcgagaggaggaggaggagggcgagatgggtgggtgcctcctcccgtggtggggaggatgcccccgcggacgctctccgtcaggtgcgccgccagcaatgggaggattacacaacaagagttcactgagatggcatggcaatcgattgtttcgtcgcctgaagtagcgaaagagagtaaacaccagattgtggagactgaacatctgatgaaatcattgctggagcaaaggaatgggctcgcccgtcgaatcttttctaaagctggagttgataatacaaggcttcttgatgccacagagaagttcatccagcggcagcctaaggtgttgggtgaagatcctggttccatgttgggacgtgacttggaagctctgatacaaagagcacgagactttaaaaaagagtatggtgattcatttgtttcggttgagcatctggtccttggttttgcggaggataaacgatttggaagacagctgttcaaggatttccagattaccgtacagtccttgaaaactgccattgaatcaataagagggaaacaaaatgtgattgatcaagatcctgagggaaaatatgaagctttggacaagtatggcaaggacctcacagccatggcacgtcaggggaaacttgacccggttataggaagagatgatgaaattcgtagatgcattcaaattttatctcggagaacaaagaataatccagttttgattggtgaacctggtgtggggaaaactgctatagctgaagggcttgctcagaggatagtgcaaggagatgttccgcaagctctaacaaaccgcagactaattgcacttgacatgggtgctttgattgctggggcaaaatatcgtggggaatttgaggataggctgaaggctgtactcaaggaagtcacagattctgatggacaaaccattcttttcattgatgagattcacactgttgttggagcaggtgcaacaaatggtgccatggacgctggtaatcttctaaaaccgatgcttggtaggggagagctacgttgtatcggtgccacaacccttgacgagtaccgcaaatatattgagaaggatcctgcattggagcgtcgcttccaacaagtttatgttgatcaaccttcagttgaagatacaatctcaatactccgtggattacgggagagatatgaattgcaccatggggtacgcatatcagacagtgcacttgtggcagcagctcttctctcagaccgttacattagtggacgatttctgccggacaaagcaattgatttggttgatgagtcagctgccaaattgaaaatggagataacttccaagccaactgctctagatgagattgatcgtgctgtaataaagcttgaaatggaacgtctctcactaacaaacgatacagacaaagcatcaagggacagactatctcgaattgaagcagaactgtcactattgaaagaaaagcagaaggacctgactgagcagtgggagcgtgagaagtcggtgatgactaagattcaatctattaaagaagagattgatagggtcaatgtggagatccagcaggccgaacgtgagtatgatctcaatcgtgctgctgaactgaagtatggcagtctgaacgcattgcagcgccagcttcaaacaacagagaaagagctagatgaatatcaaagttctgggaaatccatgctaagagaagaggtcacccaagatgatattgcagaaatagtgagcaggtggactggtattccagtatctaaactaaagcaatctgatagggagaagttgctgtatctagaggaagaactgcacaagcgtgttgttgggcaggatcctgcagtcaaagcagtttctgaggctattcagagatccagggctggtttgtccgatccaaatcgccccattgccagtttcatgttcatgggccctacaggagttggcaaaacggaactagcaaaagcccttgctgcttttatgttcaacactgaggaagctgttgttaggattgacatgagtgaatacatggagaagcattctgtctcaagactgattggtgcaccaccaggctatgttgggtatgaagagggtggtcagcttacggaagctgttcgtcggaggccatattccattatcttgtttgatgagattgagaaagcccatggagatgtattcaatgttttccttcaaatattggacgatggaagggttactgactcgcagggcaggaaagtgagcttcaccaacagtatcattatcatgacatccaatgttggttcacagttcatactaaacatggatgaagaaggtgggtcaactgattcagcctatgagaatataaagaagagggtgatggatgctgcaagatctgttttccgtccggagttcatgaatcggattgatgagtacattgtcttcaagccacttgagagggaacagatcaacagcattgtcaaattacagcttgcaagagtacaaaaaagaattgccgatcgcaagatcaaactcgaagtgtcgcctggagcagtcgaattcctgggaagccttggttacgatccgaattacggtgccaggccagtgaagcgagtgattcaacagtatgtggagaacgagctggcgaagggtatcctgagaggtgatttcaaggacgaggacagcatcctggtagacacccaggtcaccgtgccatctaatggtcagctccctcagcaaaagctcgttttccacaaaatgagtgaagaatccgcaccagctgctgctgaagacgagaaatttttgccggctgtttgatgggccgaacttttagcagatgaggaataaaatgtagatagaagattagcaaacttgagtggatagcatagtatacagacacaatttcccttgctagttcaacattacataagcacaaagtctgtgctg

SEQ ID NO: 18739 - DNA, 959 bp, Oryza sativa
  ref <308>: DATABASE ACCESSION NUMBER: AK069124
  ref <309>: DATABASE ENTRY DATE: 2001-12-06
gccctaacggcatggactcgtcagtgcggtggtgccgatggtcttctccctcgggaatgagattttgtttttctgtttcttttttattttctttttgtattttttacagcagcaaggaggctaccccgatttacgctgatctggcgacagtgcggcggtggcagccgtgcgggcgaggccatcccgagcggtggccggtgactgggcgacctggtggggtggagcagcggtggcgtggtggtcgttggcagggacgccatcggatctgtggccaccgatggtcgtcacgaccaggagcagccgcagcatcatcccttctcccatcgtcttccattgcagtggcaggccaggcctgatggcgtcgcatccatggccgcttcctcaccaccgccatcactgtggaagatgacgacgggagggacagcagcaacaagaggaggcggtggcactgccgacacaagcaagtgtcatcgacgggctacgacggcaaaaaaacatccaccatgcgccgctgccgccctctgggccttctaccctcctttcaagcaactccctatggtggtcgcagcgccactgggatgacctccgatccgttggtgtaggctgcagacaagatgatggcgcttggatctacagctgcatgtgttcatcgtcgctgtcgagctccagccaggcctcttcctgtcagtgctgcctggacgctctgtgtggtgggggtttttctccgaggcgtcgatgcctcgttcatcttcaccggcggaaggagcagaaaggaggacgacgattaaacagtcgacgcccgctatttccgttttttctatctagacatcatcgagagcaacccatgtttatttcctcaccccgtgtccatgttctttttttgttctttttttttcccaccgtgtgtataagtgtatcaagatcatcactacatgcacgtgattcatcccagtggagtt

SEQ ID NO: 18740 - DNA, 1202 bp, Oryza sativa
  ref <308>: DATABASE ACCESSION NUMBER: AK069125
  ref <309>: DATABASE ENTRY DATE: 2001-12-06
gtccgctttctcctcgatccagagctatacatatccatcagcagcagcagcagccaaattcaccatcctccagcgatcgatcgatcacctgcagtactagttctctcaagcttcttggtcgccggccatgagctacgggagcagctcttctggggggcgaggcgggcggcgggtggagtacgggaggacgtacgtggtgaggcccaaggggaggcaccaggccaccattgtgtggctccatggcctcggcgacaatggcgcaagctggtcccagctactggattctcttcctctgcctaatatcaaatggatttgccctactgcaccaacacgccctgttgctgctttcggtggattcccttgcacagcatggtttgatgtggaggacacttccgtggatggccgtgatgatattgaagggcttgatgcttcagctgcacacgtagcaaacctactgtcatccgagccatctgatgtgaagcttgggataggtggtttcagcatgggtgctgccgctgccctccactctgctgcatgctatgctcatggaagattcacaaacggcgttgcctacccggtcaccctcagcgccgtcatcggtttgagcggttggcttccctgttcaaggactctgaagagcaagatggacagctctcagactgcactgagaagggctggtgccttaccaatcctgctcagccatggaagagctgatgaggttgtcacctacagaaatggtgagaaatcagccgatttcctgcgaggctcgggttttcagtatctgaattttaaaccctacaacgggtatagacacacttacttaattttccccatcttcatttttttctctgaaaactagaataactaacatgatgccatttacacagcctggggcattataccatccctgaagaaatggacgatgtctgcaagtggctcagttcaaggctgggacttgaccgatcccgcggctaattcgaaaatatgaacccggttcagtggctttggtagtgatgtataagagaagaaggtattgacaatatacaggagaaggttgattaggatatgtgaattgtgacagtcatggctttggtagcatatgtaacactatgtgttttccaaacaactgcataccacgttacagttgtagttttctactgatgtactttgttaccgctaaagagggatgcgtataatgtagt

SEQ ID NO: 18741 - DNA, 2035 bp, Oryza sativa
  ref <308>: DATABASE ACCESSION NUMBER: AK099085
  ref <309>: DATABASE ENTRY DATE: 2002-08-28
gatggttaccgtctccctcccaaagccccgcctggtgattcgccgtctccctccgtcgccgtgccttcccccgccaccgtcctgctcaccggcgttccgccggaacgacttgaagtccacctctcgagctcggcggcctcccccttagggcagaagcggacgaggcgaatggaagaggttaggggcagggagagcaaagaccaccgcggcggcggcggcggcggcggaggtgatggggacggcgagcggacgggacggtggcgcgccgaggaggtcatcgctgggaaccgcgcggttctggaggctctccgggagctcgtgatgtatcctgtcctctacgcacgggaggcccgcgtgctcggcctcaattttcccagaggattgctgctccacggcccctctggcactggaaagaaaagcatggtccgagctgttgttcgagaatgtaatgcccacctcacagtgattgattcaatttctgtgcataaaccccacgctggagagggggagaagttcatgcgagaggcttttactgaagcatattcccaggcatcacagggtagaccagccgtgatattcattgatgaacttgatgacatatgtccaccgcgtggcagtaggagagagcaagggtcccgcattgttggtcagctgttgactctgatggacgggaagtcatcaaagctgcttccccacctagttgttgttgcatctgctaccagggtggatgctattgagtcagcactgcgaaggcctgggcgttttgactcagagatagaggttactgttcctacagcagaagaaaggttcgagattcttaagctttataccaagaatctacatcttggtgaatgtgttgatcttcaatctgttgctgcatcctgcaatggttatgttggagctgatttacaagctttatgtcgagaagctgcaagacgtgcttatggtagattatcaagctcatcagagagtgagaatgtgctaacgctaatcatggaggattgggagtctgctaaatctgtggccaaaaatagtgtgacaagaggggtaactaaagaaattccagctgtttcatgggatgatataggaggtttgaaagctgttaagaaaaaacttcagcaagctgttgaatggcccatcaagcatgctgcttcatttgatagacttggaatatcacctatccgtggggtgctattgcatggtccaccagggtgctcaaagactacccttgcaaagggctgctgctcatgctgcccaagcttctttcttttcattaagtggtgctgagttatactccaagtatgttggtgaaggtgaagctttgttgcgacgtacattccagatggcacgtcttgcttctccaagcattatattttttgatgaggctgatgcaattgcccctaaaagaactggtcccagcgggaactctagtggcaatgccacggttggagaaagactcttatcaactctattgacggaaatggatggtttagaactggctacgggaattattgtattggctgctactaatcgcccaaatgcaattgatgctgctcttctgcgcccagggcgtttcgatatggttttgtatgttccaccaccagatgcggaaggtcgatatgaaatactacgcatccatacacgcaaaatgccattaggagatgatgtggatctttggaaggtagcagagcgtaccgagcttttcacgggcgcagatcttgaaggcctgtccagggaggcgggaatggctgccttgagggaaagtctgaggtcagagcgttttgtatgtgacgatattcacttccaggccgcgctaagatccttgcgtccatcacttacacaatcagtggttgatgagtactcaaatgcagccatccatggtccattgacgaggagaaaacactaaaagatgtattattctggcgcacaagcatcagtgtcgcccattgttgattctgactagttatcagaacattgtatcatcggtctgctgtatatattgaccaaagttgtgacatgttcccatatgattgcc

SEQ ID NO: 18742 - DNA, 2025 bp, Oryza sativa
  ref <308>: DATABASE ACCESSION NUMBER: AK069126
  ref <309>: DATABASE ENTRY DATE: 2001-12-06
gtttccgggacgcgctgaggcctgtgaaaggaaaggaaaggaaaggagaggagtggaggcgaggcggcggcggcggcgagatccacacatgacacatctcgaggcgcgcggcaccaccaccgccatgggagcgctcgaggaggcccacctcgccgccgccatctccgcgtgcgagtgcgagtgctacgaggaggaggaggaggatgacctcgtcgagggggacggcgaggcggcggccgccgacgccatggagccggcggtgcgcgcgctgctgctggggctcggcgaggacgcgcgccgggaggggctgcggaggacgcccaagcgcgtcgccaaggccttccgcgacggcacccgaggttacaagcaaaaagtaaaggacattgtgcagggggctctctttcctgaggttggtgttgacaagaggactggttctgctggaggaactggagggcaagttgttgttcgtgatattgatcttttctcatactgtgagtcatgcttacttccattcagcatacaattccatgttggctatgtgccctctggtggaagggttgttgggttaagcaagctttcgagagtagctgatgtcttcgccaagaggttgcagaatcctcaaagactggctagtgaagtttgtggtgcattgcatgctagcatacaacctgctggtgtggctgttgctctgcaatgttggcacatacctttgccagaaaacttgaaatgcaagactttgcaaggttggattagcacttcacattcatctcgctctggagtttttgagggtgagagcagctctttttggaatgacttctcagcccttcttaagcttaggggcatagacatggagagggacagccattctgcctccatagcttggtgccctttaaggtctcatgatgtcccagtctgcaatgggcactgcaagaaggctacaaccaacggtgcaatttcacccaaatcagtaccagctccctctaatatggtttctgctgttagctcaatgctcttatcccttggagaggatcccttcaggaaagaacttgtaggtactcctcagcgttacgtgcaatggctgatgaagttcagagcatgtaacctagatgtgaagctgaatggctttacactcaataatttgagtgtataccagagtccagctggagatgctgctgaccatcgagcaatccattctgagctgcatttgccattttgtgcgcagtgcgagcaccatcttctgccgttctatggagtagtgcatattggctaccttgacggcggagatggtgaagtgattgatcgatctcattttcaggccttggttcatttttatggatgcaagcttcaggttcaagagagaatgacaaggcagatagctgaagcagtttattctgtttcgcattgtggggccatagttgttgtagaagctaaccacatttgcatgatatcaaggggaatagagaaaatcaggagtagcactgcaacgattgcagttctgggtcagtttttgacggacccttctgccaaggcacgctttctgcagaacgtagtagatacaactggtttggcagtatgaatcacttagatcatacaaactagaatatcagctaagaatacatgattcagagaagtaccgcagccactttaatatggttgaaagttggtacccagttcggtgtgttaccggcaaacattgcccattggttcgagaccggggctggtgccacgtctctctggaaggaaaatgtccatttgcttggtgagggaaaattttcgtcacatggaagattatattgaagctgtcactggaagcaccaaaagggtttggttttctctgtgttgtaccatttttcatttgcacggcacttgaaatctatactgcactaattgcagatgtgccgagaaagatatatacacagaagcaatgtttgtcacatcatttttcactgtagcaaattttgatgagatcaatggctccagctcctgtgaaatgaatgtgattgttctcttgagtgttgacccgcc

SEQ ID NO: 18743 - DNA, 2092 bp, Oryza sativa
  ref <308>: DATABASE ACCESSION NUMBER: AK069127
  ref <309>: DATABASE ENTRY DATE: 2001-12-06
gagatcgactccgatcgacgcctccgcttgacggaaggaaacagaggggaagagagaggatcgtcgtcgacgatgatgaggcggcggctgggctgaaagagaaacagcatctcttgaggatcgtcgtttcgttgcatgggcaactactactcgtgcggcgcctcgtccacgtccagcccgacctcaccgtccttggtcgactactactactgctatcatcggtatccaagcagttgcagtagtacaagcacagcaacaagtagcggggggaggatgccgatccgcagccaccagcagaggctgtcgtccccgacggcggtgctggggcacgagacgccggcgctgcgggaggtgtacacggtggggcggaagctggggcaggggcagttcgggacgacgtacctgtgcacgcaggtgtcgacgggggcggagtacgcgtgcaagtcgatcgcgaagaggaagctgctgagcccggaggacgtggaggacgtgcggcgggagatacagataatgcaccacctggcggggcacgggagcgtggtgaccatccagggcgcgtacgaggacaacctgtacgtgcacatcgtgatggagctgtgcgagggcggggagctgttcgaccgcatcgtggagcgcggctacttctcggagcgcaaggccgcggagatcacgcgcgtcatcgtcggggtggtggaggcgtgccactccctgggcgtcatgcaccgcgacctcaagcccgagaacttcctcctcaaggaatcctcctcctcctcctcgctcaaggccatcgacttcggcctctccgtcttcttcaagcccgggcaggtgttcagcgacgtggtggggagcccctactacgtggcgccggaggtgctgtgcaagcactacggccccgaggcggacgtgtggacggcgggcgtcatcgtctacatcctcctcagcggggtgccccccttctgggcggagacgcagcagggcatcttcgacgccgtcctccggggatccctcgacttcgactccgacccatggcccaccatctccgacagcgccaaggacctcatccgccgcatgctccgctccccgcccagggaacgcctcaccgcccaccaggtgctttgccacccctgggtctgcgacgacggcgtcgcccccgaccgccccctcgcccccgccgtcctctcccgcctcaagcagttctccgccatgaacaggctcaagaagatggcgctgcgtgtcatcgcccggaacctctccgaggaggagctcgctggcctcaaggagatgttcaaggccatggacaccgacgccagcggcgccatcaccttcgacgagctcaaggaaggactccgcagatacggctccaacctcagggaggctgagatcagggatctcatggacgccgccgacgttgacaaagcggcaccatcgactacgacgagttcatcgccgccaccgtccacctcaacaagctggagcgcgaggagcacctgctcgccgccttcgcctacttcgaccgcgacggcagcggctacatcaccgtcgacgagctcgagcacgcctgcagggaccacaacatggccgacgttggcatcgacgacatcatccgcgaagtcgaccaagacaacgacggccgcatcgactacggcgagttcgtcgcaatgatgaagaagggcgctatcgatatcatcggcaacggaaggctcaccattggaaggccaactacggctacttccgacgatccttctccaacaatctcttcttcctctagatgatgcatcaacgccaaacaaacaaacaatgcaaatatggttcccaattacttcaattcacaactccgactcacggatcgctcgcatggcatgctagctagtagcatatactctatactctcaagattcatcattctttttataccatgcatacagctgattatttcttgggatagaataaaattaagggcatatacctccagagatcgatcaatctatgcatgtatatggttttgttgcggatacatgcatgccaacggaagcaatttgtatatgtgggtacctgatccaagagagtgcatataaagcaatttttcctgtgt

SEQ ID NO: 18744 - DNA, 4275 bp, Oryza sativa
  ref <308>: DATABASE ACCESSION NUMBER: AK069128
  ref <309>: DATABASE ENTRY DATE: 2001-12-06
gaatcccccatcggcgtcagggccgtgacggcaaaaaatacagcgagctctccaagccctagccgccgcccgcccgcctccccttcccgacccctcgccgccggcgagccggccgcgtggagtcgcccccccgccgcggttcccgccgtccgctacgttgtctcgggccccggagtgctgggatcgcgccgcgtgctggactcactggactggactggagacgccgccctccgctcgactagcccccaccccccaccggcgtcgtcgtcgtcgtcaagggctcaccatcgctagcagggcaacagtgattagttccgcggaaaaggacttttggatacggtttagctaaaatggcaaacatgaacataaccaccatcttggagaagatgacagggaaagataaggactacagatatatggcaacttcagatttgcttagcgaattgaacaaagagggcttcaaagctgaccaagacatcgagccaaagttgactactaccgttcttcaacaactggaagatgcttcaggagatgtctctggtttagctgttaaatgcttggctccacttgtcaagaaggttggtgaggatagggtggtggagatgaccaacattctttgtgataagttactcaatggaaaggaccaacatcgagacactgctagtattgctctgaagacaatcattgtggaagttacgacaacatcacttgctgaaaagattttggtgtctcttgccccacagctaatcaagggcgccactgctggaaaaagtgcggaagtgaaatgcgagtgccttgatatattgggggatgtacttcatagatttggcaacttgatcacaaaagatcatgatagtatgctcactgccttgttatcccagttgagctctaaccaagcaagtgttaggaaaaagtctatttcttgcattgcatcacttgctgcatgtctgtctgatgatttattagccaaggcaacttttgaggttgtccagttgcttaaaaatagaagtgcaaagtctgaaattgcccgaacaaatatccagatgattggcgctctaagtcgctcggttggataccgttttgggccacaccttgctgaagctgttcctttgctcataaactattgtacaagtgcatcggaaaatgatgaagagctccgtgaatacagcttgcaggccctcgagagttttatgctgaggtgtccaagagatatatctccatattgtgagggtattttaaatcttgcattggaatatataagctatgatccaaatttcactgatagcatggaggaggacactgatgatgaggctcaggatgaggaagatgatgatgagagcgcaaatgaatacacagatgatgaggatgcaagctggaaagtccggagggcttcagcaaagtgcttatctgcaattatagtatctcgtcctgaaatgttgtctaagatgtatctggaggcttgtccaaagttaatcgaacggtttagggaaagagaggaaaatgtaaagatggacatctttaacacatttattgagttgttacgccaaactggtaacatgacaaaaggacaaggtgacattgatgagtctagccctagatggttgctgaaacaagaagtacctaaggttgtcaaatccatcaataggcagttgcgtgaaaaatcaatcaagacaaaggttggagcattctctgtattgaaggagcttgttgttgtactgccagactgtcttgctgatcatattgggtcacttgttcctgggattgagaaggctttgaatgataagtcatctacctccaacctgaagattgaagcccttgtatttacaagacttgttatggcttcacattccccagctgtgtttcatccatacatacaggccctttctggcccaatattgtctgctattggagacagatattacaaagtcaccgctgaggctttaagagtctgcggagagctagttcgtgtacttcgtccaaattttgaggcacgcactctagattacaggccatatattggtccaatctataaggctatcttggcccgcttggcaaatcaggatcaggatcaggaagttaaagagtgtgccatatcttgcatgagccttgtggtattcacgtttggtgatggtctccaaagggaactgccggcatgccttcccattcttgttgatagaatgggtaatgaaataactagacttacagcagttaaggcgtttgcagtgattgctaaatcacctcttcgcattgatctttcgtgtgtcctagaccatgtcatttctgagctcacggctttccttcgaaaggcaaacagagctctaaggcaggctacattgggaacactaaattctcttgttgttgcgtatggtggtcaaattggatcctcttatgaaactattattgctgaactttctacgctcattagtgacatggatttgcacatgactgctcttgcgctggaactttgttgcacgatcatggtcgatagaaaatccatccaaaatgttggtcttgcagtgaggtacaaggttttgccccaggcccttattttgatcaggagtgctctcttgcaagggcaggcactacaggcactgcagagattttttgcttcactggtccagtctgcaaatacaagctttgacactttgttggattctcttatttctactgctaaaccatcgcagtcaggtggacttgccaaacaagcattgtcttccattgcacagtgtgttgctgtgttgtgcttagcagctggggatcagaagtgtgcctcaactattgaaatgcttaaaggcattttaaaagatgacagcactactaattctgctaaacagcacatggccttgttatgtttgggagaaattggaagaaggaaggacctcagcaatcatgctcaaattgagaatattgtcattgagtcatttcagtcaccttttgaggagatcaaatctgcagcgtcatatgctctcggaaacattgctgttggaaatttatcgaagtatttgccttttatcttgaatcagattgacaaccaacagaagaaacagtatctattgcttcattcactgaaagaggtaattgcacggcagtctgttgaccatactggccagagtgagctccaggattcaaacattgagaagattttggcattgctctttaatcactgtgaaagtgaggaggaaggagttcggaatgtagttgcagaatgcttaggcaaaattgctctgattgaacctaggaaattaatccctgctctaaaggaacgcacatctagtcctgctgcaaacacaagagctacagttgccattgctataaaatattcaattgttgaacggcctggaaaaatagatgaaattatgtactccgagatttctaccttcctgatgttgattaaagacagtgacaggcacgtgaggcgtgcagctgtgctggccttgagtacagctgcccacaacaagccaaatttgattaagggtcttcttcctgaattattgcctcttttgtatgaccaaactgttgttaagcaagaattgatcagaacagttgaccttgggcctttcaagcatgttgtggacgatggtcttgaactcaggaaagctgcctttgaatgtgtggatacattgctggatagctgtcttgatcaagtgaacccatcatcatttatcgttcctttcctcttatctggtttaggtgatcattatgatgtaaaaatgccttgccatctgattctctcaaagctagcagacaagtgcccttctgctgttctggcagttttggactcattagttgaccccattgagaaaactataaatcacaaacccaagggcgatgcagtgaagcaagaggttgatcgcaatgaagacatgattcgaagtgctcttcgagcaatcgctgctctaagccgcataagtggtaatgattacagcatgaggttcaagaatctgatgaacaagataatggcctcacctccgcttgctgacaagtacaactcggtgcgcagcgagtaagagctgatctttttgtatatggtagaaaatagttggagccgacttggtatatgtgccactgcctattctgaggtgaagattcaacccagcattgccctatatttttctggtggagctagtccgaaacactgaacgatacagctgagactaagaggtggtttgaaaatttgcgaacacaaatggctggttggaagctagactttttttttttgtcttgtacaaagtatggcggcaattcactagattcagtaaagttggattatatttt

SEQ ID NO: 18745 - DNA, 1268 bp, Oryza sativa
  ref <308>: DATABASE ACCESSION NUMBER: AK069129
  ref <309>: DATABASE ENTRY DATE: 2001-12-06
ggcccgcatggccgcatcccctcctccctcgtctcgccctctccctctctcgccgccgccgccgcctccgcttcgcgccgtcgctatcgtcgtccgcatcgcctcgcgcctcagcctccgcctccgtcttcccctagcgccgccgcctccacctccgccgccgtcgacgtcgccgttgccgtctctgagcgcctccacctccttctccctcgcgtcgccgtcgtcgccgagcgcggacttcgaggcagacgcggagaaagcgacgaggcgaacgctcctctcctcttccactctcgtctctcctttgcctacgaggagctgtgcctcgccgccatcgtcatcgtcgtcaacctgccgccgtcgtcgtcaactggccggcctagccgctcgccgccatcgcagtggccagatctgatggcacgaactcaaggccgcctgatctgatggcggtgagctcgtggctgccgatggttaggcggttggtggagcaaccattgtcctcccaccaaccggcttcaccctttccgccgccatcgacaccttgtcgctgtgttggacgaggggctccgcctcttcacgcgcagccagccgctgcgtccgatagaatcctcctcacgcgccgcgaaccatcgatggaccagctgaaggagctcgggtgggccaagcggtggagctcgcagccatacgtgtcgtgccgcacgacatctctgcaagagctcaccaggcttgggataaagcacgtggagaacctggtgattccgagtgtcagaaatgatgattggggctttttggttccttacttgattggaagcatctcattgatagtattagctatcggaagcatttcaccaggtcttctgcaagcagcaattggcgcatttttaactgtttttcctgactatcaagacagagttgctaggcatgaagctgctcattttttggggatagttctctcgtgttgcactccaggtgtttgtagttttgccttacggaagagtagtttcagttctgctccatggcttgcagtggttgattactaggggttgatcactagaggtgtgattcatgcttgtcagtactggctgtggtccagtatatgaatgatttgaatgctgtaagaggaacaaaccagaagaaaacagatcggggaagcttctggacctggctcttctcgctgtttggttgttgcaaaaaggaccaagagctgggattgccagtatagctgaagcatttcatctgtatgtatgttgtgaattactcaggtctgc

SEQ ID NO: 18746 - DNA, 1528 bp, Oryza sativa
  ref <308>: DATABASE ACCESSION NUMBER: AK069130
  ref <309>: DATABASE ENTRY DATE: 2001-12-06
gagcgcacgcacacacgaacggccgagcacgcggccgccggcgccggcgcatcggcggcggcgtacgtgcgaggaagaaggccggccaccataccgatcaccattgtagcgccgcaggaggtgataatctgggtcgtcgtcgtcgtcactgccgacgtacggcgcctagcaccggctgctgggcgagcgagctcgaccgcgttcgcgtgaattaatggcggggtgcctgtggccgtgcgtgaccggcggcggcgcggcggcggacggggcggggagcctgttccggtcgaaggcgaggggccccgtggaggtggtgcggcacgcgcgggagctcctcgccttcctcgccgagaaccacgacgcgtgcggtgacaagcgcgacgtcaaacgcgaacacaagatggtagatctagccaaaagcatcggggagatgaaatccatcctttatggaaatggcgaggcagacccagtcgatgaagcttgctcgcagttgacgaaggagttcttcaaggagaataccaatagtcttcatctactagttgtttgccttccatacatggacctggaaactcagaaggatgtcactcaagttactgcgaatttgctaaggcaaaaggtagattataggatggttgcctctgattatttggaagaaaaccaggatcttttggatgttctaatgtctgggtatgacaacatggacattgcaatacattatagtgcaattctaagggactgcatacggcaccaagtcgctgcaaggtatgtattagagtctcagcatatgaagaaattttttgattatatacaatatccagacttcaacatagcatctgatgccttcaagacctttaaggaactcctcacaaggcatagatcaagtgctgctgagttcttttcaaataattacgattggttttttccggaatttaactcaaaattgctgtcatcatccaactatatcattcgaaggcaagccactcagctactaggagacattcttctggataagtcaaacacaacagcaatggtgcgctatgttagctcaaaggataacctcataatactaatgaaccttttaagggagcaaagcagggccattcaagttgaggcttttcgcgttttcaagctgttcacttgcaatccgaagaagccacctgagatcgtgggtatactggtgacaaacaagagcaaaatcctcaggttcttggcagatttcacaatagaaaaagaggatcagcagttcgaggccgacaaagcccaggttgtcaccgagatatcggccatgtgatcaaacaaccggagaaagcgttgatatccacagagagtggagttcctcttgttttcgttttcttcatcataatctaaccaaatggaaaggaaatcaagctgattctactgctacgatgcttgtggtttgggccacttgtccattgaacttgtaactgggccgtttgcttgatagcctctactactactaatgtgtgcgcccttcctctcaaaaaggaaaaaaaaagagaattttgcc

SEQ ID NO: 18747 - DNA, 4037 bp, Oryza sativa
  ref <308>: DATABASE ACCESSION NUMBER: AK069131
  ref <309>: DATABASE ENTRY DATE: 2001-12-06
ggacggcgataagcggctccttctcctcctccgcgactccggcgacggcgacggctgcgcctcctcctcgtcctccttccactccccatcgctagccttgcgctagacaaagcgcggaaggtggtggctgcctcgctgcaaatgagccaccgcaggcgacgtaacgccgctggcccgccgcctcccgaaggcatcggcggctcgtccaccgcagaggcctcttcgacgggggaggagaggccggatctgccgtgggcgtgggcgctgggatcggagcgaagggtgctcgcgctggcgctggccttccgcgcggcgaacgcgctgctggtgcgcacctacttcaaccccgacgagcactggcagtgcctcgaggtcgcccaccgcatcgtcttcgggtatggccaccttacttgggagtggaagcgtggtcttcgaagttacctccaccccttcatctttgctgctctctacaagattctttcgctgctccacttggattccccatggttcatggcgatggctccacgtcttctacaatcagtctttgcatcttttggggatctctacttatataaactttcaaaactcattttcaataatcacgttgcccagtgggcactattttcacagcttgttaactggttcatgttcttctgtattacacggactctctcaaacagcatggagacagttttgactgttactggactttactattggtttgttgcaatagagtctgtaaagggaaattcggttgtttcaaagcagcaggctgccagcaagcaaagccctccatcaagaaaaatggctctactcatagcagccttagcttgtgctattcggccaacaagtgccataacatggctatatgttggtcttttggattttattcagatgaaatcaaaatcccggtttatttttctcgaggtcgttccgctcggggtctttgtccttgccgtgacaacgtttcttgattgttggatgtatggttcccggatcatagtgccacttaattttttgaaatttaacctcttctcttcaggaggagactactatggaacacatgtgttccactggtacttcagccaaggttttccatcgatgatttggactttcttaccgttttccatttctggaattttgaagtctcgagaatggaggcttgcaggtcttattgtctgggtattagtggtttatagcatacttggacataaagaattcaggtttgttctcccggtgcttccttttatgttcatgttctcaggacataacttagctgcaatggcacaactcaagggaaaaggtcacaatgagaaaggacgactttcgaggttgaagctctctgtcattctgctcatcctaacaaatgttccaatggctttatatatgtccttataccatcaaagaggaactgaagatgctatgctttatctatcacgagaagcccatgatggaagagtaaagagtgtcctcttccttatgccttgccattcgacaccttattactctacattacattacaacctacctatgcgctttttggactgtactcctagtgaaaacaaagggaccttggatgagtcagaccgtttcctcatgaacccagcagattttgtgggcgaggtttttggaaatttatcttcgttcagtcatattgtattatttgaatctgaagaaaggcatgtcaagttgcttctgcgcaattcatttcaagaggtaaaacactgttgaatcttaaaaatctcttcttccctcagttcaataggtatacgcatttatttagtagcctgtttataaatatatgatgttttagtaataccctaaattctctaagttcgaccagtaattgtctaaaatgccttttaaattagtaatgtggaattgataccgttagatttgcaatataattttgcactagcatatgcatatgaaaattaatatcaaagtcagatattggactgctgatgtccagagggaactgattatttctaataaaaaagtggggaaaaaatcaaagctattgtccagattggcaagttcttctataaggcttacaatttagttgattcaactaaaataaagaaatgtctaaaataaaaagatgggctgcatttttaagttgtctttgcccccttcatgttttagttcttttttttatgcacgatcagatgactcccaagtatcctgttctcaagaattatgtgtccagtgtattactaaattcttttgtgaatttatgtcttcctagaaagaattgtcatcaggttgaaaggtgagcatctgacataagttctattttgctttgcaattgatggcaaaaatacaataaggttattgtttgttgcactcaggtagttaatagtttattgtagttacaatttgtgaattagctctctcttaaaatgttaaaaacagataggtagcactacattgcatgatgacatgataattaaaatattttctctcttattcttagtttttcccattccctaacatcataacgtgtgtcctgtttggcaggttaggagattttttcactcccacttcaaggttgatagagaccttcaatcgccagttgttgtttattcacagaagagtgtattgtgatcactgtggcagaaaaggctcgttagtgtactatcttgtctaacatttctaatcatgtttcaccctactttaatttatcattcgagaaatgatctatagtttgggcctttattttgatatattgattttttcccatcctttgtgatgtaattctatttctatgtattagcgccaacttccatgttttcacaaaaaaaaatcatttccataactagaggtgtgaagaagttttagaggtttaacaaaacgaagacaagagacgagcagagctcctcttctagagaaactggcgccatcccaaccagctcttcaggaacaagttccattccatccatctcaaccaagtttcaaaagtgagcaagtaacaaagaggcaaaaggtggttgttttccaggaactcttcatagtctccaacagtccaactctccatcttgacctcccagcatctttccaatcttcctctgcatcactgaagtcatccacttccagtattgaagtgccaactatgtctttctctgaagatcttccatggtgaaagtaggacaaaccatcaggcaaaacaaaaaggggacagatcattccatggcaaatctttgtgcggacatactgaacctcataaaatcatgtcaaatgtaagttaaaatcatgtcaaatgtaagttctcattgatttcctgtagtttttattgttgaacatgaacgatacatttttacaagatatttatgtcaggaaatgctaatcgaaactctgctataacctttcattggtactttcatactcatcgtctaccagtttctaaatgtagtgtcatcaagcttccactttgtccagtgatggaagggtcatactgtcatgagttttcaagcaaacatacagtttcaccgttagcactctcaatcaattgttcacgccaggtgcttcttattgcttttaacctttcagctacttctgtcgtcaatgtccgttctccccccgttgtactcaagcaacattttgccagttgagcaacatcttggaacagctctgttccaacacctaatatgttcttgtccaagatagattgaagcctgttctctttcagtgccagaaggaaaaggatgatgcaaggcttttgttttcatcagcactgtcagaataaattgccgtctttcctgtaattagctctagaatcacaactccaaaactataaacatcacttttctctgttagctggcgctcttgtaactttttaagtattctgggtctaggtagcctggagtcccctgtaccattttcataaattgtatttcatcttttggaagcatccttgatgctccaaaatcagtcacttttgctatgtacttgtcacctaggagaatatttggagatttgacatcgccatgaacgattggaggggatgctgatgaatgtagatatgctggagcttctgc

SEQ ID NO: 18748 - DNA, 2573 bp, Oryza sativa
  ref <308>: DATABASE ACCESSION NUMBER: AK069132
  ref <309>: DATABASE ENTRY DATE: 2001-12-06
gcgaagcgtatcggcttcatcgccaatcgatgatgcgacgatgctgatctgatcatctgaacccaacaaaatttctccttcaaaacctgcaagctcaccttcttctcccccagctctctcctccgatcatttgcccaaccaccacccagcccgccagccgtgcgagcgcagctttcctatttaagccgcgcctcgctggctcgctgccgctgcccctgcctcttccccgaatgctggtctctcgtcgccccgtcccctggaatctctccctttctaccttggtccgggaccgcggctcctgaaatctctctctgtccctagaaatttctgcgcgcgtcttccgttcttctccccggtttggttggttcccgagcctgtgacctcgggggcggccgaaaggttggattttgtagagcaggctttacttgcatctgggcaaagattggattttttttgtggagcgattttggggtcgttgttttttggtgcttgtttgctgaagtttggattttgggaggagtttgggggggggggggggttcggtcagatttggtgggagcggagggcatgacgatcgatttgtccatgcccgggagctccgggctcctggacgacgtaggggggaagaagcacatgaatttcttcagcaaccgctacgtgctcgcgctcacgggcgccgcaggaatcggcgggttcctctttggctacgacacaggtgtcatatctggagcccttttgtatattcgggatgactttccagcagtcagagacaattatttcttacaggagacaatcgttagcatggcattggtaggagccatcattggagcagctggcggcggctggatcaatgatacatacggccgtaggaagtctactcttgtggctgacatgctgtttgcacttggctcacttgttatgtgtgctgctggtggtccttacattctgattcttggaaggcttcttgttggcttgggtgtgggtatagcatcagtcacagcgccagtttacattgctgaagctgctccttcggaaattaggggaggtttggtgtcaactaatgtactcatgattactggtggtcaattcttctcctacctcatcaatcttggctttactgaggttcctggaacatggcgctggatgctcggagttgctgctgtgcctgcaattctacagtttgttctgatgctttttttgccagaatctccccgttggcttttctggaaggatgagaaagcaaaagctatttctgtcctagagaagatttatgactctgaccgtctagaggaagaggtagagcttcttgcttcttcttcaatgcatgaatttcagtctgatggtactgggagctatttggacattttcaagtcaaaggaactaaggctagcattttttgctggagctggtcttcaggcgttccagcaatttactggcatcaacactgtcatgtactacagcccaacaattgtccagatggctgggtttacctccaacaagttggcattgctcctttccctcatagtcgctggtatgaatgccgctgggaccattgttggaatctacctgattgaccgctgtggccggcgtcgcctggcccttacaagcttggctggtgtggtggtctccctcgccatcctagcaatggccttcatactgcagtcatcatcagatatctgttcgaatgcactcaatggtgcctgccaaggtgcactgggatggttcgcggtggcgggactcgctctatacatcgccttcttctccccaggtatggggccagttccatgggcagtgaactccgagatctaccccgaggcataccgtggaatgtgtggtggcatgtcagccactgtcaactgggtatctaacctgattgtggcacaaacattcctctcgatcgtcgggttggttgggaccggcctgaccttcctgatcatcgccggaatagcggtgctggccttcatcttcgtggctctctacgtgccggagactaaaggcctcagctttgagcaggttgagctcctgtggaaggagagagcatggggaaaccagggcaatcgccagagccttttgggcgctgcaccgtagtgagccagctctcatcctgcttgcccttgctggcaagggtcggtggctggctccctttttaagatggccgtgccaccctcagtttctatcggctctctctagctgggaagttttaggaagatctggatgcagaccaaattttattacgtggtagcgactagatcattgttctgtcacctggcatgtattgtcaatttctcatggtggaaactgggataatttcagcattgggtgggtgaagaatcaggttgtgttggtgtcgaatcttgtatacatgggaaggactgtacgagctatactggttgtgcattgccgtcacaagtgtatagttccggtgctagatgtgccggggagacggttaaaaacctgttatggacagaaacaggaatgaaaattatcgctttaatattcttgctcgttattcctccaccaggtgtatctgacttggcaaaccttgagagttatatgcagatgatgtattttgt

SEQ ID NO: 18749 - DNA, 2909 bp, Oryza sativa
  ref <308>: DATABASE ACCESSION NUMBER: AK069133
  ref <309>: DATABASE ENTRY DATE: 2001-12-06
gggttggaacacaggtcgggttcagagtggcaatcagtaggtcgtcccagggccagcgccgatccccatccgtcccgcgagcaagcagaggcggcgccgtcgctcgtcctgctgcttccgccgcatcctccgccaccgccgcctgcgccgatcccccaaccgtcccgcgagcgagcgagcgagcgagcaggggcgccgtcgttcgtcctgcttcttccgccgcttcctggtactttaccccagaatagcagtgatgtgtcaaaatctatagttggtcaggtgcaagcagaagagcaggaaggaaatagccaggcaaaccaacaagcagtgcagcaacatatgattttagcaggccagttgtctcagccaaaatcgttaactgaaggtttggaaaataatgtctacccaattaacggaacacgatcaccagccagaacaagaaccaccacattctgaaaaccatctgaaacaggcagagccaaacagcttccagttcgctgaaaaggaaacaggctatgctggtctacagaatttcacaggccccaaggtggatgtgggtcagacttcaggagagcagcagcatgtaaaacagatggtcggtcagcaagcaccacctggtgcacaggacgcaaggaagcggggataccaaccgtctataccatttaatatgttgattccaatcctacaggctcatcttgacagagacaaggatatgcagcttcaaactgtgtgggcaaaacttaggcgtaatgaagttcataaagatgatttcttgagagttatcaggaacatcgttggagatcaaatgctaaagcaagcagcccataaagtttttgcacagatgcaagcccaggcacagagaagtggccaggcaaatgcaaatcagcaggctaatgcaaatcagtattctttacaatcccaagtatcttccagcggttcagctcaattacatgatcagcaagttcacgtgtccaccacacctaatcagggccaaaaaaaccaagcattgtcttcatcccaaacctttgtgcaatctggcactcaggtgcagagcagtatgactgctcatgataattccatccaacggccagatgcaaagggaatgcatgttacgccgaaccgacctcctgttatgaactcagcaatttctgcacaaacaatgaacaaacagcagcaacccacacaagtccagcaagcctcacagcaaatatatggaacaactaatcgccctgaccagccatacactaggccaatcggtggttcaacacctcttagctcactgagttcagaatcagaaataaggccttcctctcatcctgcaaaaatggagattcttccttctcatccaatgacacaacaaaatgcagctgcgcagcaaatgcaacagaacaaggatgtgaagactaatgcttctaatccaaggagtaatgcaaagcaagattcggggacaggtaagggtcgtgcagttggcactggaggttcttcaacgaaatcgcaagggaagcagggcccccctaacttttccacacctcccgctgcaaagagtaacaagaaaactgctgggcagaagaagtcattggaaacatcaggctctacaccaccccctcctagcaaaaagcagaagacttctggaaccttccaagaacaaagcttcgatcaactaaatgatgtcacggctgttagtggtgttaatcttagggaagaagaagaacagctactctctgccccaaaggaagagagctgggcctcagaagaagcaaggaaaattgcacaggaagaagatggcaagctttttctgcagaaaggcccacttctgaagaaactagcagcaatcgttcctaaatgcaatttgaagagcattggtggtgatgttgagcattgtttatcaatgtgcgtggaggagcgattgcgaagatttatcagtactctcataagagtttcaaagcagagaattgacacagaaaagtctggccatcaactagttataacatcagatgttggccggcaaattttgcggatgaaccagaaagctaaggaagaatgggataaaaaacaagcagaggaaacagacaagaacaagaaacaaaatgaggttgacggcggtggcactgtggaattagacaaggaaaaggaggaaactcgttcaaagaatgcaaagcccaacaaagaagaagatgacaagatgagaacaacagctgcaaatgttgccgcccgacaggctgttggaggaagtgatatgctgtccaaatggcaactgatggctgaacaagctagacagaaacgcgaaggccttgatctggctgcttcttcacagcgcgggacagcttccaggtcgcatatggctgggaaaggtcccacagatcaccacgaagcttcgaagaggacccattctgcagcgtttggaactggaggcatgaacaggcaaggcaggggtccatttgcagcgtctcatccaaaaggaccacaaagaactatttctatgaaggatgtaatatgtgtcctcgagagggaacctcagatgacaaaatcgcggctgatatatcggctctatgagcggttgcctggagattccaccagagattaggcttgaatcgtcatttatttggtgtatgtatgcacatttgtgtaacaatatcgagctataacttattgctctactccttccattttctctggtttggagttgcgaggtgtgggtgggtgtgttgggggaggggggggggggacaaaactagtgtaacaagttagctgacatggtactcttagaatatgaacacataagatgtacttccaaacaaaatggtcatgtaaagattatcacagtgtaacagatggcaagattgcccattgctgcctgctggtgcatgcgcttgctcattgtactgttataattcagtgagataatttgg

SEQ ID NO: 18750 - DNA, 3183 bp, Oryza sativa
  ref <308>: DATABASE ACCESSION NUMBER: AK069134
  ref <309>: DATABASE ENTRY DATE: 2001-12-06
ggcgcgcgcacaaaaatactcccagccccccacctcccccactcactcggatcccaccaccatttcgaacggcagcgccctcccctctcctctctcctcgacacacaaccgccgccgccgccgccgccgctgcgtccggtttccccgcgtcgatcgatcgccgtcgccgtcgccggccgggagagcccgccccccctagatcgatccccaaggccgggctgggtcggggccccgagcgatggaggcgatcgaggagctctcggagctcgccgacgccacgcggcaggcctccgcgctgctcgccgacgacgacccgtcggagcagcccgcgcagcggcgcgggggttcctccttcctcaccgtcgtcgcgctcggcaacatcggagcggggaaatccgcggtgctcaatggattgatcggccaccccgttctccctaccggggagaatggtgcgacgagggccccaatatgcgtagatcttcagagagatgcatcactcagcagcaaatccatcatgctgcaaattgacagcaagtcgcagcaggtttctgccagttccctcaggcattcgctgcaggaccggttaaccaaggccggtagttttgggaaggggcgatcggaggagataaatgtgaaattatgcacgagcactgcccctccattaaaactaattgatttaccggggattgatcagcggagcatggatgaatcaatgattgggaactatgctgcacgcaatgatgcaattttgctagttatcgttccagctctacaagcacctgatgtagcatcttctcgagctctaaggattgccagagaactagattcagaaggtagtagaactattggtgtcgtaagtaaagttgatcaagtagccgaagaccagagagctcttcttgctgttcaggccctgcttgtaaaccaaggccctagaactgcagctgacattcagtggatagctacgattgggaactctgttcctattgcctctgttcagtctggagtaggttctgaatcctcaccagaaactatttggaaagttgaagttgaaagccttaaatctatacttcttggatctccgcaaagtaaacttggtagggaggctttagttgattcacttgctaagcagataagaacacggataaaagttagactcccaaatctcctgaatggtcttcaaggcaagtctcaaataatccaggaggaattagcaaaacttggagaacagatggtccaaagttcggaaggaactcgggtcactgctttaggactttgccgggaatttgaggacaaatttcttcaacatattactggtgttgagggtggaggttggaaagttgttgcaagctttgaggggaagttcccaaccaggatcaaacaactccctctggacaagcattttgatatgaaaaatgtgaaaaggattgttcttgaggctgatggttaccaaccatacctgatatcacctgaaaaaggtttaagatctcttataaaaggtcttctagaattagcgaaggaaccatcgatactccttgtggatgaggttcaccgtgtattgctagatatagtatcagccacagcaaatgccaccccaggacttggcagatatcctctatttaagcgtgaggtaattgcaattggatctgctgctttagatggctttaaagatgaggctaaaaagatggtaattgcactagtggatatggaacgagcattcgtgcctccccagcattttatccgcttgttgcagagaagaatggaaaggcaacgtcacgaagatgagctgaaaagtcgctcaacaaagaaggtttcagatgcagaacctagcaaagccacaagtccacaaacccaaacaaaagaaggatcaaatttacaagtcttaggacctgcaggagaaattactgctggtttccttttcaaaaaacgtgcaaaagcaaatgactggagtaaccgctggtttgttctaaatgagagaagtggaaagcttggttacaccaagaaacaagaggagaggcattttcgaggcgtcatcaatttggaggagtgcaatcttgaggaagttttagatgaggaagatcctacgagaagccttaaagatcctaaaaagccaaatgtgccagatattggaactcctggtctcattttcaagattacccataaggttgcttataaaaatgttttaaaagctcacaaggctattatactgaaggctgaaagtatggcggaaaaaactgaatgggttactaagattaggagcattgttgaccaaaaaggagcttctgcaacgagtggtttaccaatgaagcaaagccattcggatggttctctaatgtccacttctaaaaaggatggttctctagacacgatgcttagaaagccagtagatcctgaggaagagcttaaatggatatctcaagaagtccgtgggtatgtggaagctgttctcagcagtcttgcggcaaatgtccccaaggctgtggttctttgccaagttgagaaggcaaaggaaggcatgcttaatcagctctatacttcgataagcatgcgaagcgtagaaaggattgaagagctaatccaggaggaccacagtgtgaagcacaggcgtgaaaaaatcaaaaagcaatcatcacttctttccaaggttactcgtctgctccgtatccatgataatcgctcagctacttctaattggtcgaatgattctgctggatcagatagtaatccagggagcagtggccagtctggagacgaatggaaatctgcatttgatccatcacaagatgttgatccatctgctgctggaacaaacacggggagccgccgcattccgagccgaatgccgccgccacctccacagggtggttgatcagttcgtagttttctggtcctggggcttctgttttctcagctgcagggagtacattccattatactattgctctaggtgctcttgatcaatggctaatttgggtttcaagaagaaaacagttaacgggaattgaccggtgaagcgttcataggcctttgaataacttgttagttgaagatagaatgtcagtaggacctcgaatattgttaggcacataaccgcagtacgtttatctctgtgttttttttttctcatggaactctggcaaaatcttgtatttcatgataattatgttgtttttgagtattctaccg

SEQ ID NO: 18751 - DNA, 1017 bp, Oryza sativa
  ref <308>: DATABASE ACCESSION NUMBER: AK069135
  ref <309>: DATABASE ENTRY DATE: 2001-12-06
gagtgtcacacgacgcctccgaattcattttcgattcctctcctctcctctccttccaccgcctaacgaaccactcgccatcaaagcccccagagagcgcgccatggcggcgcagcggcggtggccgacgtcgacgctggcggcggtggcagtcgccgtagtagtactactggcggcgtcggcggcgacgacggcggaggcgcagtcggcgccggcggcggcgccggggccagcggggccggtgctggaccaggcgtgcctgacggcgctgctgaacatgtcggactgcctgacgtacgtgcagaacgggagcagggcgcggcggccggacaagccgtgctgcccggagctggccgggctggtggagtccaacccggtgtgcctctgcgagctcctctccggcgccggcgactcctacggcatcgccgtcgactactcccgcgccctcgccctccccgccatctgccgcgtctccacccctcccgtctccacctgcgcagcctttggattcaatgttccaatgggcccaacgccgtcgccttcgccggcagccgtctcgccctccggtgagggcccacagttccctgggacctcaccgttcgcctcgccgccgtcgacggcgacgccgtccaccaacgccgccgccgccggccgctccggcgaccacctcgtcgccgtcggcgtcgccattgccgccgccgccgtcgtcgtcgccgggatgtttagaatcgtttgattgatccgctcaactagctatcattttctgggggtgatgtggctgtttgtttgtatggtccttgctgatcataatcaaattcctttttatttaaagacgtattaagtaactataaaattccttttgatgtaaaacttgctggattccatgacatttgtccttgcaaggacgtatatacttatcttgttcatatgtttgatgtgatgactcacaagtcgtcatgtaaccacctagtgtggtatgtgagagatactagtactttttctggttttatgttgtct

SEQ ID NO: 18752 - DNA, 1269 bp, Oryza sativa
  ref <308>: DATABASE ACCESSION NUMBER: AK069136
  ref <309>: DATABASE ENTRY DATE: 2001-12-06
gtgagagttcgagagcagggaaatctgaaatttggagagaccaaagatggcagcgacgaacaagaagatcgtgctgaggaaccacgtgacggggttccccaaggagtccgacatggagctcgtcgccgcgacgggcgccgcgccgtccagggtgcccgagggcacggacggcgccgtcctcgtgaagaacctgtacctgtcctgcgacccctacatgcgcggccgcatgtccagccatgacggctcttacgtcgacgctttcgtcgtcggcgaggctatcaccggctatggcgtcgggaaggtggtggactcgagccacccggggttcaaagccggcgacctcgtgtggggaatgacgggatgggaggagtacagcctcatcaaggatcccagcagggccctcttcgccatccgccatcccgacctgccgctctcctactacaccggcctcctcggcatggcgggcttcacggcgtacgtcgggttccacgagatatgcgcgccaagggaaggcgagagggtgtacgtctccgccgcgtcgggcgccgtggggcagctggtgggacagttcgccaagctcatgggctgctacgtcgtcgggagcgccggctccgacgacaaggtgaggctgctcagggagaagttcggcttcgacgacgccttcaactacaagaaggagagtgacctgagcgcggccctgaagcggtgcttcccggaagggatcgacatctacttcgaaaacgtgggcggcgcgatgctggacgccgtgctgctcaacatgcgggtgcgcggccgcgtcgcggcctgcgggatgatctcgcagtacaacctggagcaccccgaccccgtccacaacctgacggccatcgtcacgaagcggctccggatcgaagggttcatcgtgtccgaccactacgccaggtacagggagtacgaggagaaggccgcgcggtatgtgaaggaggggaagatcgcgtacgtggaggacgtcgccgaagggctggagaacgcgccggccgcgctcatcgggctcttctccggccgcaacgtcggcaagcaggtggtcgtcgtcgccagggagtaaccgcgagatgtgtagttaaacgtgtagcggtatggttacacttcactagtgctgtgcattgtcctgatggctgatgctgtgtttagatgtgtcaagcttagctgaatgcgttggattttgtatcttgaacatcaataacggtgtattttaacaagtgtttagttgttttgaatacacagtaagac

SEQ ID NO: 18753 - DNA, 2069 bp, Oryza sativa
  ref <308>: DATABASE ACCESSION NUMBER: AK069137
  ref <309>: DATABASE ENTRY DATE: 2001-12-06
gtggctgcatcaacagaaaaaaaggctttccagtttgtgccatctgttcattcgtgtgtgtgtgactcaagtgaaaaatacgtaagtgtttgtgataaacactacagaagagagggagtgattccaacagcggcgtcaggcagaggtgagcgccgttcgtcttctccacgccgaccttgttccgatcggcacctcctcaatgctgccacctcatccgtccatacagcgccgcagccatcgcctccccgactcccgtcgttgtccaccccgtccccttccacgaccgtcgtttataccccccaccgctgttaatggagtgcttgaggtggaggagaggaaggcgcagaagagctactgggaggagcactccaaggacctcaccgtcgaggccatgatgctcgactcccgcgccgccgatctcgacaaggaggagcgccccgagatattgtctttacttcctccttacgaaggaaaatcagtactggaacttggtgctggaataggtcgcttcactggagaactagtgaaaacagctgggcatgttcttgcaatggatttcattgaaagtgtgattaagaagaatgaaagcataaacggtcaccacaagaatgcatcctttatgtgtgcggatgtcacatgtccagacctgatgattgaggataactccattgatctgatattttcaaactggttactgatgtatctttcagacgaggaggttgagaagctagtaaagagaatggtaagatggctaaaggttggcggctatatcttctttagggaatcttgtttccatcagtctggagattcaaaaaggaaagtgaatcctacacattaccgggagccaaggttttacactaaggtgtttaaagagtgtcaagctcttgatcaagatgggaattcctttgaactctctgtacttacttgcaagtgtgttggagcttacgtaaaaagcaagaaaaatcaaaaccagatatgttggctatggcaaaaggttgattcaacagaagatcgggggtttcaaagatttttggacaatgtgcagtacaaagccagtggaatattacgctatgaacgcatctttggagaaggctttgtgagcactggtggaattgaaactacaaaagaatttgtggacaggctggatctcaaacctggccagaacgttcttgatgttggatgtggaattgggggcggtgatttttatatggctgacaagtatgatgttcatgttgttggtattgatctttcgataaacatggtttcttttgcacttgagcgtgctattgggcgtaagtgctcagttgagtttgaagtcgctgattgcaccaaaaagacatacccagacaacacgtttgacgtcatctacagtcgtgatactatccttcacatacaagataaaccctcactatttaaaagtttcttcaagtggctcaaacctgggggtaaggtcctaattagtgattactgcaagtgccctgggaaaccttcagaagagttcgcagcttacattaagcaaaggggttatgactttcacgacgtcagggcttacggacagatgcttgagaatgctggtttccatgatgtcattgctgaagaccgcaccgatcagttcctcgatgttctagagagggagcttgctaaagttgaaaagaacaaaaacgagttcgtctctgatttcagccaggaggactacgacgccattgtgaatggatggaaggcaaaacttcaaaggagttctgctggtgagcagaggtgggggctgttcatcgcgaccaagtgatgaatcaagatgcgcagcgtgggggggactcgcaaataaattggtttcatgccgtgtgtccatcatattacatttttgttgtcaagttatttaatttcgaattcggtgtacttcttgtggagcttttgatgttgttgggacaaaaaacaaaaataaccagagttcagcccgcgttgttttcgacttcttgagctggaaagttcagttgcataaagaaaattcaggtgtactcggtgtgaaacttttgatgttgtttggatataaacaaaaaccaaagttcggcccc

SEQ ID NO: 18754 - DNA, 1460 bp, Oryza sativa
  ref <308>: DATABASE ACCESSION NUMBER: AK099086
  ref <309>: DATABASE ENTRY DATE: 2002-08-28
aggccgtggtgggcccaccgtctagcgaaaaccacccccgccgccgcgcgtgccacgtttactcccgtgggccccgcaacgaggcacaaaccctaggccgcttatataaacccgacccgccccgctccggtgatcggatccccacagctttgcgtttgcactcctctcgatctccattcgtttttgagttcctcgtttgctccgcctctctttcactcatgggcaagattaagatcggaatcaatgggttcggccgcatcggcaggctggtggccagggtggcgctgcagagcgaggatgtcgagctcgttgccgtcaacgatcccttcatcaccaccgagtacatgacatacatgttcaagtatgacaccgtccacggccagtggaagcatcatgaggtcaaggtcaaggactccaagaccctcatctttggcacgaaagaggttgcggtgttcggctgcaggaaccctgaggagatcccatgggctgcggctggtgctgaatacgttgttgagtctactggtgttttcaccgacaaggacaaggcagcagctcacttgaagggtggtgccaagaaggtcgtcatttctgctcccagcaaagacgcccccatgttcgttgttggtgtcaacgagaaggagtacaagtctgacgttaacattgtctccaacgctagttgcaccaccaactgcctggctcctctcgccaaggtcatcaatgacagatttggcatcgttgagggtttgatgaccactgtccatgccatcactgctacccagaagactgttgatgggccctcgatgaaggactggagaggtggaagggctgctagcttcaacatcattcctagcagcactggagctgccaaggctgtcggcaaggtgcttcctgccctcaatggaaagctgactggaatggctttccgtgttcccacagtcgatgtttccgttgttgatctgactgttaggcttgagaagcccgccagctatgaccagatcaaggctgcaatcaaggaggaggctgagggcaagctcaagggcatccttggatacgttgaggaggaccttgtttccactgacttccagggtgacagcaggtccagcatctttgatgccaaggctggcattgctttgagcgacacgttcgtgaagcttgtgtcctggtacgacaacgaatggggatacagcacccgtgtgatcgacctgatccgtcacatgcacagcaccaactagacgagccctcctcatggaggcctgcagatacaggggagttgtgttttgccccagagaagagtagatgaagcctcttccgagaataaattttaaattctgtatggttttatgtccgtcgaaacctaaaactatacttggttgtatcatggtggttggttgggcctggtcatggctcatattttgtgtctaattttcttgcgcttaatctaaatcgaagtgttgcttcgc

SEQ ID NO: 18755 - DNA, 1207 bp, Oryza sativa
  ref <308>: DATABASE ACCESSION NUMBER: AK069138
  ref <309>: DATABASE ENTRY DATE: 2001-12-06
gacacgaatcggacttcgggggctcttccgccgccgccgccccgccctcgccgccggcggcccggacgatgttgggccacctccggcgatcctcccaccgagtactcattgccaacctcgccgtctactcgatacagagttcacaaattgagttcatagcaggctggtgtagcaaccataccaccagaaatttctctgcagatacaagtaatagagtttcaaatgatcgagggcatcaatcaagggagttgaaaccaagtcttgtgaaggatgatgttgcaatcatcgaacgcatacaaaacagtacaaaggaattgagacaaggcccagttgggaaaaatctgtcatcggcggagaaaaggaaatttcttgtcaacactctgcttgacctggaagattcaaaagaaggtgtttacagcactctggatgcttgggttgcctttgagcaggattttcctgtggcctcaataaagcaagcacttgtagctcttgaaaaggaggaacagtggcatagaatcgtccaggtgataaaatggatgtcgagcaaaggacaagggaagactatcagaacatatgagcaattagtgtgtgcacttgagaaggataatagagcggatgaagcttgcagaatctgggagtttaagatagcccatgatctacaatcagttccatggcggttttgccgtcttatgttgggtatttactacagaaataataagctagatagacttgtcaagctcttcaagaatcttgaagcatgtggccgtaaacctccaagcaaagatatcgtacggaaagttgaagatgcatatgaaatgcttggtttagtggaggagaaaaaggaattgcttgagaaatacaaggatttgtttgacaagccatcgagtaatgacaaaaagaaaggccggcagttcaaaaaggttgagaagaacatcaagccggcttagacatgtgatgggacacgcctgcacctctaagcttagagcatagaacggaaacatctgaatagaaatctgccagtgaagttgttactctttcctttgggatgagaatctgattatcaacagttaagattagaagtatgcatggtagtgcagttaacattgttgtgagtcattttccttcgtccagatttgttgctgacagtgcatccatatataatgggatgagaacctaatctaatgcagcaagtaatagtatttgccgt

SEQ ID NO: 18756 - DNA, 1474 bp, Oryza sativa
  ref <308>: DATABASE ACCESSION NUMBER: AK069139
  ref <309>: DATABASE ENTRY DATE: 2001-12-06
ggttggtttaccaccaccacccggtgcggttcggtgatagttgcaaacctttctccggtctacaaagacctcagctttcatacctccacttcttctttcttccacaaagcccattccttttcctcccgttcttctcccctcccttctttttccacccactcgaatcctcccttcacattctagttctagctccgcacctttgctgcgcgcgcggatttggttcagggtttggaaatggcaatagacgatgaatcgccgctcagaatcaataccaccagaggcggcgccatgggaggaggaggggagtgcgacggggcggagaaccagcggtggccgccatggctgaagccgctgctggcgacgagcttcttcggccaatgcaagctgcacgcggactcgcacaagagcgagtgcaacatgtactgcctcgactgcatgaacggcgcgctctgctcgcagtgcctctcctaccaccgcgaccaccacgccatccagatacggaggtcctcctaccacgacgtgatccgggtgtcggagatacagaaagtgctggacatcaccggcgtgcagacgtacatcatcaacagcgcgcgcgtcgtgttcctcaacgagcgcccccagccgaggcccggcaagggcgtcaccaacacctgcgaggtctgcgagcgcagcctgctcgacaccttccgcttctgctccctcggctgcaagatcgtcggcacctccggcgactaccgcggccggaagaggcacgccggcggcggcatcaagaagacgaagaagctgcacaagggcgcggcggcggtgccgtcggactcggacgactcctccacgaccacaagcggcgggagcgacaagagcagcgtggtgcagagcttcaccccgtccacgcctccggcgaccgccaacagctaccgcaccggcaagcgtcgcaagggcgtcccgcaccggtcgccgttcggcagcctcatggtggagttctaaagcagggcagaagcaatgccgccatgccggcctcgcccccgaaacagtggtacactgtagcatacacatatccatatctatctctatagttatagcatacatagccagtgaaaaggaggagcttagtaataacaggatcccccattgcacccctgtgcttctggatgaggaggccggtgcaaatgcaatgtgggacagttacttcatagttacagttactgtgctagtaacaacggtttgggtttgggttctctcttgtggaagaggagaggaggtggtagttactccctgtcataactactaagttttgctgaaaccttataggtctttattactcttttagttactctgtgtttgatatggtagatgaacatatatgtatatcacagatggtggggggaatggtagtaggagatggtgctcccggtgttcatattcgtgcttgcctgtaataaagatgagaatgctgctcctgatggccttcaatgtc

SEQ ID NO: 18757 - DNA, 1647 bp, Oryza sativa
  ref <308>: DATABASE ACCESSION NUMBER: AK069140
  ref <309>: DATABASE ENTRY DATE: 2001-12-06
ttggaagagagagagaaagagagagagagagaggccgcttctctagtctagaccaaaggaaggaaaccaaccgagaggcgaggcgaggagaggagaggagaggagaggaggaggaggagggaggagaagatgagagagatcatcagcatccacatcggccaggccgggatccaggtcggcaacgcgtgctgggagctctactgcctcgagcacggcatcgagcccgatggcaccatgcccagtgatacaacggttggcgtcgcacacgatgcgttcaacactttcttcagcgagacgggcgctggcaagcatgtgcccagggccatctttgtcgacctggagcccactgtcatcgacgaggtgcgcactgggtcgtaccgtcagctcttccaccctgagcagctcatctctgggaaggaggatgccgctaacaactttgcccgtggccattacactgttggaaaggagatcgtagatctatgcctggaccgtgtgcgcaagttggcagacaactgcactgggctgcagggattcttggtgttcaatgctgttggtggtggaactggatcaggacttggttctcttctgttggagcgtctctctgttgattatggaaagaagtccaagcttggcttcacaatttacccttccccccaggtctcaacagctgttgtagaaccatacaacagtgtcctctccacccactccttgcttgagcacactgatgtggcagttctcctagacaatgaggctatctatgacatatgccggagatcccttgacatcgagaggccaacctacaccaacttgaacaggctcatctcacagatcatatcttcactcaccacctctctgaggtttgatggcgctatcaatgtggatgtcactgagttccagaccaaccttgtcccataccctcgcatccatttcatgctttcatcctatgcccctgttatctctgctgagaaggcttaccatgagcagctttctgtgcctgaaatcaccaatgctgtttttgagccctcaagcatgatggctaagtgtgaccctaggcacgggaaatacatggcttgctgcttgatgtaccgtggtgatgttgttcccaaggacgtcaatgccgcagttgcaaccatcaagacgaagagaactgtccagtttgttgactggtgccctactggattcaagtgtggcatcaactaccagccaccctctgttgtccctggtggtgacctggctaaggttcagcgtgcagtgtgcatgatcagcaacaacactgctgttgctgaggttttctcgcgcatcgaccacaagttcgacttgatgtatgctaagcgtgcgtttgtgcactggtacgttggtgagggaatggaagaaggtgaattctcagaagcccgtgaggacttggctgcccttgagaaggactatgaggaagtcggcgccgagggtgcagacgacgagaacgacgatggagaagactattagtagctggttaataagtagttctctggttaatgattggtttgtcagtatactccggttccgttgcattgcatattcctgttatgtgtgtttactttttgtactgtgctaaactgttgttagcccctcgttggccatgattgttcatatcttcccattttgctgtgc

SEQ ID NO: 18758 - DNA, 1951 bp, Oryza sativa
  ref <308>: DATABASE ACCESSION NUMBER: AK069141
  ref <309>: DATABASE ENTRY DATE: 2001-12-06
gggagtgctcgctgcccgccgcccgggccccgcgcccactgccccgccgcctcccgccgctccccggcggcaggccggctcttggcgccgccgggaggagcggcagccggctccgggtgcggtcggagcggacgaggaggagggacagcccgacgatgccgacggctgcgtcggagcgcgacggcggcggccgtgccgcgctgggcaaggcggcagcggggctcgccgcggcggccgtggtgtcgctgaccgggctcgccgcggagcccctctcgccgccgccgccggcgcgggccgagtcgctcaccgtcgcgttccctgtctccaaggcccgcgaggtgaaccgggtgcagaggacgctggtggaggcgtgggggctgatccgtgagaccttcgtggatcccaccttcaatcaccaagattgggacatgagactgcagcagaccatggtggagatgttcccgctgaaatcggaggatgccgcctatggtaagatcagcgggatgctgtccacactcggcgatccgttcaccaagatcatcagccccaaggaatatcagagtttcaggattggaagcgatgggagtgtccaaggggttggggtgttcataaacaaggagcctagctctggacgcttgcttgttatggactgcattgaaggtggcccagcagatcgagcaggcctgcatggaggcgatgaactagttgagatcgatgggaagagtgtttctgggttggatggagaagctgcagctcagagacttagaggtcgtgttggaacaactgtgaaagtgaaagtgttggatggcactgaaaacgaaaggaatggtaggataagacaaaaggaggtccagctatctcgtgaggttatcaatctttcacctctatcaacagcaattatctctcataggtcggacgatggccgtgagtgcaaaactgggtatgttaggctagctgcattctctcagactgctgcagctgaaatggaaagtgccattaagaagatggaggatgagggtgtccagtcatatattttagatctgcgaaataatcctggtggtctagtaaaagcaggtcttgacgtggctcaaatgtggttggatggaaatgaaactcttgtcaacactgttgaccgtgagggaaatgtcctaccaataaatatggcccggggccattctttaacacatgatccccttgtcgtacttgtcaatgaaggaagtgcaagtgcaagtgaaatcttggcaggagcattacatgacaatggtcgtgctattttggtcggccacagaacttttggaaaaggaaaaatacagagtgtgactgaattggatgatggatctgctctgtttatcacggtcgcaaaatatctctctccagcactgcatgaaatcgaccaagtaggcatccaacctgacatacaatgcacccctgaaatgttatctttgccaagagcaccttcgctaaaagaggacgacaaagccacaaatctggagatggattcatgtatcatggtggcagagcaagcattggaaattgagaaatcaaagggatctgcttcgtaggtacttctgtaagccagaatcctttgtatgtccacatttagttggtcaggttcatagtggcatctgcagatgaaattcagcatagctccatgtataatattgtaatctaccgtaggttgtatagttagtataggctgtaatgataatatatataggctgataactgtgatgttagattgtaggcaaagaagcaccagaaattagttatctcgtcttcaggggccaaatgcccttgtcattgattcgagatgtgtcaataggaatttgtaattgtcacttgttaatcattgcatattgtctaccaatgccagtacaacatattgcttcaacagttaattgtaagtgagattcctcaaaaaggcactagtcattacatgcatgagatgatc

SEQ ID NO: 18759 - DNA, 1077 bp, Oryza sativa
  ref <308>: DATABASE ACCESSION NUMBER: AK069142
  ref <309>: DATABASE ENTRY DATE: 2001-12-06
gagttgacactgctggtcttcttcctctgcaacagtaattacacggggaatcggataaggtttttctcctctccgacgacgacgacgaacgagagagatcagagcacacgtacgtacggcaatggagtctacgctgatcacgatcacgagatcgcccatcctcccctgtccattctcgagacggcccgcctcgcccgcgcgctgcttcgccggagctcgccgtagccgctgtgccgccgcctccgcttcgttcttctcccccgccggtggccgcggcggcggggatgcaggggcgggctcctcgctctcctccgccgcggccgcggccgcgctcggcgaggcggcggcggcgggtggcggcggatccgactccgaggccatcctgctcagcgtccaggggatgatgtgcgatgggtgcgcggcgagcgtgaagcggattttggagagccaacctgaagtcacttctgccaccgttgattttaaggaagcaaaagcagttgtcttgacaacagctgaggtcaaggcggctgaagattggcaaaagcaatgtggagagaaactggcaaatcacctgggcacctgtggatttgaatctcgccttcaagagtaaggagaagccaaatgaagtcaatcatggaaatcgaagatgaagtgcagctggagacctgaagttctgtcctagggccactaatgagtgcaaggccaagtagaagttgccatgctggagaactcagcagttacagcgtttctgacattctgtgctttgtgctatgagctaaatcgaagtgtcaggatgctagcctcacattcacatttcccttgctcgtgaacttttagaaggttcatttggaggaaataaaaagaataaaaacatgaccaatcacaatgcaaggatcttgtaccccagcttctctcttcatccatgtcttgtgctgagcagttatggtgagtcgtctaaccaatggtactgttgttgtaccttgtgcatgttgatccgtactatacgtttgttgatcatcatgtttgatacacagttacacgcacatactgatagtgaaatcatcttaaatgcttgat

SEQ ID NO: 18760 - DNA, 2132 bp, Oryza sativa
  ref <308>: DATABASE ACCESSION NUMBER: AK069143
  ref <309>: DATABASE ENTRY DATE: 2001-12-06
gagctcgtgagtcgacccgaccctcctcagatctcgccggcggcagcggcggcatgctgctccccacctccgcctccgcctgccgcggcagcggccgcgcgctcctcctcgccctcgccgccgccctcctcgccctcgccacgccgcgccccgcctccgcctccgagtcagaccacaagtacaaagttgaagaaccagttaagctctgggtgaacaaagtcggcccttacaataatccacaagaaacttacaactatcacagccttccattttgtcaaccatctgagaaccctgcgcataaatggggtggtcttggagaggtcctgggtggaaatgagctgattgatagtcagattgacataaagttcttaagaaatgaggagaggggctccatttgtacacttgagcttgattctaaaaaggttcagcagttctccgatgccattgataactcatactggttcgagtttttcatggatgatctgcctctttggggttttgttggggagacggacaaaaacaatgaaaacaagcgttatctctacacacacaagagcattcttgtcaaatacaatgataacaggatcattcatgttaatctcacccaagagtctcctaagcttcttgaagctggtaagaaattggacatgacatattcagtgaagtggttacaaacagatgtgacctttgcacgccgctttgaagtatacctggattatcctttctttgagcaccagattcattggttctccattttcaattctttcatgatggttattttcctcactggtttggtttcaatgatattgatgcggacattgagaaatgactatgcaaagtatgctcgtgaagatgatgatctggagtcactggagagagatgttaatgaggaatctggatggaagcttgttcatggtgatgtatttcgccctcctcgaagtttggcctttctttctgcagttgttggcatcggcactcagctggcagctcttatccttcttgttattgtattggccattgttggcatgctatatgttgggcgagggtctatcatcacaaccttcattgtgtgctatgctcttacatcttttatttctggctatgtcagtggtggcctctactcaaggaatggtggtaaaaactggataaaggctatgatccttacagcatccctatttccattcttgtgctttgcaattggctttgttctgaatacaattgctatcttctaccgatcattagcggcaataccattcggcacaatggttgtcatgttcgttctttgggccttcatttcttttccgctggtgcttctgggaactgttgttggtaggaactggagtggtgctcctaacaatccctgccgagtaaagactattccacggcctattccagagaagaagtggtaccttacaccttctgttatctcattgatgggtgggctgcttccctttggcagtatcttcattgagatgtactttgtgttcacgtcattctggaactacaaggtttattatgtctacggcttcatgctgctggtctttgtcatccttctaatagttacaatctgtgtcactattgtgggtacttatttcttgctgaatgctgagaactatcactggcaatggacttcatttctctctgctgcatcaactgcgttatatgtgtatctatattccatctactactatcatgtaaagacaaagatgtcaggttttttccagacgagtttctacttcggttacacattgatgttctgccttggtctaggcatactttgtggtgctattggctatctagggtcaactctttttgtgaggagaatctacagaaacatcaaatgtgattagatgatcgcagtttggaagacatagcagatcacatgttgtcactggaactgtggtagagaggccaagaagtggattaatgctagatgctgattaagttttttgagccacagaccgaaggggggccatgatctcctaacttaatataaatacattcatacgcctactctcttttttgactatgtcgccctgattatgcatacctgtggtagttgaggatttggttggttttttaatcagaagtaggatgtaacattgtaacatgtgaaatattcatgcggcact

SEQ ID NO: 18761 - DNA, 3633 bp, Oryza sativa
  ref <308>: DATABASE ACCESSION NUMBER: AK069144
  ref <309>: DATABASE ENTRY DATE: 2001-12-06
aggtctccctctcctgtgcagccccgtcgcgccatccaccatgcgcgcccgtgatctgctccgctctcccctccgctggccgtcgcacgactccgggtggcggcgggaggaggagaccttggcagcaggcagacgcctccctccgcatctccgctccgctctctcccccttagaagttagaccacctccaccgccgtcgcacgccgcatcgcctctccgatctctccctggcggttacgaatcgatcccagccagaggcgaccaggtcggaactcggaagcagtggcagatggtgctgggcctgcaatggtgatatggaccaaagttggggagatcaacactttgtccgtttctatggccgcaaacgccggcaacagaatatgtgcaaagaaccggaatcaagctgcagggataaagctccatccttaagtgtgattgagcaggtgcactactgaggttctgggggtaaaggttatgttatgttatatttctttcaaaattaagttttttgtgcttcatttgtttggctaatatattttagcaatttacatggtgcagatttctatcttcagtacattctcagattgtgatttcactatatacatattgcagatctgccaaattgtttaccacagagattgcttttgtgttttcctagcatgtttgtattgtaggaaaacacgatgttgctaaccgtgagaattccgcttaactcagtcccctgttttggttaagaaaatttgtgaccaagatctttggccaaggtcagtttggatccagttatgcctctcttatcttgattcttgaacaatagaagacttttagtgatgcatagttaagaatttccgacttgcttttataacctaacacatgtatataagctttttaggaatagtaggatagctgatgcaagtatacaggagacttaaaaatcactggttgtcactgaattttaactaaacctcatagatcctagggagaaaagggttaattgcatagacatatgcagcattggcagttgggttgcatcttctttggcggttggggtaagctggcccccatcctctctgttccaccccctacaaggtacaacgaatttcctctcttccttttcatgttctcattcagtgtgtcatgatagtttatgtagagtttattcatacagtacaaagatcaaaacggacttggtgatggtgattgtattgaccaccaagcagggtaatttttcttgtgatgttcatgtttactattattcctataggcaacttatacagttagaactagactcctacactgccaccatcactgaatgcacatctggttctcccttatttttgttggtatgtatgtaagtacaagtttatgttaagcttcctttttaacaatattttgctttagtgatattcagtgcagtgcaaaaatcgtatatactgcatgtttccttggagagggtatatgctgctttatttcctataggggtatatagtgatttttttaaatacacaaacaatggaaaggtttgttttccattttcagttaatacaaagctatacattatactaactatttaagagaatatttctattatcatgtgatatattataccatgtgcccaaatatccaattttgggtgatatattagcttgctttagtaagcacataaaagatgaagcagagctttagggtgtatgatttgatctcacattacagtatctttcttgcttttccttagattatggtactagaattgatttggctttcataaggataatttgtagagatacatgactgcacataataggctcatcttctattctgttggaatacagggttgaaaaaacacataatgtactttctctcttttttagtccagtcatagtgccactatgcatgtttgttgttatgactaaaaggcaagggaacacatttcttagtgtctctgttttttcagttcttgcaatacccaagtttccaaaaaaattggtttcctgaaatatttttggggcttgcctaatgcttgaatttctcctattatttttccctccattcatatggctgcaggttcatggtattagccaattaattattgaaattggaaaaaagaattcatgtgtagtatcattgggcattaggaaattcctccaccattacagttgttgctcggatgcaatactccttcctgtgatcctgtcttccccgcctcattgtaagtggataattaatgagcaggctgtcaatgtcataaataggtattcatcttgagttatggtgatacttgtcttaaatcaattggaatctaaatcttacacatggaatttaggctgtcatgcaacgagtcttgatcctatatttctattaaactgttttcatgtgcactataaccacattactctaatggtaacttcttggtcttgtatttttgttgtattttttttatatctccatgttcatatgcactgtaggtccatggaaagacccgacagctgcatgttgtaaatatgacaagatgcaattatgtagatggacttgaactccacatttttctcatccatagccaaatgtgtgtagtgcgtcagtcatcttaagttatgccaatatatttcatttagacccaatgttttgctttttgacatgctctttcatagcaaatgatttctgtaattaaccattctctatatactacagactctgttgatttcatagccaatatatttcatttggactgttgatttgttcataaactgtaccctttttttaggtgttcacaaacagtcgtgcttgtaaaatctcttgccattttcctctttgaatgttaaatttaataatattttactcttttaggattttcccttgccaataatattggtggagaacagtggaaggtgcaaaactaatgagcatggggagaaggtttgactatatcaccaactgcaaggaagtgtgctgggatgcagcattcagatccttttctgcccattgtcaaatgggatggcaagccagttggtgatggtaagtgctatctatattcttcataaccgaaagtaagtagaattttgcatgaaaaattcatcagccattgatgcatctgaatttattcaagtatattctaattttacaaagcatcaagtagtactgctggtggtttgctgccattttataacaatttatttttaaagataattatagtagcgaatacttgatgaaatactctcttaatatctggtttattataggattgcatgcacttgaaagaattcaggatagttggtatatccttatatattctatacatatgcggttcaaatttgcagcatgttctataaactaattcataaatgacaaatttcaatttagtatgcagaatgacaaaaaatgcttttgcactgtttaacatgctttgcgaaggcatgaggactggtccagatagggttcttgttacttatgatcatacttgagctagacaatgactcctgaaactttggtaggtcttttctgtataattatatccttccatttaggtcagatttgtctccggtgattaatatagtataaaataatcaaaacgcttctccttgtaatatgaagtttggtttgtattatttgtaggtaataagttttgtttgtattcctaag

SEQ ID NO: 18762 - DNA, 1025 bp, Oryza sativa
  ref <308>: DATABASE ACCESSION NUMBER: AK069145
  ref <309>: DATABASE ENTRY DATE: 2001-12-06
gattcccacgcctcacgcggcggagagagagagagagggtgaatttgctagcgagatgccggaagccgaggccgcggcggtggtcaccggaggcggcagccgcgccgccggccccgccgactacgagcgcttcatcaccctcttctccccggagggccgcctctgccaactcgactacgcgttcaacgccgtgaagctggccgggatcacctccgtcggcgtgcgcggcgacgactccgtctacgtcctcacccatcggaaggaggacaagttgcacgacccgacgaccatcacgaacctgttcgcgatcaccgaccggattgggctgctcgccaccgggatgccaggtgatggaagggcaatagctcaggaggcaaggaacgcagctgccgagtttcgcttcaagtggggatataaaatgtctccttgtatgttagctcaatggattgcagacagagcacagatccgcacccagcatgctcagataagaccttatggagttgtttctatgatctttggaattgatgaagagaaaggaacccccgagctcttcacatgtgatccagctggacaattctttgcacacaaggccacaagtgctggtccgaaagagaaggaagttatgaactttcttgaggaaagaatgaagagcaaaccttctctatcatctggcacaacaaaagggttggcaaaatctgcgttgaaacatgtcctggagggggatttctatgcccgagaatttgagcttggatttatcaagaaaggggatccaactgtaactctgcacccagtgaaattcaagcgcacgcggaggtgaaggacgagagcagaacaaagtgctcgatataggacgatcaccagtctttcaaatcttttacagcatggaagttatgcaaaaccattaccgctaactgattactgtacgctatagctatatgtatgactgcgctcaagctgtgtcaagtgtcaattatgagttgcccccggatttacgataccaactgatgatcacacatcaacacttc

SEQ ID NO: 18763 - DNA, 1042 bp, Oryza sativa
  ref <308>: DATABASE ACCESSION NUMBER: AK069146
  ref <309>: DATABASE ENTRY DATE: 2001-12-06
ggctaccttccttactctgcccgtgaagagagagagagagagagagagagagaaggggggaagaatggcgtcgcgcctcctcgcccgatccaaagccctagcgctcgccctgtcccgcgccgacgcggcggcgccggggcccgccgccggagtgcagtggctccgcacgctgtcctccctcccccgcgatccggccgccgccgcctcccccgcccccgcgccgcgccaacccgccgtggggtcccctctcggcctctccaagattccaggatatgaacagacatctcgactcagtggtacacaagtattgcctcgttggttttctactggaacatcaaatggatcttctgctcagcaggagggagccaccagaaaggtaatggcattaagcccattagaagcaagcatcgccaaacccagaaaaggtccattgacatctgaaagctggaaagtgaagcagacagagctactaacacgatctacgtattacatgatcccaactctgcttcttgtatcaaagaacagcatcagtacgtctcttctggtcgcatcagtattccatcaagtctacatgttctacaaggagatccttctggactatgtccatcacgatatcaccaggaagtgggttttcatatacttcaagattctcctgataatcatggccaaggaaacagttgtctacttcgatttattttaagttcatggtagtttcttgagagacgtgttaggcacccatctgtacactgaaaataatcaagatggacaaatgcctgctgctggtttcctctgttctgcagttccaacttgctatctttttctgattttggctgaactgatttaaggccaactaaggcaccaaacaatgtatttcttcaagcaacgatcagtttgtccctaaaaccttagattgaaaaagtctcctgattttgtaataatggtatatatcaaccttgagttctgttaatttctcgtcttctggaatcgctcccagttgtcgtgttttgcagtaatatatgagctactgttagtctattccacc

SEQ ID NO: 18764 - DNA, 1320 bp, Oryza sativa
  ref <308>: DATABASE ACCESSION NUMBER: AK069147
  ref <309>: DATABASE ENTRY DATE: 2001-12-06
ggcatagtgcgagctaagcgcaattgggcgaacgccgcgagccgccaccaagccaaaccagagcactccgccgccgcgccatggcttccccgtccccgtcctcctcacctctccacccgcagcatcaacaccagcacccgcttcccccgcacccgcagccccagtaccaatccccaccgcctccgatgccgccgccgccccccgcggcgccactcaaagctatcgatctggaggtgaccgtcgtctcgggcaagcacctgaagaacgtcaactggcgccgcggcgacctccgcgcctacgtcgtcgcctacctcgacccttcccgccgcgccgccacccgccccgacgacgtcggcggctgcaagccggcatggaacgagcgcgtcgtcctccctctcccgccccacctctccccgcacgatccgtcgctgctcctctccctcgatgtcttccactccaagccctccgattcgcccaagccgctcgtcggctccgcccgctcccctctccgtgacctcctcttctcaaccaaccctaaccctagccccgattcccccgcctccgcgctgatcaccctcccgctcctccgcccctccggccgcccacaggggaagctccgcatccgcctcgcccttcgcgagcgctccccgcctcctcccgagccgcagtatccgcctccttcctcctccccctactatttcccaccccctccgcctcccgcatactcggccccgcctccgcctcaatacggctcggagcagtactaccgttccggtgggtactactctgcaccaccgccaccgcctcagtatgagtacaccgcagggccctctgccccggtggaatacaacaggcaatatgatcctagagcggggagtgggagtggaaatgggaggtatggagtaggcactgggattgcagtgggaacggtgacgggggcccttggagggcttgcaattgatgaaggtgtgaaatacaaagaggagaagtcggcagatcgggttgaagataaggtagtgcctgctggaagagatgacgactcaagggggtaccgtgagtattgattataggagttcatgtgggtgaggatgcactgtgagttggtccttctccatccctgccaatgtgggaataaaattgcagtgtggtattatgcttcgctctcttgtatatatattcttcagtgttgtgaattatcatgttacttatgcttatggcttgcgtcttatgacaaatttggtgtgtgttatgaatgttctattatcatatttaaaactgtacatgtaacttaatgtcttgttctatagtttatctttcctg

SEQ ID NO: 18765 - DNA, 1538 bp, Oryza sativa
  ref <308>: DATABASE ACCESSION NUMBER: AK069148
  ref <309>: DATABASE ENTRY DATE: 2001-12-06
acaccaatccgccatggctagtgttctcgccgtccccctcctgctgtgcctgctcgcctccgcctccgccgcccgcttcgccccggcggacaaccacctcctcgcctgcggcgcgacggcaccggccgtgctccccgacggccgacgcttcgtccccgactccggctgcgcctccacgcgcctccgctccccggcacctaccctccacttctaccccttcgagcccgcgctcgcgtccgcgcgcttccacgtcggcgccgccggattcctcctcctccacaacttctccgcgtcggcccccgtcgtgaaggagttcatcctacacgtccactccgacgtcctcgtcctcaccttcgtccccgagtcgggctctaacgccttcgtcaacgccatcgagctcgtctcggcccccgatgagctcgtcggcgacatcggcaccctcgtcacgagcagcggcactgaccagaccaatggattgtcgtctcaggtctatgagatgctctatcggatcaacgtcgccggccgcaaggtcacaccgttcaacgacacgctgtggcgaacatgggtcaacgacgagcgcttcctcgtcagcacggaatcatccaacagcggggtctggtcgttcggtggccggattgcttatcccaagggtagcagattgatgacacgggaggttgctcctgacaacgtgtacaactcggcgaggtcagtgagctcacagggcaaagtgacatggggatttcccgtgcctgcttccagcaggtacctagtgcgtatgcacttctgtgacatcgtgagcaaggctctaaatgagctttactttgatatctatgtcaatggtcagctagcagtaaaggatttcgatatctctggtgccactggattcttagcctatccatattacatcgactttgttgtggatgttgaggatgaaggggccctgaaattggccattggtggctcgaagaatagccgatcagacgaagtgagcggtattcttaatgctgtagagataatgaggatgaacaaaacaaatggtggtattgatggggattttgcagtttctctgggcatggagtatgtggctagcaaggggatcggagaatttactcgctcactgctgtgtggtttcatttttgcgggattgttgttggttttgttaatgcttgtggggaggttgaggactgagctgaggaataatggtacaacttggtcttggcagccaaatgattctggtgacgggaagctggctagagcatatcaacttgtgtccgctaagacagactattgaacatcatgagatgataatctttgaggagctttaaactgtggctgttgacctattgtatgtaatgacatattgcattacttcagttgtaagtattgtagttttacacttttactcccttaatggtaagttttcggttatttgagcttggctaatggagaaaacggtcgtggtgttgtatctggctcaagatatttgtttgtattagtactgcttttaatagctctatccagtttgtgatgcttgaatg

SEQ ID NO: 18766 - DNA, 2801 bp, Oryza sativa
  ref <308>: DATABASE ACCESSION NUMBER: AK069149
  ref <309>: DATABASE ENTRY DATE: 2001-12-06
gaggttcttcttccttctgcactcgcttccagccctaaccctagccacgcgcacttcaaaatttcctcatcaaggagatcttcttcttccgctcgtaatgctggatggatggatggacgtgctgatgtgatgatcccttcttattgttgcgccaacgccgcgaacgagccgccctatgatgggtgaggcatagtgaatctgcccctacctgtatttggaggcggacaggaataacttgtagggcaatcgcgcggtgaatcggcagttgaaggtgccaaatgacaaaaccgcatttggttttactgttcatgcagggcttatttgtattgttcaggactcaggagattagtcagggttcagagtcattggatctaattcatgtgatttgtgcgttcctctgtcagtataatccacgctgatgacaatgggcataaattttccccaagagatgtcttcccatcaaattgagctatctaatacttattttttagattgttagtgcattgaaatttaaaagaaattaatttatcggttgattattttctttctccccaaccttttcatgatagcagttttcttaatcactatttgaaagtaccgattttcatttcttaacagatatgttgactgaacaatatgacaatactgatgatgttgacattgatgagctagctggttccatgagggcagatctaaatcgtcgcattgcactgaatgagtatcgagggaatggaaacaaatgctgccttatatgcaaaatagtatgctgaattcgtcagaatgataggaacgcatatgaaccaagtgttctctcaattggcccttatcaccattcagagttgcctctgcttgccatggaaacagagaagtggatatgtgtagactacattcttaagctaaaccatcatgttagcttgcgtgagtacccgagcttgctttctgggctggagaaacaggtaagaggctgttacagtgaggacatagacatggacagtaaggagttcttgcagatgcttctgctggatagctgcttcattcttgtttatcttggaggtatgcaagggatttgcagggctaaagacacacatgaagcttctgttgatggtcatgggatccaagaagatagtgatactgttgatggtataatagttctgctgtgtatgacctactgctgctggagaatcaaattcccttcttcgttattagggccatttatcagctgttctctcgtgataccatggcgactacaccattacttacaagtgatatttctgaattcatggaaggcattctttaccatttcccaaaagcaatcactgaggagaataggccagtagacttttaccatctgctacatctgtgccgtatgtacctgaagcctggtcacaaggtggaggataaacagcatcatggtcatgctggaaagtctcactactttgactatatatctgattttggccaaaaggtcttctgtgttggacaggagcaaaacatgttatatgaattaagcaagttgaattcaccagagcatgtttatcggtggcgtagagcagtggactatcatgaggcaggaatagaattcaagaaacgggactttcatgaagaagaccctcattctttgttggacattagattcaggaaaggagtcatggaaataccatgtttgccaatcgatgataaatcttctttgcttttcagaaatcttgttgctcttgagcaaacatgtcctcaagtcagcgacgacatcactgcttacattgtgctcatgtctgaatttgtcagtacagctgctgatgttgcacttcttgcacagaaagggataatagtccatcagatggaaagcgatgaggaagtgtcgactctcttcaccaaactttttgagtatgtggcatttgactttagaggtgaacactacctgaaatccttatattgtgccatggaagcacattaccaaagtcgtctaaataggtggaatgcatggctgtggcacaatcatttcagcaatccgtggttaggttttgctgcaataacttccgctttcatagtattatgcagtattttgcaaactgttcttgctttcttatcgtacacagcataaacctagataaagcaaaagagtatgtttcaggtgcatcccgccttcgcaccgcttttttttttttatttggaatgattccattacctcatagacccagtgatatcactgctcaccaaaacctccactcctgggggaatatcgtcccacctaaggatgtcatagagttccacattacatctcagcaccgctttttttttttatcaacgcgtcctcgagtagtacctgttaatgaccaaatttggtaatatcagcatcggaagaggagtctagatcgaggtggagtcgaaggcggagattgattcgagaacagagcaagaatcggctgaagtccagatcggctacgattaggatcggctgggtctaagtcgggctaggtaggccgatgcagccgattccgacagtataatttggtatatgacattgggttgaattgaggtgcttcaagatgattgccgcacatggatagagtcctgataaggcaattgtatctattaattaggatgttttatgtaacttccttagagatatgtttgggcaaaagtctgccgcaaagacttatggtatcttagagtttgttagagatagtggtcgtgtccggtatggacatatcttgtaattctcgggtataaatagaccccgagccctatgtatttttaacacacacgttcaatacaatttcggcgcatcgccacctttttgcttc

SEQ ID NO: 18767 - DNA, 2320 bp, Oryza sativa
  ref <308>: DATABASE ACCESSION NUMBER: AK069150
  ref <309>: DATABASE ENTRY DATE: 2001-12-06
gcattctcattcatctctctctccctcccagtctcacccacacttttgtctcgaatttgcttgctcgcgttaaccctagcttctcttctagatctggaagaagcttttttctcttaatttcatcagagctttaatctccttttaatataagtaacagtttgttttttgcccccaaaggttttgggggtggttctgtcccaggttggatccgcgccccctggctgtcaccgtaatctttcagggttttcgcgaggatgtcgtggtgcacgattgagtctgatcccggtgttttcaccgaattgatccaggagatgcaagtaaaaggtgttcaggttagcttccagggcctgtttctttcctaccatgaaaaattgttagaaacgaaatctatatcaagtgttcttgatatgtccttaggcttttaattattacttgtaaaacagtgtaaattggatggttggctctattggttgattctactgtttctagaatacatgtttaactgatcttctgaagatatatgctttgcttgtgttgtgaagctaaccttaacctgattgaactcactttaagtaactaccacactatatatctctatgatcagcagagtgtatgctaaacaacgcttatgggaaaacatattgctgcatataccatggagctgtgtgcttgaatgtaataaacaatacccttgtgaaggatatggagtaggacaatacctgtttggtagtaataatttctgaagggaatatggtggccaactagtaagggttaacgaatatacatcacagatcagtgcgatatgtctattaatattgttagctcagctacaaaaggaaaagacctttattttggcgttgtatatacttgcaaatctaatatacttccacttttggtgccctgtccttttatagttagtggtaggaaattctagaaaattgcaacagatggccatggacctggcattgtcagaaaaaaaggccgtcatttagcttcagtttatgactttattaaataactcttagctgccttttacattgctattgtatctttaaacaggtggaagaactttactctcttgatgtggactctattagtgaactgcggccagtttatgggctaatttttctcttcaagtggatggctggggaaaaggatgaacggcctgtcgtcaaagatccaaacccaaaccttttctttgctagccaggtcatccctaatgcatgtgctactcaagctattctgtcaatcctcatgaatcgcccagaaattgacataggtccagaactatccaacttgaaggaattcacaggagcttttgcacctgacatgaagggccttgctattaacaacagtgattctattcgcacagcccataacagttttgccaggcctgagccatttgtctcagatgagcaaagagctgcgggtaaggatgatgaagtgtaccatttcataagctatttaccttttgaaggagtcctctatgagcttgatggattgaaggaaggacccataagccttgggcagtgttctggtgggcctgatgatcttgattggctaaggatggtgcagccagttatacaaaaaagaattgaacgctattcccagagcgagattaggtttaaccttatggccatcattaagaataggaaggatgtatatactgctgagctgaaggagctggagaagagaagggaccagcttttgcaggagatgaatgagtcctcagcagcagagtccttaaacagcgaacttgcagaggtgacatcagccattgagactgtcagcgagaagattatcatggaagaagagaagttcaagaagtggaggacggagaacatcaggaggaagcacaactacattccctttctattcaactttctcaagatgctggcggaaaagaagcagctaaagccattggttgagaaggccaaacaacagaaggcttccagcacaagcacgagtgcaagatgaagccaagtgccaccaatggctgtaccgaattcgttggttctcattttgaggaaagcatacgttcatgggttactggggttagttgttgcattttccctttttgagaatgcgttatgctatcagatacggcaccttgttggcagcttagagatatcactaagttaatgaaccagagtacattctctttaatctttttctccgtgttgtattattatctgttatgactttctgcccttgtgtgatggatagaaactgtagaagaggtcaattgggtcttaagggtggtggcattgtttatttcgcgtcgtggcaatcgaatagaaaaatacatgttggaggatgg

SEQ ID NO: 18768 - DNA, 1685 bp, Oryza sativa
  ref <308>: DATABASE ACCESSION NUMBER: AK069151
  ref <309>: DATABASE ENTRY DATE: 2001-12-06
gacttctccgccttctcgtcggcgtccgatcccaaaaccctcgccggcggcatgggcgacatcgtccggcaaatcctggggtggttccccggccatcccgcctccggaaacggcgccacgctttccgccgccgagggctacggcagcgaggaccgcgtcagcgcgctccccgacgaccttctccgcaacatcgtcgcccgcctccccgtcaaggacgcggctcgcaccgcggcgctcgcctcccgctggcggcgcgtctggagctccacgccgctcgtcctccgcgacgccgatctcctcttctccgccggcgaggccgcgggcgtcgcggccgtcggccgcgccctcgccggtcacccgggccccttccgcgtcgtccacatcgagcactgcatgttcgcgttccaccgtcccgagctcgccgagtgggcgcgcctcgtcgccgccaagggcgtggaggacctcgtcttcgtcaacattcccgtccactacttcgatgtgcccctccccgccgacatcctccgctgcgccgctctccgccgcctcttcatcggcaactggaatttcccggccacctctggcttcccccgcggcgccgacgtcttcccccacctcctggagctctacatttggaacaccgtcatgagcgccagggacctcaaccatctgctcgcctgcagcccagtgctgcagagcctcgcgctcgccctcaacagccatcccaaccgcgtccgcctctgcagccagagcctccaatgcgtgcttcttttcttgtctaaggcggaggaggtcgccgtggtggatgccccactgctgcagcgcctcgttctgtggaaaatatcaacttcttatgatacagatgatgagttgccagtaaagattaggcttgcttgtgcaccggagctacaggtcctgggctatctggagccaagagctcaccagctgcagattggcgaaaccatcatcaaggctgacacaaaggtgattccaagctccatggttccgagtatcaaggtattggccttgagggtgaatttttgtgtgcaagaggagatcgctatgctggtcagcttcctcagatgctttcccaatgttgaaacactgcacatcgagtctgatatagatgatgagttcactggccagccccatgccaagttctggcaggaggtctgtcctgttgaatgtatcaattcacacgtcaagaagattgtctttcatgattttcatggggacaaatgcgagcttgaattcatcgatttcatcgccaggacagcacaggagcttcaggctttactgcttatgttgaccagtaaaacgtatggtcctgttgttgatgtggatgaagtgaacagccaattgggcgtcctgtcatttgcatctgaagagtgcataacgtcgctgcttgggcctaaagtgcagatggttcacatattccacagatcattggatctttctgtggatgaccctttcctctgatgaacttgaatgcgctagctggataaatattccttgatctttgccttattatggaaacagttacccttatgttgcagtgttgcctagttaggcactctcttgttgttaatgtgcttcctctgagatagggctagtagtttcaatattactaagtggctgtaagcgtttaaatttgtagtactatggtttactgcaaggaccactgtccc

SEQ ID NO: 18769 - DNA, 1201 bp, Oryza sativa
  ref <308>: DATABASE ACCESSION NUMBER: AK069152
  ref <309>: DATABASE ENTRY DATE: 2001-12-06
tcgcgtgcgccgcctccacccccactgccgcctcccccattcccgcctccggttgttggtgccgccaccgcggccgccagaggagccgccgcctccagtccagccgccgacaccactcccaccgtcgcgtgcgctgccactgcccccacctctagagaggccgccgccaccggaagaggcgttgccgccgagagggcaagaggagccagaggtggcgcttgcaaccagcgctgtcgccgcggccaccttggccgcgttcgtgatgcgcagctccttcaacaggagggtgttgcatgccgatgtgaagctcaggaggacgtccgtagctgcgatgttgtcggcggtgttggagaagtcgtcattgaggcctcgaagaaggttgaggacgagttgggactcagagacggcgtggccgacatcgcgaagggcgtcagtggcagtcttcatcttctggcagtagtcgacaatggaggaatcgccttgaatcatggagtgaaattgatggctgagaaagatcgctcgaggctgtttgttggcgtggaacatgtcctcgatggcgacccacagctcccgagtggtctaatctggctccagaggtcgtggatgtcgtcggcgactgatccaaagatccagttgcggatgtaacagtcagcctgttcctaggctgggtcgttgggacgtggaggggcggagccgtcgatgtgagccatcaactcaaacttgccgcacagggaggtgaagaaggccttccatttgttgtagattgggtgggtgttctccagggtgatggggaagtgggatttgacggcgactgtggcataggggtggaggaactcactggtggtgctggcagaggaaacaccactggagcctgaggaggtggaggattgagttgattcagtcgacatggccagcactcgccgaggaggcagctgtgatgacagcgtgctagagcagcggaaaagaaggtaagaacctctgatacaatgtagagaaagtagaatggacgcctcaccaatgttgggaggttgatctctcatatatatagctgaattacaatgaatgctagtgctgagatacaatcaatacaagatagttacataagaccaaaggtctagggagagtaactatttgggagtgtaaaggtctaggagaccaacagcctatagattaataataatcctaataatagttgatcact

SEQ ID NO: 18770 - DNA, 1816 bp, Oryza sativa
  ref <308>: DATABASE ACCESSION NUMBER: AK069153
  ref <309>: DATABASE ENTRY DATE: 2001-12-06
gagcaaaccagcgtgctcctcctctcctccacacacaatccgatcggtagccgcgggctcgttgttgcgatggccggcaagaacgggagcctctacgcggtgctcggcgtcgccagcgactgctccgacgccgacctgcgcaccgcctaccgcaagctcgccatggtacggtgctgattcctctgctttgctctgtttttttttttttttgccgatttaaccgtctcccagtggctgtttgtctccgggcagaaatggcacccggacaagtgcggcgccgccgggagctcagccggcggcggtgcagaggcggccaaggtgaggttccagaagatccagggagcctacgccggtaattaaatctcagccaccttcttcgtcttcctctgcttctgaccagtgctcagagcacaagctgccattgatttcggacgctgagatttttttttagcttctcgttgatcggtcttcgctgctgttacggtctgtccgttcccgttgtttcaccattctgacagcgacgtggttttaactgaacagtgctctccgatcccaacaagaggatcctctatgacgtcggagcctacgacagcgacggcgatgatgatgtaacagcattttccggccttttttatctcttttttttgcaccaatcaatgataaagatattttgtggccggcttgtgtgctgacttggtcgtgccaattcacgtgcagggcgccggtgaaattctcggcgacattctcgaggccatgaacaaaaccggccctacggtaacaaacctatctgaattcgaatttcgacgtgaactttaaaaattcgatgtaaattcacaccctgttcatgcatgttggtgtggtgaacgcgtgcgcaggagaatggcaagaacgagagcttcgaagacctgcagaggcagttcgaggagctgttcctccggccgccggcgccggcgccgccgacgtcgtcgtcgttccggtcggcggtacgtgactgtcgtgtcgtacaccactgattcctctgactgatacgacgagacacagcagttacctagctgtatgtcctttctgattagtgactaaacaggccatctttttcttcagaaattaactttcccattttttttagagtgtgcgtcgctttctctgacaactgtttgcacacaagcatgtcgggagaagagcacgagctgtcgttttatacggcatgcaaattacagtaatggttaggtgcattgcatcctcttgcctgcccaagcttagagaagattatccataaacagtttggtcgcttaattaattataagcacagaataggttttcttgcgctacatggacactgattacgtacacaagatttaataacccttgactaactctgtatttctatctgtgcctgataatctgcagcaagaggacgctgggaagtcttcaaagagaagggccggaagaacgtagaagtacgtacttttggccgaagatttttgtactgcaacatttttgaatctatttcgtacgtgcagtgctcaagacgaccgtcatttgtgctaataattaagctgattgatcaagaagaaaacgattcagataatgatatgacgcactgatgatctagggcagtagcctgtaatctcaataacacctttggcagacgtcattcggtttgcatgtatgcgggtggctattaatttgcctagctagaaattggccaatttaaagtttggccacacgtcaattcttatatgaatatgtgcaatattgtcaaatctgggtacttctccctgatgaattaaatgaagaaaagtgagggctaatgatc

SEQ ID NO: 18771 - DNA, 1935 bp, Oryza sativa
  ref <308>: DATABASE ACCESSION NUMBER: AK069154
  ref <309>: DATABASE ENTRY DATE: 2001-12-06
gtccggtcgcgaggttaaaggggaagaactgaagaaggaagggaacccatcacctcatcaaatctgcctgtcttgattgtgcattttggactcttcgatccatgtctgcgtgaagaattttcagcttctactcagtaagagatcaaaacgcgatttaaaaaaactggaattccgtccgcgcaaatccacgcgtggatcagcgaggatggtgatgccaatgccgacggagggcagcgagccacttctcccgaggaagcagagggacggcggtgacgacggcgccgcctcgtcgcacgaccacttcgacggcgcgtccttctccggcgcggtgttcaacctgtccaccaccatcgtcggcgccggcatcatggcgctcccggccaccatgaaggtgctcggcctcgtgccgggcctcatcctggtgatgctcgccgcggtgctcacggacgcctccatcgagctcctcgtccggttcagccgcgccgtgggcgccacctcgtacggcgaggccatgggcgacgccttcggtgctttcggcagggggctcctccagctctgcgtcgtcgtcaacaacgtcggcgtgatggtcgtctacatgatcatcatcggcgatgtgctctctgggaagtcatccagcggcggcgtgcaccatcacggcgtgatagaaggatggttcggtccaaaccggtggaacggccgcttctccatcctcgtcatcgtcacgctcggtgtgttcactccactgacatgcttcaagcgagtcgattcactgaaatacacgtcggccttatcggttgctctggccgtcgtgttcgtggtgatcactgccggaatcaccaccatcaagctgatgagagggcagattccgatgcctaaactgttccctgatgttcatgactggagctccacctggagacttttcactgcagctccagttcttgtgaccgcctacatttgccattacaacgtgcacccaattcacaacgagctcaaggaccactcccagatcaggccaatagtgcgggcgtcgctgctgctctgcttggccgtgtacaccaccaccagcttcttcggcttcctcctcttcggcgaggcaacgctggacgacgtgctcgcaaacttcgactccgacctcggcatcccctacagcttggtgctcgacgacgccgtcagggtcagctacgtgctccacctcatgctcgtcttccccattgtgttccacgcgctgcggttcaacatggacggcctcctcttcccctcggcgaggcccctctcttccgacaaccggaggttcggcgcgatcacggcggcgctcctcacggtcatcttcctcgccgccaacttcgtccccaacatttgggacgcgttccagttcactggcgccactgccgccgtcgccattgcctacattttccctgctggaatggcactgagggatcgccacggcatagcgacgaagggcgacaagtatctcgcggtgttcatgattgttcttgctttggtggcaaatggagtggccgtgtacagcgacgcttgcttggggacgttttagttggcgatcgcacatctccgtggtgatctgtgcattagttagtgcgatatgaaaaattcgttgtttgcacgttgaactcaaccattttgagttccatttataataagtacatatgtacaaattgcctgcaggttctgcagagataggtgtagataagaatgcagcggtgaaaaaaaaattctaaaccgtgaatttgtagaccttttcttgttactgacaaattggttgttctatacatgtccaaacggtactggacaagaactgatcagttcatgttgattttggtgataattaaagtcactgggattcgattggtgtagttggcatttcttttacgtaaggtagtctgcataatcagatattcagatggtgctttcctgacg

SEQ ID NO: 18772 - DNA, 3172 bp, Oryza sativa
  ref <308>: DATABASE ACCESSION NUMBER: AK069155
  ref <309>: DATABASE ENTRY DATE: 2001-12-06
ggcgcctcgatcctcgcctcctccccgcattcactcccccgaaaccctcgctctctcccccatccgccgccgcggccgcaaacgacggcggcggcgaggttcgtcggcggggattgtgggggggggggagaagacgacgagggttttttttttattttttttttctgattatccctcgcgcggggggttttgggcgatggggaggaggagcaagcagaaggtggaggatatggccgaggagctctgcttcgtctgcaaggacggcggcgacatccgcgtttgcgacttcaagaactgcctcaagggttatcatccacactgtgtggggaaggaggaaagcttccttgattctgccgaacagttcatttgtgaattgcacaaatgtgttagctgcaaaaggaattcagaatatcattgtttgtgttgtccaagttcctctgtatgcggtgaatgccttggaaaagttgaatttgcacaatttaggaagcagagccagaccaaaggattatgcaataactgtttaaagttggcattgtttgttgagaagaactctgaagctaattctgatggggaaacagttgaattcagatatacggagaactatcttgttctgtttaaagactactgggaaactattaaagacaatgaaggcttggcattgattgatttgcagcaagccaatatttgtcttagaacaagcttaagctgtaaacaaggaagggattcagagaaacccccagatgaagattacagggcagataagaattcattgagtgttaatgatggcgctgaacaaccattcccggttgatgtaaaggtccaaccaagtgaagcaaaaatgtcactgaagagaaagaagtcaaacaagaaaacatatgtcggttggggttcaaaagagctaattgaattcctgtcatgtattggcaaggatacaactaaacctcttgatgaatttatacttactggagttgttaaggagtacatccagcagaagaatctattcaaggacaggaaaagaaaatctgtcatttgtgatgataagcttcattctttgttcaggaaaagaaaagtgaagtcaaatatgattcttaacttgctggaaatacatcttgcggcaaatgctgcttcagaggatgattttctcgatgattctgaggatgatgaaggccgaattatgagaaaaaggccttgtaatactttaaaggcggcagagacttctgagagggatccaaagagaaacaagaaatgctttgcagctcttaatcacaataacttaaagttaatttatttgagaagaactctaattatgaatcttatgggccaagacacatttgaacagaaagttgttggaagtttggttagagtcaagaatgatgacaatcattatagttatcagatgcctaaaaaacactaccagcttggcctagtaacaggcattaggaaatctccacaagaatacaagataaaggacaaacgtacagatattcttttatgtgtttccaatctgtgggatgacatcaagatctccatgttgtctgaagaggacatagaggaggacgagtgtaatgatctccttctgttggctaaaaaaggactcttcaaaagacctactgttgctgatttagaagagaaagctgcaagtatacatgtggacatcgtgaatcattggattgatagagaacttatgagactggaaaaggagatcgaaagagcacatgagaagggttggcgccaagaattgcatgaactatttaataaaaaaagacttctaagcacacaagacgaaagacaacgtcgtcttgcagaggtcccagaagctattccagatacagaagagagtaaaagggatgaatttggagttgctgcaagcaaccatcttgaagaaaacaaaggtgcaacagggcatgtacctaattctgtgaaagttctaatggaggattcacgaggtgcaacagggcatatagctgattctgtgaaagtacttatggagggtttaccaggaggtgcaacagcacgagtagctgatgttttcaatgttgatatggctaaatcacaagatgcatcagggcaagtaactgattacttggaggttgttgaagaggaaactccagaagatgcatcaggacaagtagctgatatcttggacgttgttgaagaggaacctccagaagatgcatcaggacaagtagctgatatcttggagcttgttgaagaggaaacttcagaagatgcatcaggacaagtagctagtatcttggaggttgttgaagaggaaactccagaagcacctggtaaagacctttgtaatggtggcattcctgggtctggactacaaaacaaaatgcacaatgctcaagatggtggcacggctcaaggcagcgatatgtgcaatggcggaaatacctcaaggcgtctcaatgatcgcaagagtgttatcgttatcgactcagacagcgatgaagacgaggatcctcacccagagcaacatgaaccagaacgtgctgctcctcgggcagccatggacgtggtcatggctcccactcatggtgctccggtagccatgaatgggactagtgctcccactcttccttgtgctaagagaggcaagaacgggactaccgcgcctaaaggccgtgttcctatcgctgcacttcacgcactgcaatccatgaatgcgccaggtgagcatgaatacatatggaattacgcggatcctcaggggaaagtgcaagggccattcacaatggagcatatgcggaactggcaccggaatcgtttcttccctccggacttcagggtgtggagattaggccagacacagaatgattccgtcctgctaacagaggccatgggcctgaaattttcttcttgacctaaataggctttttttttttcgttccttgcgttattcaacagtgtagctgaaccttaagcaggcatcgctgaagcttgagttgatgtaaatgtttagttttggtcataggcggttcagtggagatcttttttttttctttagtgatgttttagcagattgcaatgtctagcaaaatttgctaaacaaggcaaacagaaatggacagtcggtttagtgatgtttagcatattccaatgtcagacgctcagagccccatcaaacaaacagcaatggatatactccagtacataagttttc

SEQ ID NO: 18773 - DNA, 2429 bp, Oryza sativa
  ref <308>: DATABASE ACCESSION NUMBER: AK069156
  ref <309>: DATABASE ENTRY DATE: 2001-12-06
gttcttgcactgctgcctcttggcgccgccggagcgcccctcgccgtcgccgtcgtcctccgggtcaccgccatgcagcttcctcccctccgacccggactccgccacgccgccgcccgccgcgtgctgcatctgctcctgcgccaccgccaccgacggctcgctcaccgccatccccgcgtacggccacgcgcccgccgccgccgcctcgtcgcccacggcgtcacctccccccaccacaaacaacacgccgcctcgcctgcccatcccgtccaacccacgccgtcgtcccgtcgccgccacatcgtcgtcgtgcgttatcccgccggccactcgccgcctccccatcccgctaaacccgcgccgccttctccggccgtcatcatcccgccgccgccacatcatcgccgtgcccgatcccgccagccactcgccgtcgccgccacccgtcgctcctcctcccccaccgcattagttcatctcacccccaacccctattgatctcgcttctccccacctcaacgcctccccaatccctatcgcgccaatccccggcatgacagcccccagccaatgctgcacctgcatctactgcgccgcttcaattcccggtgacatgggaaccggaggggaacttcccgcgtccgccacggatggtcctgcacgaatcgctcgacggtgctggggtctccaccgtgcatgccagggcgaatggcgatccctccatctccaccgcgacgccggcgacgaatcacctcatctcgccgccgccccttcactctcccccaccttttgctggtgacaatcccaccttcggcaccacgggatccctctccaccgcgccgccatggatcctgcatcttccgctatccatcacgccgccactgggactcctcgcccccgcaagccatcgatcccgcctgtgacaagcttgcaggaaggttgagattgattctgaattgttgccaagctgcagcaggcccaatttttttccataagttgttggcatttttgcatcttaaaatgatatgatctgctgattctagggcagggcacattgagcagtggggattgtcatcccaattcttttttaccatattagctttggtgttcaatctgtctctgaaggccagccataagaaaactttacagttttgtgggattgtgtggatccagatacaatcagccggtttccaaagggatccatggtatgtcagcagctgataagcattcgcagttgagattttaggtgcagggaacaggaaattccttgtgtctgttacctctgagatattatgggcgtcagtactgagatcagttccacagctacagcgcgcccaaggtcaatgaatgctgaaagtttaaaaagaacattacagatctgtgatgcaacttcgatgaagtgccaatctttcattgtatattctatgttcgcgaggtggtctgtggttggcgcgactaggtggaacgcgacgagggtcgcacccaactccttgcgcagcatcctcgctgagccatatcatatatgaactacttcgccttgaaaggtagttttcataatctaccattgttgatgagccaacgtctaggctggattcaacaacggctctcaggataatttaattcagcttctacatcatatagctaagggattaggattggcaattggagctaccctcttggacataaaaaaatgcaaaaactgtaccttcagttacagtcatgagtcatggcattcatgctagcaggaggattctttgtaaagatagaagttcttctaaaaaattcagttgcaggggatgtcgaattttcactttgtactgtttgcaggggaccttcacccttctacttatactaaggtaaaccttccaacaatggtttttgagtttttctgccatcatgatcaattaagatttacattacttgatgttagcattatagattcgtgtatttatttcctaattcatatcattggtctttcctcaatgcaaatcacagttcaggatattttgtacctcatattgtgatttaatgttcagaagactattatggtatatgggtacttgctctaatataatttttttttcaaattatacgtcgaagctaccataatattgcagattgctctttcatctcatcccgagtttttgattggtgcaaagtgattagttaggttattttctgaccaatgctgataaaattgacgtgtacactcttttatgaaattaacagttcatattattgtagcctgcagtgatccaaatagtttgagtcaatacaggcacaaatttatttgtaaagtggctgatttctagataggttggcatattgcttttcgatatttaatcagtatacctaaatgaaatggttcattgtgcccaaaaatgtgtacatacaatttgttgtacaataaattcctttatccaagt

SEQ ID NO: 18774 - DNA, 1422 bp, Oryza sativa
  ref <308>: DATABASE ACCESSION NUMBER: AK069157
  ref <309>: DATABASE ENTRY DATE: 2001-12-06
ggtcggagccggtggcgagggcggtggcggaggaggtggggaggtgggggagcatgaagcagacgggggtgagcctgcgctacatgatggagttcgggtcgcgccccacggagcggaacctgctgctctccgcgcagttcctgcagaaggagctcccaatccggatcgcgcgccgcgcgctcgagctcgagtccctccccttcggcctctcccgcaagcccgccatcctcaaggtgcgggattggtacttggactctttccgcgacatcagatactttccagaagtgaggaataggaacgacgagctcgcttttacgcagatgatcaagatgatcaaagtacgccacaataatgtggttccaacgatggcactgggagttcaacagctcaagaacgagcagtatcgcacaaggaagatccccactgcatttgacgagatccacgagtttcttgacagattctacatgtcaaggattgggatccgcatgcttatagggcagcatgtggctttgcatgatcctgacccagagcctggcgtcataggcctcattaatacagaattgtcccctatacaggtggctcaagctgccagtgaagatgcccgttctatttgtttgagggaatatggatcagctcctgagattgacatctatggagacccaacttttacatttccatatgtttcatcacatctacatctcatgctatttgaattggtgaagaactccttgcgtgcagtacaggaacgatatatgaattccgataaagatgttcctccagttagaattatcgttgctgatggggcagaggatgtaactatcaaggttagtgatgaaggtggtggaataccaaggagcggccttccaagaattttcacatatctatatagcactgcaaagaatccacctgatatggattgccctagtgaaggagtaactatggctggatatggctatggtcttccaatcagtcgcctgtatgctcgatattttggtggtgacctgcaaatcatctctatggaaggatacggcaccgatgcttacctgcacttgtcacggttgggagattcggaggagcccttgccttgaaggcttccctgtcctgataccatctctgtaattaattaggttgctcttgtctcttgtaattcctgggctggtttggaatattgttttcaagtgccagccacctatagctgttaaccttctacagtagttgccacggtttcatcacttcagctttgcagcagcatgagcacaagtctcctctctctctttctctctctctctactctgccttgtagcgaaatgtagaattcttctgccacgcacatggcattgttcatacttctcgtacttgttgagcttcatggcttggtgcaggttgtactttgatagttatcagtagtaagctaacttcatc

SEQ ID NO: 18775 - DNA, 3130 bp, Oryza sativa
  ref <308>: DATABASE ACCESSION NUMBER: AK069158
  ref <309>: DATABASE ENTRY DATE: 2001-12-06
gacccaacccaacccaacctcaacctcaacctcaagctctcctcctccttcctcctctgctcctgctcctgctcctgctgctgccgtgtgctctgctggctgctcctgctggtgaggtggtggtctctctccccccacttcaccatctcctcctctccttcgccgccggcgcgcttgcttcctcctcagcacgccacctcctcgcccctcctcatagctcaatcagattactcgaccgtgcaaacatcctgaccattttctacagccccgcgctttagcgttcttgtttttttttttttggctgctgctgatttggtggcggcggctatcttggagagagatacagaatccgtgcttcttcttgagcgagctggttggttggtggcatgaggcgtggagagcttcagagtgagtgccatggcgcgtgttgattgctgttggtggtgagatggagggtggtaggctaggaggagcggcggcttcagcatcggcggcggcggcggcggacgcgcgcggcgggatgtcgggcttcgcggctcctcagcacgccatccatacaaatttgaacaacgtgcaacctactcaagttactgattttggggcacttgcgcagtctgctggattccgaatagaagatctcgctaatctcagtacaaatggtttgttcaatctgaagtcaaatgctcataccattatcaatgaccccctccaatttgagaattatgtaaagtctatttctccgtctaatattactacaacagcaacagtaacagtagttgaccctcagacactggtcccacaaaagggagcacaactgaatttggtaactataaggactggtaacgttgagaattggggggagtcgactattgctgatacaagtccaaggactgatacatcaacagatccagacactgatgagaggaatcagatgtttgaacaaggacagttagctgctcccactgcttctgattctagtgacaggtcaaaggacaaactagatcataagacacttcgccgccttgcccaaaatcgtgaagctgctaggaaaagccgtttaagaaagaaggcatatatccaaaaccttgagagtagcagattgaaacttactcagatagagcaagagcttcagcgggctcgtcaacagggcatttttatatcaacatcgagtgatcagtcccactcagcgagtggaaatggagctttggcatttgacatggagtatgcacggtggttggaggagcataacaaacatataaatgagttgagggctgcagttaatgcacacgctggtgataatgatctcaaaagtacagttgatagtattatggcacactacaatgaaattttcaagctcaagggtgtggcagccaaagcagacgtttttcatgtgctgtcgggaatgtggaaaacccctgctgagaggtgcttcatgtggctaggtggcttccgatcatctgagcttcttaaggtaagaatatactattattatattgcgcctacttattttgaagcctcacccggaggcaaaatgctgacctgaatatatattattttaattgatccaatatttttcttaggctctgttttttttgaaaggaatactaccaggcaatggcccagtagtgtattttatagaagccaacaaagtttttacagggaaaaaaagaaaaaatacaaaaggctacaaccccctatagaagctataaagtttgtaaccaattagaaaccaattgtctaagatcatcattcatcctacacatatgtagaagaatttcatgcttaaaagaattccaccagctgtcaaatgaaggatctatattctggaaaatctttccattcctttgcttccaaatgtgccaacacgcaatgaaataaatctccaagaatccttttttctgaaatctcaatcttgctagcaccagcatccttttttctgaaagaattctagagaagtgttccaagatattcccagcttctgccaacattttctactaaaagggcattgaaagaacaggtgagacaaagtttctctgtcatgcaaagggcataagacacaagtaagatcagcatttaggggggcgtattttctcctgtccaacatgtctctcgtgttcagcctatcagagaaaagaagccatatgaaaacttttatcttcatcacacatttgctcttccagatccatcggaaaggtctgggaggttgcgtggatgcaaaattcaacttgtaaaaagcttttgaggtgtaattgttcctgccccatataaaactccaattatccccctgctgacttgctaaggacagagcatccagctctccctttagcagcagaaattctgtgtaagcttcctgggtcagtggcaacttaaaacaatcctcaaaaggtttagcacaggtgacagccaaggaatcatttctggcaatggcatggccacatagatgtggttactggcagggcaattagagcctcttacagagcagcagcttgctggcatagccaacctgcaacaatcctcccaacaggctgaagatgctctttctcaagggatggaagcactacaacagtcgcttgcagagaccctggcatcaggatctctcggccctgcaggatcttctggtaatgttgcaaactacatgggacaaatggcaatggctatggggaaacttggtaccctagaaaacttcctacggcaggctgataatctgcggcttcagactcttcagcaaatgcagcgcatattaaccactcgccagtcagcacgagctctacttgcaataagtgactacttctcccggcttcgtgccctgagttctctttggctcgcccgtccaagggaataaataaattgaattgattcgtaagtaggatattgttaggtaatgtatctctagtgttatatcagataggaattgaggtattccctacttcctagattcttcacaatgttcatgtattggtgacagactcggatcactatctttccatgtatgtcttcaagtgaatgttcaatgcatattgtagtctgtatatgacatcatatgatgagttgttgggcaaatttgtaacatttttgagaaaagtggggatgtaaatacttgcagaataattttagagcttatccagtgatt

SEQ ID NO: 18776 - DNA, 2037 bp, Oryza sativa
  ref <308>: DATABASE ACCESSION NUMBER: AK069159
  ref <309>: DATABASE ENTRY DATE: 2001-12-06
gtccctctcgactctggacctctcctctccacgccgaccgccatggccgccgccgccgaggtcgacgcggcccccgacctccccaacggatcctccgccaccgccacaaccgacaagaagaagtcgcgggagagcgagcgccgccgccgccgccgcaagcagaagaagaacaaggccgcgtccaacgccgcagatgcggatgcggccggggacgccggggccgacgacgacgccgccgaggagaagcctgatgtcaaaccccaggtggaggtggaggtggagtacgtcccggagcaggcggacctggacgacggcctcctcgccgacttcaagagcatcttcgacaagttcaccttcaaggattcctctgccgacgccgaggatgacgagaagaaagatgaggctggcactgatgccgcaaagaaggctgcagggtctgattcggacgacgacgagcaggggacacagcaaaagaaggaagggggcttgtccaacaagcaaaagaaactacaacgaaggatgaagattgcagaactgaaacagatatgcaatagacctgatgttgtggaggtctgggatgcaacggcatcggatccatcattacttgtctatctgaagtcctacaggaacactgtacctgtcccaaggcattggtgtcaaaagcgcaaattcttgcagggtaagcgaggtatcgagaaacaaccttttcaactccctgacttcatcgctgcaactggaatagaaaaaataagacaggcatatattgagaaggaggatagtaaaaagttgaaacaaaagcagcgggagcgtatgcaaccaaaaatgggcaagatggatatagattatcaggtcttgcatgacgccttcttcaaataccaaacaaagccaaaattgactagtcatggtgacctgtattatgaagggaaagagtttgaggtcaagcttagggaaatgaagccaggcatgctgtcgcgagaacttaaagaggctcttggtatgcctgatggtgcgccacctccatggcttataaacatgcagagatatggtcctccgccctcttatcctcagctgaagattcctgggctaaatgctccgattcctcctggtgctagcttcggataccgacctggggaatggggaaaacctcctgttgatgagcatgggcgccccttatatggagatgtttttggagtcctacagcaggatgaacctaattatgatgaagaacctgttgatcgcagcaagcactggggagacttggaggaggaagaggaggaggaggaagaagaggaggaagaggaggaagaagagccaatggaagatgaagacatggaagacggcatgcaatctgttgacaccatctcaagcactccaactggtgtggaaacacctgatgtgattgatcttcggaagctgcagcggaaagagcctgaaaagcagaccgagaagcaactataccagattcttgagcaaaaagaagaaagaattgctcctggggctatctatggatcaagccatacgtatgcgattggtgcacaggataaggctggtcctaaaagggtggatcttctcaagaatcagaagtctgataaggtggatgtcaccatacaacctgaggggcttgaagttatggatgatgttttggctgccaagtacgaggaagcccgggaggaggagaagctacggaaccagaaggaagatttcagcgacatggtggcggagaacgcaagcaagaggaagaggaagcaggagaaggacgggaagtcgaagaagaaagacttcaagttctagatgttgccctttgcgagttagccagatccaaggaagaggaggcggcacggcatccatctgtttttttagattgcccttgtctgagaatagatgaatgcgtaggcacgagtgtagcagcagcacagcccttttttatgtgtgtgtgtattgtatgactgatggccttcaccttgatatgatgatgatgtttactttactggacaattatcgtgtagtagaggacagagagcgttacgttctcttttc

SEQ ID NO: 18777 - DNA, 2330 bp, Oryza sativa
  ref <308>: DATABASE ACCESSION NUMBER: AK069160
  ref <309>: DATABASE ENTRY DATE: 2001-12-06
gctctttccgccaggcacagccgggaggtgagtgagtgctcgcagcagggaccgacgcaaatccgtccgccgtccgccgcagctccgccatcggccagcagattcgtcttttcctgtcagtccgttagccagtagcagccatgggtaaggagaagacccacatcaacatcgtggtcatcggccatgtcgactccggcaagtcgaccaccaccggtcatcttatctacaagtgcggtggcattgacaagcgtaccatcgagaagttcgagaaggaggcccaggagatgggcaagggctccttcaagtacgcctgggtgctggacaagctgaaggctgagcgtgaacgtggtatcaccatcgacattgctctatggaagttcgagaccgccaagtactacgtcaccatcattgatgcccctggccacagggatttcatcaagaacatgatcaccggtacctcacaggctgactgcgctgtgctgatcgttgctgccggtactggtgaattcgaagccggtatctccaagaacggtcagacccgtgagcacgccttgctcgccttcaccctgggtgtgaagcagctgatcgttggtgtgaacaagatggactccaccgagcctccattcagcgaagcccgtttcgaggaaatcaagaaggaagtctcctcctacatcaagaagatcggttacaaccccgctgccgttgccttcgtgcccatctccggctggcacggcgacaacatgctggagccctccgacaagatgccctggttcaaggggtggaacgtggagcgcaaggaaggcaaggctgaaggcaagtgcctgattgaggcccttgacgccattcttccgcccagccggccaacagacaagcccctccgactcccacttcaggatgtctacaaaattggtggcattggaaccgtcccagtgggtcgtgttgagactggtgttctgaaaccaggcactgttgttacctttgcccctgccaatatcaccactgaagtgaagtctgttgaaatgcaccatgaagccctgagctgaagctgttcctggcgacaatgttggcttcaatatcaagaacgtgtcagtcaaggagctgcgacgtggctatgttgctggtgattctaaaaatgctccacccaagggtgctgctgattttactgctcaggtcattgtcctgaaccaccctgggcagatctctaatgggtacacacctgtattggattgccacactgctcacattgcctgcaaattcgctgaaattaaggaaaaatgtgaccgtcgtacaggcaagactacagaggaaaacccaaaagccattaagtctggcgatgctgccatcattactcttattccatcaaagccaatgtgtgttgaatccttccaagaattccctccacttgggcgctttgctgtacgagacatgcgacaaaccgttgctgttggtgtaatcaagcaagtgaacttcaaagaggcaacaactggtaaggtcacaaaggctgcagagaaggctcagaagaagaaataactaggtgtgatgggcttcatggccagtgagatgggtccagggggtgtaaaggctgcgcagttacagatttggacatttgtaaaaactctaacagtggtgatagagcacactatacctagcattttgcagcaacacggcttgattttgtgtcatctgcgcagcataggcaaggggttactacggcattgttttcatcgcaaagagctacgccggaaaaacttcaaaattctttagctcggatatgtttaaattgtttccatctataaagggattattttattcttaactcaccttactgtgaaatgtggagttaagtgaacgagtgtcaacgtttctttaagatcttgcatggagtgaatttagataacgtgcatcattttgcagtgcaatgaggaatgattaacataaatatttcttgtgggatgaaattaattttaacattgcagttgatgcggtcaatctcgagaatgacttgattatctttttcacttattttcataccacttttacccagatagtttcacattgcattagaattatgtgctaaagctttttgtaaaatatttattattttatttgtttgatataataataggtttttaattatgttaatgtttcaaattatgatgggttgttggtttgcatcatgtagagacgttaagaagccgtgttgctcttgtaaagcagtagttggaacatgccaagtgtcattacatttcaaataatcataccctcataaatgccacctggcacttctttctttttgttaccaaacaattccattaaaccaggattgaagg

SEQ ID NO: 18778 - DNA, 4183 bp, Oryza sativa
  ref <308>: DATABASE ACCESSION NUMBER: AK069161
  ref <309>: DATABASE ENTRY DATE: 2001-12-06
ggcttacgaccaaagcgtccgcgagtcgcgacagctcaaagccgcacgcaacgccaccactgctccgccgccgccgccacgcgccgccgcgattcctccccccgccgatcgaacgccacgcgcgcccgccgcggaaaccctagcctcctccttcgctcgcccgagcgccgtcggcgggaggaggattacttttggtcctgcgcgcgaatcgcggatcgcgattcgcgctagggtttcggccccgtgtgccccgacggccgcctggtccccgctacgccggcgacctcacgcggaatcgagaggacagtagaaaaatctacacccaaaattctgaagatctccaagaactttgcagtctaacatcagtgccgaatatcagaaatggatcatgggcgttatgctccacagcatggatgggagaacaacagtgtaattgaagcctttccctttattagctaacaaggaatagcagatttgctggccatgtggttggccagcattgtgatgtaaagaatttgaagaagcggccattgcttaaatggaatgggttacatgcctgttctgtagacttacttgctgactcaacttctgttgaatctacaggcattggatgggtatggtgtcatcaatggcccagattatagggccggtggatcctacaatggtaggaggtttgtggatgatggcttcccaggagattcatatggaaggggggcaatctatcaggacacacatgatagaaatgtgtatccacctgcaccctctgtccccatgttgtctcaacctcgaaggtttcatgatgatgaatattcaactgctagagattacagaaggaacaaaaggattgggagtagggaccgtgcggagtttcacggtgactttgaagaccggtaccgcagctctcaccaaagtagagaggatagtagagaggatagctatgagagagatcgtgattatgatcgttacagctatgattcggactatgagaaaagcaggagagatggtagctggagaaggcgtgatttatgtgagagtgaacatgaaagaagagggttgagtcatgaaagagacagaagtccatacatgcaacatagccgttcacgatctcgtgggcgtgacgaacgatcaagatctcggtctagatcaagatcaccccgtggcaaaagtcgtggtcggaaccaaagagatggcttttatgatgacaattcctttggcagaagaagggagtatgactgggatgagagaaggcatggagatttagtggctccatctgctactgttgttgttaagggtctgtcccagaagactaatgaagatgacctaaaccagattcttgctgagtggggccctctccgtagtgtgcgcgtaattaaggaacgatcttctggcatgtctcggggatttgcttttatcgacttccctactgtggaagctgcccgcagaatgatggaaggtgttggagacaatggccttctaattgatggtagaaaggtattttttcagtacagtagtaaaccaactagtgggatgagtgggccttctcatggagaagaaaattttacaaggtataactatgggcacaggactgctgctgcgccatgtgattggatatgtactatatgtggatgcatgaactttgctcgcagaacttcatgttttcagtgtaatgaaccacgaacggaagattctctaccagctgatccaacaagttctactccactccatccaaaaaggggatctgaactaggtccaactcatgttttagttgttcgtggtctggatgaaaatgctgacgaggaaatgcttcgatatgaatttgccaagcatgcacctataaaggacattcgccttgttcgggataagtttactcatgtgtccagaggttttgctttcatccattttcattcagtggaagaagctacaaaagctcttgaagctacgaatgggattacacttgagaagaatggtcaggttttacgtgtaacttatgctaaaagcacacatggaccggtatcaggggcttcacagtcaaacagccttgctgcagctgccattgaggctgcatcattttctcagcagtatgatgctataggttgggccccaaaagagtacaatcctgatgacaaactgaatagcaactcggaacctcagagcagtggctctgctccacagtctggatttgtttgggatgaaaagtctggttattactatgattcagcctcaggattctattatgatggaaataccggactttactatgatggtaatgctggagtgtggtattcatatgatcaacaaactcaacagtatgtcccttgtagtgaacagaacagcagtaaagcagctggggacatggcaaatactagcacgaagacctcagaaagtagtggtaaaaatgtagtgatttctgcacctgcagccacgattaaacaaagtgagaaaacttcattacctgaagctgttcaagctgctgcaagtgcagcgctggctgcagaaaagaaagaaaaggagagagcaaaagagatcaagttggcatcaaaaggtagtcttttggcgaataagaaaaaggtgaataatgtcctagcaatgtggaaacaaagaaatcaagaaggccaggcagggcgtgctatccttgatgacaaggaaccatccaactctgctgatgataaattaaacaatttacacaattcaactggatttgcagtgaaagctaagcctaaatctgatgttggaaatgctaaggacatgaactcgcctgctagctataattctcttggacgaacagctgcacccacagaaatgatagattctgatataaagcctacacctgtcagtaacagtttaggaactaccattatgggtgtcataagaggctctggtagaggaatagtcagatcagacactgcatttcatgcgccatctgatgctggtggtgctgattctttctccaacataccaacaagcacatgtgggttaacagcaaatgctggggcacctacttctgctcccttcaaaacagaattatctgctctagcatcttatactccatctggagtttcagggagtggtaaacgtcggttttctgaggctccaggacattcacagtacagagatcgggctgcagaaaggcgaaatctatatggatcatcttcttcacttggaagtgataatgatggactggatccaactggtgagtaccctcgaaggggtccaagtgagatggggtcaatgccatttcctccaggggtgggtgaacgttctagcggtgaaattggcaatactgaaaattatgaggttatcactgctgatagagcaatagatgagagcaatgtgggcaatcgtattctgcgcaatatgggttggcaagaaggactggtacgttctataactaattttgtttattactctttgatggctttccttgctgctgcctgtatttgaataattctttctggtgtccgtttttgtttgtccagccactcattgtgttttatattgggcttgccgttgcattatataggctgtagaattttatttcctgcacttgtgactgagttgagcaaatctttatctgttatgggtaaagctaatgtattgacttattgattgtcgaatctcgctggtaggcttcctcgcaaggaaatttagtggattatattatcatcttgtttgacccataaactatcatttcttgtgatttacttgtgtttgttggctctacctcgtaaggctagaataaatgtggaaattactgatcactaatgcttgagggaaaatagctccagtaggcttgagtagtttgtgagacaagagaagttaactgtgactgcagaagaatcaatttgccaatatttcctcagtctggaagctgtgtaaatcgaatattctctgacttgagtatacattggcaatctcttttgcttgctattccttcgcaaatattcagggtctcggaaaaactggtagtggcatcaaggaaccagtgcaggctaaatctgtcgatgtgagggctggacttggaagtcagcagcggaaatcttctgacccgtcgctggaggcgcaagctggtgatagctacaaaaccatcatccagaagaaggctatggcaagattcagggagatgtcttgagctgtattgccaatttttgttgtaatgtcgatgtagtaatgttttactcgtggt

SEQ ID NO: 18779 - DNA, 1275 bp, Oryza sativa
  ref <308>: DATABASE ACCESSION NUMBER: AK099087
  ref <309>: DATABASE ENTRY DATE: 2002-08-28
tattccactcgccaacccgacacgtctctcatcttcacgcaacgaacagcagcagcagctcaagctaagctaagctaaagtactacgtgttctttcgtcttcgtcggcgccggagtttgattcgtcggagctagctagcaagaggaagaagaaaatgttggccatattccagaagcaggtggcgcacgcgccggcggagctgaacagcccgcggagcagcgcggcgaagcccaagaacccagacgagatcctcagggacttccacgccctccaccccatcgaggccttctccacctccttcggcggcggcgccgccctcgcctgcgtcgccggccacgcccgcaatggcctctctggctacgagaggatgttctgtgggctggatgacatctactgcgtgttcatggggaggctggacaacctgagcagcctgatccggcagtacgggctgtgcagccgctccaccaacgaggcgctgctcgtcatcgaggcctaccgcaccctccgcgaccgcggcccctaccccgccgaccaggtcgtcaaggatctctccggctccttcgccttcgtcgtcttcgacaacaagtccggcgccgtcttcgccgccctgagtacggatggggaggtgccgttgtattgggggatcgcggcggatgggtcggtggtgatctgcgacgagagggagatcgtgaagggagggtgcggcaagtcgtacgcgccgttcccggtggggtgcatgttccacagcgagggggggctcaagagcttcgagcacccgatgaaccggctgaaggcgatgccgcgggtggacagcgagggcgtcatgtgcggcgccaccttcaaggtcgacaccttcaccaagatcaactccatgccccgcgtcggcagcgccaccaactgggccgccacctgggacgacgctgccgcctgatgatggcgctccgtacgccgtcgtctcgtcgccgtgcgcctgccctcgccgccggcctcctcgccgtttgccgccgccgctcatctcttcctcctcttcttcctcctctctatatccgatgtgcttctccgtccgaagcatgcagattattagagcgatatttgcagctagcgtggaagcgcgccaatctatttttctgcggtgtttttacttaattttcacctcttctttttaaatttttatgtccatctttgggctctcgcctctcggcaatgtatattctcggtcgcgggtggcatgtcatggtacatactatgaatgatgaataagaaagagtttgcttc

SEQ ID NO: 18780 - DNA, 995 bp, Oryza sativa
  ref <308>: DATABASE ACCESSION NUMBER: AK069162
  ref <309>: DATABASE ENTRY DATE: 2001-12-06
ggttgggctatttctctctctcctctctccgtctcctactgctgcagctactgcccctgcccgccgccgccgccgccgccggactcctcccctccgccgcttcgcctccttgccggcgagcaggccggaccgaccgtgcgcgcgggcggcgtggacggggcggggctcctctcctccccgagtccccgccctcccctgtgagtgagccctactctactctcgcggagggcggcgggcgaggaggggctagctgcacctggcctcttccaccgacctgcgtctcgtgtcgaatcgaatccaaggtcacttttttcttatcaataaaagctggagcagaagtcagtatccacagtgaatgatatataccgttgtctttgtttctatagactatagcaaacttcagatattggctattgcaaagtatagccggggaaaccatcacacctttgccaaaactaccgctgctaatcaaaatactaggatctaaggtgctgcgtgaggttaccagtgatactattggagcttgtatatgatgtgtcctttgggaccattcttctgcatagctgtgcagaagctgctactagtttgttggagaacctgttggaagacagcttctgcttgtttgtataataagatcagcttctagttagtattacttataagttgctgcagaattttgtcgtttggcagcaccgcagaattttttactgtgtagaagctgtagaacatctatatatcacttttcaatttgaagaattgtaaagagaggcaatggccgcattctaagcaggtgctctatggaaaatccctagttgcgcatgtcatatagttagccatactagtatatagtagtatgttggtaataaagctccacgtgtggacacctctgcttgttgggccatcttggtgggaggattcattttatgttttgagtgtcacatactcctaagatatttaattgatagttaaaatagcttacttggttgttttgtact

SEQ ID NO: 18781 - DNA, 1377 bp, Oryza sativa
  misc_feature (413)..(413): "n"=any one base of a, t, c, or g
  ref <308>: DATABASE ACCESSION NUMBER: AK069163
  ref <309>: DATABASE ENTRY DATE: 2001-12-06
ggccatgcctgacacctccagcttatctacagggcgagtcgagtcgacgccgatagcgtgatcgatcgatcgagctcgtcgtcggctacacattggtgggtcgatcggcggcatggcgcagcagctgggcctcctcgccgccgtcttcgtgtcgctcgccgtgcacgtcgcgctccactgccccatccagccgctcgccccgccgcccgcacgcccacccgccgccgctcgcttccctcccaacaacctcctccagaatctggagaagcttggggaagggatgctgagcgcgccggaggacgtgtacgtggacgacgccggcggcgaggtgttcacggcgacgagggacgggtgggtgcggaggatgcaggcgaacgggtcgtgggagcggtgggggctcgtcggcgacaccnacaatgtattgttgaaagtggatgagaatggacgcgtgacgcttcttgcttcgactgtctaaggctccacgatcaggttcgcggacgcggcgatcgaggcctccgatggcacggtgtacttcagcgacgccagcaccaggttcagcttcgacaactggttcctcgacttcttcgagtaccgcttcaccggccgcctgctcaagtacgacccccgcaccggcgaggcctccgtcgtgctcgacggcctcggcttcgccaacggcgtcgccctgccgcccgacgaggccttcgtcgtcgtctgcgagacgatgaggttcagatgcttgagagcgtggctgaaaggggagaaggctggggaggcagagatcttcgtggacaacctgccggggaatccagacaacattcggctgggttcagatggccacttctggattgcccttctccaggtgaggtctccatggctggacctgatctctcgctggagcttgacgaggagggtcatcgcgtcgtacccagcgctcatcgagaggaccaagacatcgctcaagggagcattggtggctcaggtgtcgttgaacggcgagatcgtgaggattcttggtgactctgaagggaatgtgatcaaaatggtcacttcggtgacagagttcaacggagatctcttcatcggcaaccttgcgaccaacttcataggaaaattatccctggctaaggttacacgggagcaggaggatgcagttccttcgtagacagttacagtttgaagtgttgatgtgtgatcatcagttggtatcgtaaatccgggggcaactcataattgacacttgacacagcttgagcgcagtcatacatatagctatagcgtacagtaatcagttagcggtaatggttttgcataacttccatgctgtaaaagatttgaaagactggtgatcgtcctatatcgagcactttgttctgctct

SEQ ID NO: 18782 - DNA, 2454 bp, Oryza sativa
  ref <308>: DATABASE ACCESSION NUMBER: AK069164
  ref <309>: DATABASE ENTRY DATE: 2001-12-06
gggtgatcctcctccccgttcttggctcccctcgcattcgtcctcacttcccttcttccatgggggttcgccgccgtgagtgaggaggaggaggagtagtactaggaggaggtgaggccatggagagggtggaggatccggacctggaggacccgaacccggacgtgggggagctgttcagccactacgacgggctctacttccgcggcgcgctcgccggcgccggcttctccgtccagtggagctcgccgccgtcgcggatggccggttcttttggatcgtgtaccttcggaaaaccggataataccataacattgtctgaaactgtgctgaaatatcgctcaagtattgatatgaagaatgcattgctgcatcagatgatccatgcaatcttatttgtaaagcatcataggaaggactgccggggtcatggtcctatttttcgtgcttggatgactgctattaacacctgttctattgacgatcaccagagaccacctgatgggtacaatatcaccaccagacatgatttttctccggacaagtccacccgcagcctaagtggttttttgtggaagtgtgaatattgtgggaatacacttgtgagagccacaaacatcggtgctccatctgatgcctgctgcattgagaatgttgacaactgctcaacctgtggcaacatgctttgccactggcataaccacaagatgaactgtggtggcacatacacaaagatgggcacatcaacatcggcagaagttcaaaacaatgttcaaggtacaaaaagatgcccaactgacatgaaaatggccaagtcacaaagaaccatacggaaaccagagtcaccagattcagatggattgcaggagaaagctactgtcatgaaacaaaaagcagaaggcgagcttctcgcacttgtggctggcagcaatttaaaattaacaggaagtaactcttcaaagaagggagtgaagaggcataggcctgaagacactcaagacacaaatgctatgctttctacccctctgaaaaacctgaagctgggcctagacttggtttcatctgggaagcacagggtgtcatctatagttggtagcaataacacaaaatcatcaagaggtagtgcttcaaggaagcaacgcaaacgacattcacctgagaatgttcagaagtccagtgttctgcctgctctctctcaaaagaagctgaaactgaaggaagacctggttgtatcagggaagaacgagcctttatccctagtgaatttcagcaatggaaaatcagcaggaagtaactcatcaaaaaaggtaagcaagcagcatgaacttgaaggagttcagaaatcctgtgttcagcctgctagccctccgagaaaaccgaggcaagatcttgttgcatcggtcaaaaccgagatttcttgtctagccagtcgcagcgatgctaaagtgttgagaggcagctcctcaaaatgtgcaggcaatcagcatgagcctgcagacattcagaaaagcatcgctctgccttctgcctctgaaagtaaactcaagcgacagaatgaaattagctcctcaactaaggcagggatgcaggacaagcctagaggcactcagaaaaccattgatctgcctgcttcccctcaaacaaaactgaagcaatcagtgttgcagaagcaaaagagacagtgcggaactaggaagtcagctaatgagcaatttgccgtgattagtgcttggctgaactactacgagtcagaaggatcaagtggatcaactgagccccttgtaaacaaaagaacagagcggagaaggatagcgaggaataggataacttatacacggtcaaggaagcaaaatgccaggggaaatgcttccatcaagtcccaaccttctgaagatgactcgtctcaagcaaaagctgcagctccatgcttggagattgttgttagcaccccttctgagcaggtggtaaatcaatcccccggatgccagtcccagtcaccagctccatacttggcgatcgttcctttcgacgctgctcatgatatggttccacttcagtcagcagatccacccggtttaactgatgatccaaccattacttctggcataattgatatttcagatgatgactgattttattttcgaattggcattgatcctgcgacaggcaatgctttcgatggatgaacaacatactggatgctaacaaactattggtgttaggctcgcatcattttggaaattgacattgtttttgcatagtgcctaatatagaacagtagctgcttatgagcataggattgcaaattttgcaactcatgttcgaaccacagtagcataaattcttatagtcccagcaggatctcagaagtagactcttatatcttgggcacaaacctctgaattatgatatgtaaaatgcaatttcaatatagtcttctgtgaacactgtgcg

SEQ ID NO: 18783 - DNA, 1208 bp, Oryza sativa
  ref <308>: DATABASE ACCESSION NUMBER: AK069165
  ref <309>: DATABASE ENTRY DATE: 2001-12-06
ggcagcaccccccacctcctcgcctcccacacatcgctcccgcgcattcccaccgcccgcctccctccctccatctgccgccgaggagttccccgatcgcgcgcgcgcgtagcgtagcgtagcctaggcggcggcggccggggccggagggggggacatggcgccgcagaagaggacgacgctggtctacagcttcgtggcgcgcggcgccgtcgtgctggccgaccacgccgaggtctccggcaacttcgcctccgtcgccgcgcagtgcctccagaagctcccctccaccaacaaccgccacagctacaactgcgacggccacaccttcaactaccatgtccacgacggattcacatactgtgttgttgctaccgagtctgctggtcggcaacttccagttggcttcattgagagagtaaaggaagatttttccaagaaatatagtggaggaaaagcaaagaatgctaccgcgaatagcctcaagcgagaatatgggcctaaacttaaagaacacatgaagtactgtgatgcgcaccctgaggagattgacaagcttgccaaagtgaaggctcaggttacagaggtcaaaggagttatgatgcaaaacattgaaaaggttttagatcgtggtgagaaaattgagctgcttgtcgacaagacagaggatctccgctcacaggcacaagactttagaaaagcgggaacaaagattcggcgaaagatgtggtgggagaatatgaagatgaagctcattgttttcggcattgtagttgcattgatcctcgtcatcatcttgacggtttgccgtgacttgaactgctggtaacacacaacacatatacggctcacctcacctaatatttgctatagccttcagttctgataatgctgaagaaagggcacacataaaaaaggagaaagggcgtgttagagggttattgttttgaaacaaaactgtcacatagggagtgcgaaatcaccatgaatctatcagcttgattgatggtgttgctagctcatcaacttttatttagttatttctggacccaaaggctcacaatatataatagagccctctcctgtgcttgtacagggatgtccatattctttctacaatgtaatattactagtattcttgtaattcagaagaggtaattttgcatgtttgcttcaatatatttcgtacagagctaattgtccaggcc

SEQ ID NO: 18784 - DNA, 973 bp, Oryza sativa
  ref <308>: DATABASE ACCESSION NUMBER: AK069166
  ref <309>: DATABASE ENTRY DATE: 2001-12-06
gcttcctccctcctctccctgccattgctccgctcggctcgctgcgaggttggtgctccgcgggtccacgcggcgttgcgagagtgagagagaggacgaggtcctcctccttccgcgtcccccgctcgctgtttcatccgcttcttcctccctccatcttcgcttgtgagctcctccgcgcgtcgcgagccttactgaaacttctgatccctccgaaaccgagaaaagaggggaatctgtgaagagattttagcagcagtgcaatggaggtatttggaaaatccgtgattgctgagcccagcaatgtgatttacttgtccagtattcttaacacagaagggccaatccctagtcacaagtgtgacaagaattgccagaacgagcacgtctttggcaacatgtaccgttgcaaactgaccgggaccacgcacatctgcgacaaaaactgtaaccagaggatcctctacgacaaccacagctcactctgccgggtcagcgggcagctgttcccgctctcgccgctggagcagcaggcggtgagggggatccggaggaagcatgaggtcgacagcaacgaagggtgctcctttaagcgcaggcgaggtgcacaactgcatccatcccctttcgagaggtcctacaccgctgtgtctccaatcccaagccaagttggagacggcatggacctgagctagagataacgagaatccgtcttttcttgcccacagctggctaatgccgttgtttcgacccctttctccctttgacaggatggaactataagagcttccttctttatagacttacgaagggatatgagactctccttggatgcaccgaataaatgtctatgtagtatcagttctaatttatgggaccttgttgtaactcgtaattttggttgaaccgcctattctgaattgcatagtactttctgataatcatttgatgctatcgcttagattattttcct

SEQ ID NO: 18785 - DNA, 1199 bp, Oryza sativa
  ref <308>: DATABASE ACCESSION NUMBER: AK069167
  ref <309>: DATABASE ENTRY DATE: 2001-12-06
gatcttttctctccctttttctccttcccatcggacggtagggccggtgaagggcgggggcggcggtgccggcgtcggggacgcgggggcgcagtggggcgaggaggccgtggcggcgaggaaggcacgagggagcggctggggggaggcggcggcggccggtgcgggcggggatgtcgcgcgccggggtgggggcggcgcaccttcttgagcgccacgatcttgcccgtcaccgtgtcccgcgccttgtacacgttgatgtacgtcccctgcccgatctgcgccaccgacaagaccgatgagctcagttcccttcccccaccaccaacaatggcgagcgcgagggcaggagtacgtaccttgtcgatcttctcgaaggagtcggcgcggcgcagggtccagccgtcgatggcctcgccgacgacggcggagagccaggcgggccagccggccgccacctgctccccgcgcgccctgttggcgaagctccccccgagccccaggccgaccgcctcggcggcggcagaccgcgacgaccatgcgtgcctctccctcctagcctgcttcggcggcttcttctcctcctcctcctcggccgccttcttggcgacggcgggcggcttctccggggcgacgggcggggggttgggctgctgggggtggtcgagggagggggcggaggggcggccgaggacgcagctcatgtgagaggaagggaggaggaagaagggttggagatagaggatgatatgtgggccccacatgtcaatgggtcccacaaatatattttttttggtgtgaatgacagatgggtcccacatttttttttaattctaatgccacttaagcgccacgtgggacgaagaccgggtcaataccgccacgtcagcgccacatcagcaaaaccgccctccaataccgctaagggagtcaaattgcaccggtttcaatagttcggggagtcgttctctctggttttctggttgaggggtacgaattagattcggcatacaattaagggagtcaaagtggactttttcctttcatttcaggtttcagcctgatcagtgatcaaccactgatcactcactgctcactagtcaatagtcaatcatcactcatcagagctgcttcatactaaattatggtaaaaatggagctgcaacatgtagcagccaatttaatgggagccagttacc

SEQ ID NO: 18786 - DNA, 776 bp, Oryza sativa
  ref <308>: DATABASE ACCESSION NUMBER: AK069168
  ref <309>: DATABASE ENTRY DATE: 2001-12-06
ttgtcccaaaaagaaaaaaaaaaaacctcacgcatcgcaaatcgctcctcccccatgggcgacgcaggcgggccccttcccggcgagcgccgcctcagccccgccgaccccgaggagccctcgccgccggcctcatcgtcggatgggactgggagcggcggcggcggcggcgaaaactccgtggaggagggcgacggggaagggcccgggtccgggtccggtacacccacggcgaagcggcagctcttcgacgctgacggctccgcgtcgaggcccacccgccgccgccgcatcgcctccgacgacgagattactcaggcttttacaggtgaaactacaagtgaaaacacttcctctacgaatgaaagtaatcctttcattgcagtattggatagtatgtggtctaagaagagagagcttgatgctataaaggaggccgggaaagatgagcgccatgaaaagttattgtcattgcaaaaagagagattggcactagaaagacagaagttagaatacgagaggaatttattggaattcaagagaaaccagcgggatgagagaattatgaacatggaccttagtgatatgactgggcaactaagagaatactacttgaggttgcagggtgagatcatggctcgacgatcaggttgagctgcactacttgttgtgttgatggcctgcttatcgtatgaactatctgtcgtatgagctacttgctgtgtgaactatttgttatatgacctatttattgcatgaactcctgtgatgcatgg

SEQ ID NO: 18787 - DNA, 2428 bp, Oryza sativa
  ref <308>: DATABASE ACCESSION NUMBER: AK069169
  ref <309>: DATABASE ENTRY DATE: 2001-12-06
ggttccgcctccccaatccgtcccccgtctcctcgcccgccgccctcgactcccgtcttctcgcctcccgctggcatcctgctagcagaggtggcgccggcgttctcctgctcccgccgcattcgctcaccggtgagcatcctaatccatcccatccggcctcggcctcgagtttcgtctcctcgccgccgcttgcgccgatccccatcctgcgaggagaggtggcgcccggcgtcctcctgcttccaccgcatcgtcgctcgccgcttcagaggattatagtgtctgcttcattcggaggttcatcgtcgccaaaaataaataaaatttggccgtgtcaactctacaattaggaaggtttcggatttctcaacgtggaatgataagaaatggcatacagagcaatgctgcaaagtgctgcggagtctgctatacagtccattggtcttggttacgacattgctcatgatatacgtctcaagtattgcaagcagcgcagttcgcctgacccgttgctcattgagcttgaccatgacgaggttcaggatattgtgctccctggtggactgacagttgcaggcgtgtccaagtcgattaagtgtgacaaaggggagcggacgcggttccggtccgatgtcctgtcatttcagcagatgtcggagcaattcaaccaggaattatctttgtctgggaaaattccatctggtttattcaatactatgtttgaatttactggctgctggcagaaagatgctgctaataccaagtcacttgcctttgatggttggtgtatcacactgtacactgttgcactctcaaaggcacagattgtactccgggatcatgttaagcaggctgttccatcaacatgggaacctgctgcattagcaaggtttattagaaagtttggtactcatgtagttgttggtataaaaatgggaggcaaggatataatttatttaaaacaacagcattcatcaactttgcaagctgttgatgttcaaaaacgattgaaggagatgtcagaccgaagatttcttgatgcaaacgggcaatctgacttcagtttcaaggattcctatggaaaggataagattgacacaagagagcatcggctgagatttgtggactccagtccattgaattcttactcttcaaaggaggatttggtgatgatgcctaagcggagaggtggaagggataaagatatcctttctcacagcgagtggctgaatactgttcaggcagaacctgatgttatctcaatgtccttcatacctattacttcactgttgaatggagttcctggctgtggatttttaaaccatgcaattaatctgtaccttcgatataagcctcaaattgaagagctgcaccaatttttggagttccagcttccaaggcagtgggctcctgtttacagtgacctccctcttggtcctcagaggaaaagacaaagcactgtatctttaccagttaatttaattggtccaaagctttatgtttgtaccaacatggttgatgtgggcaaaagacctgttacaggaatccggctgtttcttgaaggaaaaaggagcaacaaactagctatccatctccagcatctctgctctcttcctcagattcttcagcttgaagatgatccttacaatgaccaaactccagaagcatatgaccgcaagtactacgaaccaattggctcatggaagcgtttctcccatgtctgcactgcaccagttgaatcagatgactcctccattgtcacgggggcacaattagaagtggttagccatggcttcaagaaaatactgttccttcgcctccatttctccaaggtctgcaacgccacttccgtcaggaaccctgagtgggaaggatctccaaacctggctcagaaatcgggcctcatctcaacactcatcagcacacatttctccacagcagctcaaaagcccgcgcctcgccctgctgatgtgaacatcaactcggcagtgtaccctggtggaccccctgttccagtgcagaccccaaaacttctcaagtttgtggatccaacagagatgatgcgtggaccgcaggatctgccaggttattgggtggtctcaggtgcgaagctgcagctcgagaggggcaagatctcgctgcgggtgaagtactcgctcttgacagcaatgttgcctgacgacgatgagtttgcgttcgatgaagagttttagaaccatgaaaccgagcgaagaaaagaaacccacctcattttgtttttatcatttatgtgcagctaacagcaggaactcgaatgctcaatctaggattttcgtagcatttgtaagtgaactagctggaagtctatgttgtatacagttgcgggtttgaaacatggaagcagaaatgaacggtctctggcttggatgacgcgagagtttgttgt

SEQ ID NO: 18788 - DNA, 962 bp, Oryza sativa
  ref <308>: DATABASE ACCESSION NUMBER: AK069170
  ref <309>: DATABASE ENTRY DATE: 2001-12-06
gatctgaagagagaaattctcagcttatagtcaggtgaggtctgagctgaggttgagagatggcacaggcaatggcgtccatgaccgggctgtcgcagggcgtgcagctgccggccgggcccaggcgcgccggcggcaggtccaggctcgccgtcgtcagggccgacgccgccgccgccgacgtccagaccggccgccgcgccgtgctcggcctcgtcgccaccgggatcgccggcggcgccctcgcgcaggcggcgctcgccgaggccgccaagcccatcaagctcggccccccgccaccgccctccggtggactccctgggacgctgaactcggaccaggcgagggacacggacctgccgctgagggaaaggttctacctgcagccgctgccgccggcggaggcggcggcgagggcgaaggagtcggcccaggacatcatcaacctcaagccgctcatcgagaagaagcagtggccgttcgtcagggacgacctccgcctcagggcctcctacctgcgctacgacctcaaaaccgtcatcaactccaagcccaaggacgagaagaagggcctcaaggacctcaccggcaagctcttcgccaccattgacgggcttgaccatgcagccaagatcaagagccccgaagaggcggagaagtactacacgttgaccaaatctgctcttggcgatgtcctcgccaagctaggctaggatcggcataatggccatatggggtttcggtgtttttatgtttgttcatatggaaccggcaatgtaccctccatgttgatattgtatcagcaagcacttacgtatgattcaatcttgagttgttgttgacggctaaatctccaagcaggcgcgattatcagaaaacaagggagaaatccaaaagttctgaacaaaatcatcgcataattcattcatattcagaagcatcatttcacatcacaagtttag

SEQ ID NO: 18789 - DNA, 4721 bp, Oryza sativa
  ref <308>: DATABASE ACCESSION NUMBER: AK069171
  ref <309>: DATABASE ENTRY DATE: 2001-12-06
ggtcagatactgttcatcgttctgaactactcagacaagctaggatagccacaatctcgcgtgtgttcagagtgttctagctaacaattggtatcagagcagtactggaacgatccggcgatgtcatacacaccgcctggccgtcgtggtggcggtggcggcggggggagcggcaacggccgcggcggcgcaagcggcagcggcggggggaatggagcagacggcgcattacttccgctcgtgtctcaggggagagacacatcgcacaccgctcgcctcccagtcctctcgaggacaaactacccggattgggcgctcctgatgcgcgtcaacctgcaggcgcaggggctgtggacggcgatcgatcccggctacgcggagtttcgtgaagatcgggcggctctctcggcaatccttcaggcggtgccgcgtgagatgttgcgcgggctggcaaagcatgacacggcgaaggcggcgtgggacgccatcaagaccatgcgggtcggcgttgaccgtgtgcgtgaggcgaaggagaagggcttccgtcgtcaatttgagtcgatgcgattcaaggagagggagacgccggaggagtttgcgatgcggctcactgccgtcgtcgcggacattcgcgacatgggtggagtcatggaagatgaacacgtcaacaagaagctgctgcgcgttgttcccaagaagtataagccggtggctatctctctcgagcagctgctcgatgtgaagaccatggcgctggaggagctagttgggcggctgtcaacagtggattcttacagcgatgatgaggagggaagcgatggcggaaaattgtacctcacggaggaacaatggcaggcacgtgtgaagcagcgggagcaggagggctccggcaacagcggcaataagggccgcggcgcgcccggcacgcagaatcaccgaggcaagcccggtgggtcgccaaagggcaaagaggcggccactggtgcgaacagcagccgcgacatctcgagggtaaagtgcttcaattgtgatgaatttggtcactatgcaaggcagtgccgcaagccacgacgccaacgccggggagaggcgaacctggtgcaagccgccgaggaagaaccgacgttgcttatggcacatgtcgtaggggtgtcacttgctggcgaggcgacactcggacgaacacctggtggacaggaggtacacctcacggagaagaaggtgatcctggaccacgaggatggtggtgaggaggaggtgacaagagattggtttctggataccggcgccaccaaccacatgactggagtgcgttcggcgttcgccgagctcgacaccggcgttgttgggacggtgaagtttggcgacggctctgtgattgaaatccaggggcgcgggaccgtggtgttccgatgcaagaatagtgatcatcggtctctcgacacggtgtactacatcccgaagctgcgcaagaacatcatcagtgtcggccgtctcgacgcgcgcggctacgacgcacatatctggggcggggtctgcacactccgtgatcccgatggtcttctcctcgcaaaggtaaaacgagacataaattatctctatatactcaagctgcatattgcaaatccagtctgcatggcggcgagcggtggcgacatggcatggcggtggcatgcgcgtttcggacacttgaacttccagtcgctccggaggctggcccaggggaacatggtccgcgggcttccgatcattgatcacactgatcaactgtgcgacggttgtctcgcgggcaagcaacgacgactcccgttcccggaggaggccaagtttagagcacaggaggcgctcgaactggtgcacggcgacttgtgtgggccgatcacgcctgcgaccccaggcggcaggaagtatttcctgctcctcgtcgacgatatgagccggcatatgtggatacggctcctctccggcaagcatgaagcggcgacggcgatcaagcagttccaagtcggcgttgagctggagtccgggcgaaagctgcgggctctgaggacagatcgtgggggggaatttacctccgtggagttcatggactactgcgccgatcatgggatgaggcgagagctcactgctccttactcccctcagcagaacggagtcgtggagcggcggaatcagaccgtggttgcggcggcgcgctccatgcttaaggcggctgggatgccggcgtgcttctggggggaggcggttgtggcggcggtgtatgtgctgaaccggtcgccgacgaaggcattgaatggcgtgaccccccatgaggcgtggcatgggcgacgtccctcggtcgaacacttgagggtgtttggctgtgtaggctacgtcaagacggtgaagccgaacctgcgcaagctcgacgatcgaggtacgaggatggtgtttattggctatgaacaggggtcgaaggcgtatcgcatgtatgaccctgtggcgcggcgcgtttgcgtgtcgcgtgatgtcgtcttcgacgaggcggcgacatgggcgtggcgtgatcctgagacagaggcgactgaagaggaggaattcacggtggatttctttgtgaatcccgtggactctgttgttgccgacttgggcgaacaggctagcacgcctgtgcagggaggcacgtacacggcgtcgacggccactccgccctcaccaccggaagtgccggcgggggtggagttttgctcaccaccaaactctgtcacgccagggacaaatgaaggccctatcaggtatcgccgagtgcaggatatcctatctgctactgaacctgtccttgattttgattatagcgaccaatgcttgctggcaagtgaggaaccaatgagtcttgcagaagctgaacaacagttgtgttggaggcaggcaatgcaagaggagctaaagtccattgaagacaatcagacttggagctttgctgagctccctgttggacataaagcaattgggttaaagtgggtctataaggtgaaaaaggatccatcaggagttgtggtgaaacacaaagcaaggttggtagcaaagggatatgtgcaacaacaaggaattgattttgaggaagtgtttgccccagtggctagaatggaaactgtgaggctcctgattgcagtagctgcaaacaaaggatgggagattcatcacatggatgtgaagtctgctttcctgaatggtgatttggaagaggaagtttatgttgtgcagccacctggttttattgagaaaggaaaagaaggccaggtgttgaggctcaagaaagctttgtatgggctaaagcaggctccccgagcatggaatgcaaaactgcacaacaccttgatttctctgaatttcatcaagtctgaaactgagagtgcagtgtatgtgagaggaacaggaagctcaaggttgatagtgggagtgtatgtggatgatctgattatcagtggggctcaagcaagtgaaattgattttttcaaggaggagatgaagaagaaatttcgcatgagtgacttaggtctgctgagttactatctgggaatggaggttgtccaaaaggatgatggagtgtttctgtcacaaactgcttatgcagcaaaaatcctagaaaagacaggaatggaaggctgcaattctactcaagttcccatggaagctaggttgaaactgaagagggagagtggaggggaaggagttgattcaaccatgtatagaagcactgtgggaagtctcaggtatttggtgaacacaaggccagatcttgcttactctgtcgggtatgtgagcagatttatggagaaaccaacttctgaacattgggcagcagtgaagcatattctgagatacattgcaggtactcttgatgttggctgctggtttgggagaagggaaaagggtgaactcagattgattgggttcagtgacagtgatatggctggggatttggatgataggaagagcaccacaggtgtactgtatatgctgggagacagtttgatcagctggcaatctcagaaacaaaaggtggtagctttgtcgtcatgtgaagctgagtatattgctgctactactggtgcttgtcaagggatttggctcaataggctattggcagaattacttggagaggaccctggccaaactgtgatgaaagttgataacaaatcagcaatcaatctctgcaagaatccggtactccatgatcgaagtaagcacattgacactcgatttcattttatcagggagtgtgtggagaagaagcaaatcgctgtggagtatgtgcgaacagaagatcagcttgcagatatactgactaagcctgttggacgagttcggtttcttgaactccggaagaagatgggtttggagcaggcacatcaagattaggggggaaattgatagctttatccaaataatcttgtgtgcgaaagctagttttttcagttgcatttttttaacttagccattgcattttgtaatagcattggattcctggttgcatgcgctggctgaagattagcaaactcggttagtgttagttatcgtttttccgttttttcggtagtagaagagatcgagcagggatcggatcgtgggatggcacggtcagtcgttgatccggcaagatcgcgcatgtaacagactcttttgtggaggtgaataaaaggaagaaaaaccccagaaaagctgcgaagtttttcagcacc

SEQ ID NO: 18790 - DNA, 2010 bp, Oryza sativa
  ref <308>: DATABASE ACCESSION NUMBER: AK069172
  ref <309>: DATABASE ENTRY DATE: 2001-12-06
ggcaggagtactagtgtgagtgttgctgctgctgctgctacggtttcttgttcgttttggttcatctccttcctccaatggcgagagctcgcagcaattaggaggttcttgcaccgttctgtggtaggatcaagaatttgggtggcggcggcgccggcggcgagggggtggtcggagctgcggcggcggcgagggtcgtgttgcgtgggttccctggcggtgctgaggcattcgagctcgtcgcgaggttctgttacaccggcggcggcggcggcggcgtcgcggtgaccgcgtcgaacgcgtgcgcgctgcggtgcgcggctgagttcatggacatggcggcggcggcggcggaggtgtcgacaccgccgagcctggtgaagatgacggagaaggctctcgacgagatgccgcagtggtcgtggcagagcgtggtggacgccgtgaggcagtgccagcggctgctgccgacggcggacgccacgggggtgttcgaccgggtcgtcggcgcgctggtgtcccacgtggccgtctcccccggggacgccaccccgacgagctcctcgccggagagctcggcgttccggttctcgtgcgacaccaagagcagctgcctcagcgcgcggtgcaccagccgcacctggtggttcgaggacctcgccgtcgtcctcggccccggcatggtggagcgcgtcgccggggcgctcctcgccaggggcaccgaccacggcgtcgtctcccggttcctcttctactacctcaagtgccgcgtcgccggcgccgccaccgccgacgacaagagggcgatgctcgaggcggcgatcgccgccatgtccggcctcgaccggagctcggtctcctgcaggggcctcttcggcatcctccgcatctcctcaccgctcaagctccccacctcctgccacgacagcctcgtcgccatgatcggcgccaagctcgaccacgcgacgctcgacaacctgctcgtcccggcgccgcccgggacgacgagcagcctgtacgacgtcaccctcgtcctccgcttcctggacgccttcctccaccacgccgccgccaccggcgcgcgcggcgagacgccgaggctgaagaaggtgggcaagctcgtcgacctgtacctcgccgaggtcgccccggacccgtcgctgcgcccggccatgttcgtcgagctcgccacggcgctgcccgccgcggcgagggactgccacgacgcgctttaccgcgccatcgacgtctacttccaggttcacacgcggctgacggaggaggagaagatgaggatctgcaaggggataaactacgagaagctctcgccggagtgctgcaagcacctcgcccggaacgccggattcccgacgagggcggcggtgcaggcgctggcgtcgcagcacacggtgctcaagagcctcctccgcggcggcggcccggacgaacacctgaggccggtgtccgcggcgaagcaccgcgccggcggcgaggaccacgacgacctcgtcgccgccggcggccaggtcgtcctgtacgccgggaggctcgacctgtcgctggagagccagaatctcaggtcgctcctcgacgggatgcactggcgggtgatggagctcgagaaggtgtgcagccggatgaagacgcagatgagcaagatgaaggcggcgaggagagccaccggaggcggcggcggcgccgccgccggccgccgcgctgcttcaagatcacttccccggatgtgttcttgaagctcgtttcatactgattgtacataggagtagcagcaaatgcagagatgtggttctttcatccctgcattcttgccccttttttttctcttcattttttttctcaatttttttccatatgtgtattatgatgatgcatcagttcttggtcactggagagaagagctagtagctgtgaaaattgggagtgtctgaactctgaagaacatggcaatgcatatagattgtgaatatagattaactaaaagtctataatacc

SEQ ID NO: 18791 - DNA, 2861 bp, Oryza sativa
  ref <308>: DATABASE ACCESSION NUMBER: AK069173
  ref <309>: DATABASE ENTRY DATE: 2001-12-06
gacagggtgcctcctcgatgcccacttcactgtggcttctctattttctaggtgtttgaggatgctgtcataattgattggcgccaaaactttatcagaggcagatggatcttatcatcattttgaatgggccattgggacagatgaagggcaatctgatgttttcggctttgaagatgttgggatgaatgtacaagtccacagagatggtattaatcttgatcagtttgaagactatttcataactttgagagcttggaagcttgatgggacctacacagagctgtgcgttaaagcacatgccttaaagggccaatcgtgcgtacaccacagactggtggtagggaatggttttgtgacaattacaaagggtgaaagtatcagaagtttctttgagcatgctgaagaggctgaggaagaggatgaagaagatgccatggacagggatggaaatgatcttgatgtgatggcttacatccacagaagcatgccaaaagtcctgaactggcaagagaatttcttttagatgccgcggcagttatatttaaagaacaggtcgagaaggcattcagagaaggtacagctcggcaaaatgcacacagtatttttgtgtctcttgcattagaacttttggaagagcgagtccatgtagcatgcaaagaaattattacgttggaaaagcagaacaagcttcttgaagaagaagagaaagaaaagcaagatgaacaagagcgcaggatgaggaggagaacaaaagagagagagaagaaacacaggagaaaagagaggctgaaagaaaaagagagggataaagggaaagaaatccttgggttgaaatcatcagatgataattcatgttcaactctcagaaactcaacatctactaatgatgaatcaacaaatactcctgactctagagattcagctagtgaagaagaagataattccacagtggtggatctttgctcccctgacacctttgttgatcaaacagcttgcagggagattagtgtgcaaaacaatatggactactgcaatacattgacagaatttgctcgaacaaatagcagtgaccttttcacatctggacaatcaaaatcatcaagatggaatctgaggctgagaaaagatttccctcaagatcagtcctcttgttgctatgatgagtgcggagatgaaaatggaagcattggtgattttcagtggcaatcaaaggaaaggacaagacatagtgcccgaagttgtaactcagtgtttactacaaataacagaacaagggatagacacaactacatttccttcagctgtgaccctcgtgatgactatgtaataaatgacagctgttcttcatcatcaactggatcaggtagggagacaaagatggcaagaaaaacaggagttgagagacctagggtgcagtaccgcaggtgctatcctttggacaactttattgtgtcaaaagaaagccgtactggtaatactcagcagaaaaatggtgctccaaagcaagtatgggagccaatggattctcaaaagaagaatttgttagacaacaaaaacaatgggtcgggagcagtttgtaatgttgatccaaccaaattagtggaacaagatagcagtgaatgcccaaattttgacgcagggcatgagccactaagtcaatcttctgaaagatccagggatatctgtaaatcagaaacagatcaaccatgtgaaaacaatgagaaaaatcaagctacttcttgcggtggtactattatggtggataaacaagactgctactcaacaaaagatgaaggttctgggcatgatgaagagctgatgatgaactctaccagttctgatggcttgtcttcatgtacgagtgaagcagatagagaaagcagcacaagcagtgtgacttctttgagcgctcaacatcaagaatcatcatcatctgactctgaggaatctccagagagagtcaacagcatcgaggaagctccatcaacaaagaccgtttcacggtccttacttgaggcttgtgcaggaaaaggtttcagagaataccaaccaaaagccatgcaccggcctcacaacgacagattgggattcaacataccccctttccaagatcagctgttgcatcaccaaagcatgcatgtacctacacattcttcagccacaatggggctccacaaccatccctgggctgctccagcaagtggatacatgcagtatgcccagcctagccacttctattccaatccacttggatttggagtacctggaaagcagtctcctgattttccagtgcagtacagcaatgttcatcacttcccagctcctgcttttagttatgctcctccggagccgattcggaagaccacgccaagcttcagagtcatgcatacatcgccgccttaccgaaatggattgcatcagagtcaaactgttggccatcctcatggagacccgactctagaaaggcatccttctcagcctaagccgttggacctgaaggatgctccaggagagaacaaaagctcgcctgaggggaatgcatccttctcgttgttccaattcaacctgccaatagctccccctgccccaccatcatccaaagatgacacgagtggagagtcagctacaagaacgccgttggctcaggttcaagttcagccttgctcgagggagcagactgatgtcaaagaatacaatctgttttgctcgaaaaatggcagcatgttttcatttatatcgagataaaagcaacacacgcgggagatctgtactgttgttgctgttgtggttggcactatacttggtgagtgatttgtattgtccgaacgaaataaaagatgcttgagttttttccttgt

SEQ ID NO: 18792 - DNA, 3748 bp, Oryza sativa
  ref <308>: DATABASE ACCESSION NUMBER: AK069174
  ref <309>: DATABASE ENTRY DATE: 2001-12-06
ggcttattacaacttaccaagagacaaactaaacaataacaagaacgatgacaagcactatgttgatggacagcacccttgatacggatggcacagcatttatttgtcctgaatgtagctttaacggtacaagtttaccagaattaattagtcatttaaatgaaacacatggcgaagaaaccgcgacgaaaagtgtttcaccaccgaaaaatccagcagtattatcgaatgaaaagcgatcaagacgtaaaccagcatttagccaccaaattatctctcaaccacagcgtcagtcaatgccagtattcaaacagtctaatgttgatcccggctccattcatttctggaatcgtgttatatctgccgatgagaatgatcgaaaattttcagagtccacgaaaattcgtgatgaaaatgtgactcatccgaaaataagtccacaaagattaatcgcacccaaaataatacacactccaccaacagcagtagatacttcgccctcgttctgctcaccatcttttcagccaattcaaaagaactttcagtgtcgcgtttgccatctaacttacaaaaattttcatgattgcacagcacatatccgtcgcaaacatgaaattagtcatgcgcaagctggtcgttatgttggtaaactcgatactgatgttccattaccaccttcagcaacaggacattataaaattcgcttgaaagtcaaatctctacctccacaagcaccaacgactgcaactccaatcgagaatttcacgaacgtctatcaatgtaaatgttgtccgtacacagcatcttggttgaaagatgtgtctcaacatgagagacaaaatcatggaaaatattcctccttcgttcatgaagacacgccacatactaataaacataacaataaagatcacaacgatttatctacactactaattgacaatgttgaaccctacaatgatactcttcctaattccaatgacgaaattatcatgatagaagaagatattgatgatgatgaagaagatgctctttggaaatatcaacaagaactcaataacctaactgaatcgcccacaaatcacaataacaccacttatcatcaacagaaccatccgaatgcgagctttcttgcaaaacctttcaaaaaatttcaatgtccacactgtgaacactcatcgccaaagttagctaagctcaaacttcatattgctactcatacgaatataaagccatacatgtgttcgatttgtggctggcgtgccaatcttcgatggtatattcaatgtcatgcaaagaaacgtcatccgaatcagaatttcgaggttttacaactatccaacgaagaagctgaacaaacaatcaacgcctatatgcgtgaaaatggcctacagacgaaagtccataatcgttttgattctaaacatcactatcaatgctcactgtgccaatttcgttcgaaccatccacgattcatcgaacaacatattgaaacaaaccacagtcacatgatggaacaaaataataaccattccaatttaactcctgtagacctcaactctcaatattcatcaaagaccgtctatcccaacttttcctcgcacccgaatttcaatccaaatcgtttgtattactgttcgttatgttatcgtggttatcgctggcgttatgacgtcaaacggcaccacaagaccatgcatgagacagctgatgacgaagtaaccaaaggtcgaaatttccattatctggaatatgttccacaaattgatagtctgattacagcaacgatgtcgagtattcacaatccaatgaaacacgagaatgaagttgaagataatgatggtgatttgaaattaagtattgccgatgctcgaacagtcgatgtcactgacgaagaagcagctttactgatgattgaaccagagaaatcggaaatgaaccaaatcgtcattgatgatcatcctgaagatgcggtgatcgtctttgaagatgaccgaacagataagtcgacatcggaaattgccagactgtcatctcgaccgacctacaaaccatttcgttgtccatactgtttctatcgaactaactggcgcacggattgtatgcgacacatgcgagcgcgacataaggttgaaccaaatcaaaatggatattatgaaatgtcgcctgatgaagctgaaagaacttatgatgagtacgaacgtacatttggtttcgttgtggcaaagaaagttttagcacggtttacggactttcgtcaagtatcttgggaagatctgaagagatccatctgggagaaaatcaaagataaatcagatttcgaacaatgtatttatgatcgtctacgaccagatgattatgctctagcaccagtgattcaaacgccatcagtacaacctattgttattaccataccaaacaaaataccattagtgaaacagaaacgtgtttttacctgtatggactgtgcatttagttcacatcgaatttatgaacttgaacgacatgtttgttcgagaattcaaaaatttcaacaagaaaaatctcatggtcaagtcgttatctccttatacgaatgtaccaagggttcatatcgtacgatgaatctcaattatgctaaacaccatatttatctccatcaatccaaagagaatgaaaagaaaatgtttttctactgttcattctgtggctataatcatcgatcacgctcgaaacttattgtacatattgcgagaacacatccgaaacgaaactcctccaattgttcaactacttgtcgctacgcatttgatgctgattttaccattcaacaaactctgttaaagcgttcgtttatcgaacaacaattgcaaatacccaagcttttctactgtctttactgtccatacatatcggcaacaattctcgaacataatcaacatcgcttgtatcatcaggataattccatgtattcgtacaaatgtcaacattgttcatttgcatcgagctcttcgatttacactaatcaacatatgttattgcacaaaaatctaacacgagcaatatcaactgatatcgacacgaaatctttgaaatatattcctgtttctacaatcggcaaagaaatcctcggtaaaccacgccgtcacaattgcccattctgtagatcattcgcatcaagttgttcatcgacgatactcattcacataaagaatactcattctttgaacagtaagcagtttgatggtagtttgattattggtgcggaattagcaaaagaaatactctgctttgagaaacaataatcattcaatggatctgtatggcattgtccttgagaaaattcgaacgttttgtttctgtgtcagatgtctagtagattgtttttcagttcaatcataatgatctgtcgagctttatttattctaattacaaatttcctttgtatttgactccatgcgaacatgtcatctgtttgtttgtttttatagaaaacctatccaattactattgtattgccttctattagagatacatctgatgagttgtgcataaaacacacccacgaaatgtctatttgtttcattgcaataggatgaatcttcttgttggtttctcatttatttttgttacccatctgtatctacctattcgtcggcgttctacatcttcttgtcgcatctgtatatttacatctgttcttgtcttcatgttcgaattaattcctaaatcaaacgaataaacatattctacagtggaaaattcatggcgc

SEQ ID NO: 18793 - DNA, 2267 bp, Oryza sativa
  ref <308>: DATABASE ACCESSION NUMBER: AK069175
  ref <309>: DATABASE ENTRY DATE: 2001-12-06
gctcttcgcatcgtcttcctccgccttccccgaatcccccgctccccgacaccacaccgcgagatcctcctcttccagatcaagcacccaccctacctagggtttccaccccgccatggccgaggtcgcccgcgcctcggcttccccacctcccgcctccgcctccaccggcggcgaccgcaagcgtggccgctcctccccgtcgctcccgccgccgccgcccgggccccctccgcaggtcccgcatgggagcaagaggcaccgcagggacgaggggggcgggggcgggttcgatcggcgccgcctcgggccgggagtagggtacgacaacccggacgataggaggtatggaaatgatcatggtggtgcaggaggaagaggtggatatggggatgagagaggtcagggtagaaacttcaatcgtgcaccagattggactgattctggacgtggtggatggaatgatggcccggctaactctcgtagggaaggcctcatgtcttacaagcagttcatgcaggagcttgaagatgatgtttcgcctgatgaagctcaacacagatatgaggagtacaagtcagagtacataacaactcagaagaaagcgtactttgaccttcataagaacgacgactggctgaaaaacaagtaccatccgactaaccttgaaattgtcatggaaagaaggaatgaacttgcacgaactgctgcaaatcaattcctccaagatttgcagaatgggagtttagacattggtccaggattaacaagttctgcaacaaacaaatctgggaatagcgtagatgatacggatgctaatggaaaaaaggggaaacttggaaagagccaagatgatttatattatgctgctcctaaggctcatccagttagctctgagccccgtcgaattagaattgacgttgagctagctcaagctctcatttgtaaacttgattcagagaagggtattgagaataatgttctgtcaggtagtgatcatgacagagcagagaaagataagtcacatggttcaatgggaccaatcgtaataatacggggttcatctgctgtaaagggtcttgagggtgctgagttgctggacactcttgttacctatttgtggcgtatccatggtgtggattactatgggatgtctgagacaaatgagcccaaaggtctaaggcatgtgaaagcagattcaaggacgtttaatggggctagctcaaatgcagctgaatgggagaagaaacttgattccttctggcaagataggattcaaggccaggatccaatggaaatattgaaagcaaaggataagattgatgcagctgctagtgaagtgctggatccacatgtgagaaaaataagggatgaaaagtatggatggaaatatggctgtggagctaagggctgcacaaaacttttccatgcccctgagtttgtccagaagcatctcaaactcaaacatgcggatttggttagggaactgacttcgaaagtgagagaaaatatttattttgataactatatgagtgatcccaaggcacctggtgggatgcctatcatgcagcaacctgctccaagggagaaagtcagacagcggccaccaatagagagtcggctgagagatgagcgtggcaatcgtaggtttgatagaaatgattcaccaacccatgatggatccagtgacaaccctgatgatgcatatgattcttatggtgatccggttatgcatggcgcctttcctccggatattcctgctcctccagtgttgatgcctgtgcctggtgctggcccactaggaccatttattcctgcaccacctgaagttgctatgcgtatgatgagagatcagggtggaccaccaccttttgagccaactggtggtccacgtcctaggagaccagggaggggtggtcttccaatgggtggcccatcaccaattcttgctgctcctttaccaccccctcatatgcatgatccacgcaaaatacgaagctatcaagaccttgatgctcctgaagatgaagtgactgttatggactaccgaagcttgtagaggaattggagacacgatccttttttgtatctgggaaactgtaggtaatattacagaccgcaacaagacggcattcatttctagatttttttgtgaacgcaaacaggtaggactttgaggttcggagctctgttactgtctgtaaaatggatcacaggaaaacctgggacaaggagcatattctcattcaccaatcaccactcacccg

SEQ ID NO: 18794 - DNA, 2709 bp, Oryza sativa
  ref <308>: DATABASE ACCESSION NUMBER: AK069176
  ref <309>: DATABASE ENTRY DATE: 2001-12-06
gatccccatcggcgaccacagcaacaggatgaagctggtacaaagggaggcggagaagctggcgctgcacaatgcagggtttttggcccagaagcgcctcgcacgggggctccgcctcaactacacggaggccgtcgcgctcatcgccgcccagattcttgagtttgttcgtgatggagacagaactgtgacagacttgatggacttaggaaaacaactgctgggaaggaggcaagttcttccagctgttccacaacttttagaaactgtacaggttgaaggaacatttatggatggaacaaaactaattactgtacatgatcctatttcttctgatgatggaaatttggagctagcactgcatggttctttcctcccagtaccttcacttgaaaagttttcttcggttggtgtggacgactttcctggcgaagtacgtttttgctctggtcacatagtcctcaatcttcatcgcagggctttaactctgaaggttgttaacaaggcagacagacctattcagattgggagtcattaccacttcatagaggccaatccataccttgtttttgatagacaaagagcttatggcatgagactgaacataccagctggcacagctgtccgttttgagccaggggatgcaaaaacggttacacttgtaagcattggtggtcgtaaagtgatcaggggtggaaatggaattgctgatggtgctgtcaacagatctcagcttaatgaggtaatggaaaaggttattgcaaatggttttgggcatgaagattatccagattcaagtgaaggtattattggtgatggcacacatgactacagtgttgatcatgagaaatatgcaagcatgtatgggcctacaactggtgacaagattagacttggtgacactgacctttttgcggagattgaaaaggactatgccatctatggtgatgagtgcatatttggaggcggaaaggttctacgtgatggaatgggacagtcggcagggtatccagcctcagattgcctggacacagttgtaacaaatgctgttgtgattgactatacaggaatatacaaagctgacattggtataaatggtggacttatcgttgctattgggaaggctggaaaccctgatgtcatggacatggatggtgttaatgaagagatgattgtgggggttaatactgaagttattgctgctgaaggcatgattgttactgctggtggaattgattgccatgttcacttcatatgccctcagttggcagaagaggcaattgcaagtggcatcacaacattggtgggaggtggaactggaccagcacatggaacttgtgccacaacttgcaccccttcaccatctcacatgaaactaatgctacagtccactgatgaattaccaatcaatatgggattcacaggcaagggaaatactacaaaacctgatggattggctgagatcattaaggcaggagcaatgggcttgaagttgcatgaagattggggaagcaccccagctgcgatagataactgtttatctgtcgcagaagcttttgatatccaggtaaatatccacacagacaccttaaatgagtcaggctgtgtggagcatacaattgccgcatttaaagataggacaatacatacatatcatagtgaaggagcaggtggtggtcatgctccagacattatcaaagtatgtggagtgaaaaatgtgttaccctcttcaacaaatccaactcggccatttactttgaacactgtagatgagcaccttgatatgctgatggtctgccatcacctcgatagaaatatcccagaagatgtagcatttgccgagtctagaattcgagctgaaacaatagctgctgaggatatcttgcatgacatgggagcaatcagtatcatatcatccgattcgcaggctatggggcgcattggagaggtgattactcggacatggcaaactgcaaataagatgaagagacagagaggtagattacctatatccagttcccccgatgctgcagaggacaatgacaatttccggataagaagatacatagctaaatacaccataaatcctgctatagtgaatggcttttctgattttgttggctctgttgaggtgggaaaattagctgaccttgttatttggaaaccttctttctttggagcaaaaccagaaatggttataaagggtggtgctattgcatgcgctaatatgggtgatccaaatgctagcattccaacacctgaaccggttatgatgcgacctatgtttggtgcatttggaggggctggaagtgccaactctatagcatttgtgagcaaggctgctaaagaagctggcgttgcagtgcagtacaagctgggaaagagggtggaagctgtaggtcgcgttcgtggtttgacaaagctgaatatgaaactaaacgatgcacttccgaaaattgatgtcgatcctgaaacctacacggttactgctgatggagaggttttgagatgtcaaccaacacccacagtaccactatctcggaattacttcctcttttagacaactttagtgaaccagcctttcttaattagggttaatgcatgcatttggtctctctcttgtatccttttcaataatatgacttgtaaacttaaagctttttatgtgagttttccttcacaggtgcaataaggataacttttggccgc

SEQ ID NO: 18795 - DNA, 1833 bp, Oryza sativa
  ref <308>: DATABASE ACCESSION NUMBER: AK069177
  ref <309>: DATABASE ENTRY DATE: 2001-12-06
gatactacgtctacgccacaggcccacacagcgagcactcgcgctcgctcctcctcttcttcttcttctctagctagttagccggcgggcgccgcgcgcacaccgtgcagcaccggcactccggtctccggcggtcacagtgcggcagagcagttaaccatgggccaccgcctcgtcgttgtgcttctgctggccttattagtagctggagccgcgcgcgcggcggagcaagctgcgggcgaagacggcattcgcggcggcgccggcgccgatcatcaggaggcggccgggatcacgggcgggctgagccggcggagcttcccggcggggttcgtgttcgggacggcggcgtcggcgtaccaggtggagggcatggcgctcaaggatggccgcggccctagcatttgggacgccttcgtcaagactcccggtgaaatagcaaataatgctacggcagatgttactgttgatgagtaccatcgctacaaggaggacgtaaacatcatgaaaagtatgggtttcgatgcgtaccgcttctcaatctcatggtcaagaatattcccaactggaactgggaaagtaaattggaaaggtgtggcatactataacagattgataaactatatgctgaagataggcattacaccttatgccaatttgtatcactatgacttaccagaggcactagaggtgcaatatggaggactgttgaacagaaaaatagtggaagcattcgcagactacgctgagttttgcttcaagacatttggcgacagagtggagaactggatgacatttaacgaaccgagagttgttgccgctctaggatacgatgatggaaattttgctccaggaaggtgcacaaaatgcacggctggaaactctgccaccgagccttacattgttgcccatcacctcattctttcccatgcttctgctgttcagagataccggcacaagtatcagcatatacaaaaggggaagattggaattcttctggattttgtctggtatgaaggtcttaccaattcaacggcagaccaagctgcggctcaaagatcaagagacttccacgttggatggtttcttcacccaatcatctatggtgaataccctaaatcgctgcaagtgattgtcaaagaacggcttccgaagttcacggccgatgaggtccacatggtgaagggatcaatcgactatgttggcattaatcagtatactgcttattatgtccgtgatcagcagccgaacgccacgactctccctagttactcgtctgactggcatgctgcacctatttatgaacgcgatggcgtgccaattggaccaagggcgaattctgactggctttacattgtaccgtggggtttgtacaaagctgtcacctatgtcaaggagaagtatggtaaccccacaatgtttctatctgaaaatggcatggatgatcctggcaatgtgaccattgctcagggggtgcatgacaccacgagggtcgcctactacaggagctacatcaccaagctgaaggaggcgatcgacgacggcgccaactgcataggctacttcgcctggtccctgctggataacttcgagtggaaactcgggtacacgtcgaggttcggcctggtgtacgtggatttcaggaccctcaggaggtaccccaagatgtcggcctactggttcagggaccttgtcagcagcaaaaactgagctgggctttcaaccttgatataaccaccttttcgtttgcaaaaatgcacaaataagaaggtgggccaaatgagtagctaataaatacaagtagggttcttaacaatcttgaatgatgtcatg

SEQ ID NO: 18796 - DNA, 2067 bp, Oryza sativa
  ref <308>: DATABASE ACCESSION NUMBER: AK069178
  ref <309>: DATABASE ENTRY DATE: 2001-12-06
gagctatttcccaaaactcttctatagttcttatctcaacactggcgagccgcgagccacagttttaccgtcggcggcggctgctgctggagtctgcctgaagtaatctcatgatctcatcccctcctgtgcggcaagcaaatcagcacacattcgcaccgccgacgccgaacagaacaacaacaaccaccccctcgaccgaaagagacgagcacttcgttcccatatccgcacttattttacggcaaaaatctcctcctccctcccctaccacgatctccggcgtccccatccgcgcctccaactcgctgttgccctcacctcgatccccccttctgctccccacgttctctccccgtggtcccgagtcccgacggctgctgccaggttgcctcaaatctccccaaggccatcgcacgatcccccacacactctaagcttgaagtgtctttccttcctttccatggccgcgatgtatcgtcccgatccggcgaaccccgccgcccgccgcccgcgcctcgtcgtgctcctcctcgttgccttcttcgccctccagctgctcgtcttcctcgccttccgcggcgcgccctccccgagctcccccgatgccgccgttgaccgcgtgccggtgtcggcgcgccgtgacggcgaggactccggctgcgtgggcgggctagtgtacgtctacgacctcccgccggtcttcaacgaggatctgctcgccctgtgcgaggtgctcgcgccgatgtactcgctgtgcccgtacctcgccaacgacgggctcgggttcccggcgaaggggggcaaccagtcggagttcccgccggccgagctggttgggtcgtggtactcctccgaccagttcgcgctcgagcacatcgtccaccgccgcctgctctcgcaccggtgccgcaccaccgatccggcccgcgccacggcgttcttcgtgccattctacgcggggctggccgtcgggcgccacctgtgggcgaccaacgccaccgacgccgaccgcgacagggactgcctcgcgctgctgtcgtggctccacgcgcagccgtactacaagcggtctaatggctgggaccacttcatcgcgctcggccgcatcacctgggacttccgccgctcgccggacggcgggtggggcggaagcttcctcctcatgcccgggctggccaacaccacccgcctggtcatcgagcgcgatccctgggacgccatggacgtcggcatcccttacccgaccagcttccacccgcgcaccgccgccgacgtgcgcgcgtggcagcagtacgcctcgtcccgctctcgccccaagctcttcgccttcgccggcgccccgcgatcggcaatcaagggggatttccgcgggctgctgctcgaggagtgccaggcggccggggacgcgtgcggcgcgctggactgcggcgagggcaggtgcatcaagcaaaacgagctcgtcatggagctgttcctgggcgcgcgcttctgcctgcagccgcgcggggacagcttcacccggcggtcgctgttcgactgcatggtgggcggcgccgtgccggtgctcttctggcggcggagcgcgtaccggcagtacgggtggtacgtgccggtgggcaacagtcaggaggaagaatggtccgtgttcatcgaccgcgacgagctgcgcgccggcaatgtcaccgttcgtggcgttcttgcggccatcccggaagcgaaggtgcgggagatgaggaatcgcgtggtggagatgatacccaagctggtgtactccgctgcagacaaggaggggctcggcgacggcatgaaggacgccgtggacgtcatgatcgacggcatgctgcggcgagcggctgagcagcgccggagttggaggaaagtgtaaaatcttgtggccggaacagatcaaattgatcattcttttttacacatattttttgttcctttttcaaaagaaaagaaaaggaatcactaccacttggtacattttgtattgtcgtgagagtaggtgtgaattacgagtttacgacacaggtgattaatggatgaatttgtgcatttccg

SEQ ID NO: 18797 - DNA, 939 bp, Oryza sativa
  ref <308>: DATABASE ACCESSION NUMBER: AK069179
  ref <309>: DATABASE ENTRY DATE: 2001-12-06
gtcgccgaaaacgatacgcgacgcgccgcacggccgctcacctcgccctcgccaccgtatcgcgtttccgcccccgacgcacaggccaaaaccaaccagtccaccacacgcaccaccgcaccgcgcgtcgcgcgagaccaaaaaaagaaaaaaaaaaaccccaccaccacgccatcaagtccaccaccatcaccacggctactactagcaattagcaaagcaccgtgcgcggccgcggcgtccactcctccatctggctagacacaccgtgtctccggccggctgcctccctggatctggtcgtggggagggagctaagctggtggtgattttggtcttggaggtgtggcgatgctgcagctgctgatggcgctggccttctcggcggcgccgctgacgctgtacgtgccgccggtgcggagcctcagcctcttcgtcgaggcgatcgaggccgtcttccgcgactgcgcgccgtactcccagggcgccatcttccgcttccgcctcggcctctcccgcatcctctccggcctcgcccgcgccctccgctagacgcccggcccggtgacacctctcttcttcctattgatcggatacatgtatgtcggctacaatcgcccgcggcccgcacgtcatcagcttgtgcgattgtgaatctctcttgcatcttgttttctcctcaatttgcccccttcacttgtagtttttgcctagtttcttttccctttttttttgggttggggattggatgtagcatgtagagaagggaataatcaagcttagtaatctgttcagaggggatcgagattttgtgagaaaattagcgtgtttgtgtgcgtgtatggggatgtgctgtgtataattgggaaagtttgcgttcttgatcagaagctgtagttgagaactgaaatgaatagaagcatttgactctttggtctg

SEQ ID NO: 18798 - DNA, 2715 bp, Oryza sativa
  ref <308>: DATABASE ACCESSION NUMBER: AK069180
  ref <309>: DATABASE ENTRY DATE: 2001-12-06
gtatgtaaactctcctactgatgatagttggaatacattttttcttttcattacattcatccttttaaatctttttcagggtaaaattattaaccgtccacttgctgggactgttcgaaggggcaagacagagaaggaagatgaaatgcaagagcaacagctactaagtgatgaaaaacagtgtgctgaacatattatgcttgtagatttgggaaggaatgatgttggaaaggtttgtgttcttttttttcgatggctgagtcatggttgcattaatttgacagatttgttaggaatgtgttaacaacttttcttatgattactttctacttggcaggtctccaaacctggatctgtgaaggtggagaaattaatgaacattgaacgctactcccatgtcatgcacatcagttccacggttaggctcttcttctatactgtgaaacaatggttctgtactcattatataccttggcaatgttgcgtcattattatttccttcagcattccagtctgcattgttagttcagacaaatgtctttttatgctaagaaaatctaggatcttaactcagtatgcataacactatcagatgtattacctattgcgacaaaatggatatgtggtttctaagtaatttattggcttgttttataaacagccaacaatttctgcaattttgacgcttctatgtttcaaatgtgtcttgtctaatagacatgaaagtgcaaagcttttagtagcaccacaagtgactgatcttcactgctatcttttctagggttggtacgatacattgtgtaatgagcaatggttacaataatgagttggtttctggatataatctctctctctctctctctcggtttctatgaaaagtatgaattgtgtcttagtactatgtagtgctcttttacgtaagtgtgctggctgagcgcctttgagattcttgtcttctgtacttacactgaaaaacaatgtattgtttgaatgatttacaggtgagtggagagttggatgatcatctccaaagttgggatgccctgcgagccgcgttgcctgttggaacagttagtggagcaccaaaggtatgttgcctacaatctccttatttggatctagtgatgtgctgtccaacctccattccgtcttttttttaagcatgtttgccaaatttattctttgtgtagatcattttggttccacactcatgtcagtagagattgtttgacatatttgcatttttgcaatacaagccatatggttgggacagtgtagcctcttggtagtctatttgaagtcttctactgcatagaattatgctagaactttttcctttttttttctttttttgctctgttgacttcgatcacattgctcatatcctttttgcgtacagtaacaaatacatctcatttacccatcaggacttcatattcctttctggaacaaaccgttgtttaacaaaattccgtctgacataaccaggtgaaagccatggagctgatagacgagctagaggtcacaagacgaggaccatacagtggcggccttggagggatatcatttgacggagacatgcttatcgctcttgcactccgcaccattgtgttctcaacagcgccaagccacaacacgatgtactcatacaaagacaccgagaggcgccgggagtgggtcgctcaccttcaggctggtgctggcattgtcgctgatagcagcccagacgacgagcaacgtgaatgcgagaacaaggcagccgctctggctcgagccatcgatcttgctgaatcagctttcgtagacaaggaatagagtctctctcaagagagttgattttgttagttcttgttcatggttcttctcgctgcatgtttagcaggaaaggtatcatcagtgagttgagagaagcaataagcctatgttgtcatgtgaatcgaataaactggaggttatggtcgtgagctattattagctgtgttcattagaaaggtatatgcttttagattgttttgtttggtggaggcatgtatagtgcgctctctggctaaatcaagcaagggcttaacaggggtattgtcatcctctttggtgcacggttgtgcaagttcttctccctatcatcttcagttaatttgcagattcattatattatataactataataactataatatgcactgtacagaaacacagtcgcagtcgattcatgtggagttatgtgcgatctatactttgaatcatttgataaccattcactaaatgtgctgattaagatacacatcaaaacaaagactattttgaatgacttcaaaaaaaaaagagagactattttgaatattttagacgtctttagataaagataggtttaaacccggcacaaaaccaaagattatacatttagcatgaaaacccttacagaaaaaagaaagacagcagagaaacaatagcagtgaccaacattatatgataatcccctgcagctacagagtatatatacagcagaaagcaagttggagaaaacaaaagaaacccaaaagcgaatgggcatcgcttatgctacactcacaaaacatcctcatggcagaattatcaacattttagatcccaagaagcaaggggtgtgatggtaattcacaccttatgaccaagattgtgtaagctcaatagtcttgatatttaatgacacgcacattccccgctgagtttgattgc

SEQ ID NO: 18799 - DNA, 2387 bp, Oryza sativa
  ref <308>: DATABASE ACCESSION NUMBER: AK069181
  ref <309>: DATABASE ENTRY DATE: 2001-12-06
gaccaacctcctccgccgcgccgctctcccgccatgaagcagctccacaagtcgtcccccacccacgcgccggcggcggcgcacgccccggcgtccaaggcgtccaaggcgtcccgccccgggccccgatcctgggtcggctacctcctccgcgagcagcgcctcctcttcgtcctcctcggcgccctgatcgcctcctccttcttcctcctccgcccctacctcttctccctctccccgtcctcccacgtccccgaccgccgcccgctcttctccttcgcctcgcacacctcgtcggcgtcgggcgtgccccccgggttccgcccgccgccgcgccgcgtcgtcgtcaccggaggggccgggttcgttggcagccacctcgtcgacaggctgctggagcaaggggacagcgtgatcgtggtggacaacttcttcaccgggaggaaggacaacgtcgcgcaccacctccggaaccccaggttcgagctgctccgccacgatgtcgtcgagcccatcctgctcgaggtggaccggatctatcacctcgcgtgccccgcgtcccctgtgcactacaagtacaaccccatcaagacgatcatatccttctcgtcccggatctgcacatacctttgatttgcttacattcatgtcgacttgatttgatcttctcctttatttttttttattgggttggtgggtgggagatatgcttgaagcaaactagcacataagtggtccagatcaagctcgtatgctgaaacttttggtggttggtttggattcaagtgaaccctggatcctaaatttgcctccttttttcaatatcaagtggttgttctgttgagatcttaggaagacgcgatagatttgttagttgtgatgcacaggtggtaaatgtggggtagccggttctactgtagtgccatttatctacaggattttaacagagagtagtagttgttccatacgtccatgaacaatggctgtgtacatccgttttggatgtagaggccgggttctaacccattttctaaacatacttccatgaacaatccttggcaggattcgattagtttgttcattgaaatgccatatagatatagcacaaaccagcttctgttgtacgagaattaggaaaagagatcacctgaatttttataaggtacatttattttttttcttaaaaaggctttttatgtgctctatcgtaactcaatatatagttgaagttttatagttaaatataaaaccgttatgtcttttacctggatatttgaccaatcatgtttttttgcaacttattatgttattttcactatttacaatataatcatgtgttgcatctgtatattatcaaacctgggtttcttaacaattattacaagaccaatgtcatgggaaccttgaatatgttgggtctggcaaagcgaattggtgcaaggttcttgctaactagcacaagtgaagtttatggagatccacttgaacatccacagaaggagacttactgggggcatgttaatcctattggtgttaggagctgttatgacgaggggaaaagaacagcagagactttaaccatggactatcacagaggtggtggtgttgaggtgcgcattgctcgcattttcaatacatatggccctcgaatgtgtctagatgatggccgtgtggttagcaattttgttgcccaggcattgcgtagacagcctatgacagtttatggtgatggaaaacaaactagaagttttcagtatgtttctgatctggttgctggactgatggctctgatggagggtgatcacattggccctttcaacctgggaaacccaggagaattcaccatgttggaacttgcacaggttgtgaaggaaacaattgacccaatggcaacaattgaattcaaacccaacacagctgatgatcctcacatgagaaagccagatattaccaaggccaagcacctgctacgttgggagccaaaggtctctctcagggaaggtcttcccttaatggtgaaggacttccgtcaaagaattttggatgagtaatcaaaacaatgtgtgtttactcatctggattctatatgatgctgcaaatatagtcagtagcacttcacctgctggatcacgcagtacaacgttatttactgcatacacgataaatgttgtagaattacttgatttttttgtatcttggtgagacagaacagaattagttaattatttgtccacattgtgaatcttagtaagtcttgtgagaagtataggtttgtatatcaggagctgttattggtttcaaattttcatctagctcctaattgtaatacgaatatttgattcaagtgaaatatattcagacgagttcgcttttttgctcttcagttc

SEQ ID NO: 18800 - DNA, 693 bp, Oryza sativa
  ref <308>: DATABASE ACCESSION NUMBER: AK069182
  ref <309>: DATABASE ENTRY DATE: 2001-12-06
gaattaacaagctatacaaattaacacaaagattagaagaaagcaagcaacaatggcgtcagctccggccgcctcttccgcagtgctcctcgtcgtggtcctggtggcgagcctcgccgccggcggcgccaacgcggcgaccttcaccatcaccaaccgttgctcgttcacggtgtggccggcggcgacgccggtgggcggcggcacgcagctgaacccggggcagacgtggaccatcaacgtgcccgccgggaccagctccggcagggtgtggggccggaccgggtgcagcttcgacggcgccggccgcggcaggtgcgccaccggcgactgcggcggcgcgctgtcgtgcaggctgtccgggcagccgccgctgacgctggcggagttcacgctggggacgtccggcggcaaccgggacttctacaacctgtcggtgatcgacgggtacaacgtcgccatgagcttctcctgcagctccggcgtgacgctgacgtgcagggagaggagctgcccggacgcgtaccagtacccctccgacgattccaagctgcgctcctgcaacggcaacagcaactaccgagtcgtcttctgcccatgatttcatgcatatgaacctactactatatatatacttctactaaactgtatcagggaaaataataagaacatacaataaaacgaacgtgatcc

SEQ ID NO: 18801 - DNA, 1571 bp, Oryza sativa
  ref <308>: DATABASE ACCESSION NUMBER: AK069183
  ref <309>: DATABASE ENTRY DATE: 2001-12-06
gtgttttcacggatcgatcgagaaacctcgacgacgtcgtcgccctcggctacccggatctcggtgcccccgcctggatctggaagcaggctccacgacgacgacgggcgcccgccgttctctgcccacggcctccaccggcttcccttccgccgtcgccgcctcgagctcgtcccacccccctcccgccggcccttgccgatctgctccacccaagccgccgcgacgccgctccgccaacctcgtggggcgctcggttctcagccaccggcccccgtcgccctgcaaccccctccccgtcgtcgacatggtggccgcctccatggctccccaacggtggtcggtggtggcgatggcggtcaaggccgctggctcggtgaggtctggccctcacctaaggcttcttgcttggacatctctggtaactgcccctgccgccttgtctattttcttccctcgactcgattgattgccaaggattggtaggaggaggtggtcacgtggttgtatgttctttcatcaaagaaattcacctggtatgttgagggatcgatggatggatggatgctcgtatgtgttcaatggaagtcacgatgttttattcatctggtgttttatttttctccatgatctatctgctcgatcgatatctataggctatagctgttgtgtttttttgaaaaagcatagttgccgtgtttgatcagttaattgcagcttatttgcgggcgccggatatgtggtgattgcttgtgttcgttcaggtgctgtataacatacatacatgttccatcgtagatcgatttgtcccctgtctagctagttgcatcttccttactgtgctttgatttgcacgggttaaattaagccatacacttcaatttgcttctgtctcgttacatgaatttgcgaacacatctcccatatgtcccgtatatactgttagatttctaaacaattcacacacaccaattcatgactgaaaaaaaaaagacaagagcagttttctaaacattgtacgatttgattatgctctcatctagatttaacattgctgcaattttgattctttgtgctagagagcgccctattatgctagtaagattgccacaaacttggattataatttcaggttgcaaggatctctttcggcacgactatcaagttgccaggctaggagtacaaacttggttgcacagctgaagaatagcatgatccctctcttgatggggatcgcttgtgcacgagctagctgccgccaaccgtcattggccttctccatcgatttctacctgtagctaatctgctgtggctgccaacaagtcctgcccatcagaacttctaaggttgccggtgcaggcttcatcatcggctactatttgtcctctgccgatgcaataggaatagcgagtctacttttgttaattgtagaatcaatgtatctgtgtccctgaatctttgtaaacatgtctgtagttttttactagacaaaaatgtggttgtaatttattttggctatatcgatttgttggtaaatattttactctaatagtcagggactaacttattcc

SEQ ID NO: 18802 - DNA, 1154 bp, Oryza sativa
  ref <308>: DATABASE ACCESSION NUMBER: AK069184
  ref <309>: DATABASE ENTRY DATE: 2001-12-06
ggtacggcacgaagccatcggcgtccacccaccacatcgacgcgaccacactccacacaagccatggaggcgtcactcaccgtcgccggcgccggcgcggccgccttgtctctgcggccgcaaatccgccttcgaatcacccaagcgacccctctgatgccccctcggcggctccaatccggaccctccaagatccagacctccggcgcccgggcccaccttgcggcggcccccgcgtccacgccaccggcggcgggaggcggcctgtactcggcggagacctacgagctgacggcggagaacgtcgaccgcgtcctggacgacgtgcgcccctacctcatcgccgacggcggcgacgtcaccgtcgcgtccgtcgaggacggcgtcatctccctcaagctcgaaggagcgtgcggcagctgccccagctcgacgacgacgatgaagatgggcatcgagcgcgtgctcaaggagaagttcggcgacgccgtaaaagatatccgccaggtgttcgacgacgatcagcagccggcggagccaacgccccaggcggtgaacggccacctggacatactgcggccggcgatcgccaactacggcgggagcgtggaggtggtcgccgtcgacggcgaggactgcctggtgaggtacgaaggccccgagtccatcgggagcgggatcaaggcggccatcaaggagaagttcccggacatcaccaatgtggtgttcttgcagtgagctatccagaaaatttttacctcattggcatgcatgagttaaaatgcaccagttttcgatggctgttcatgtgctagtgaacttgttccgatgtatgttcaggtgcaatctttacagtgttcgcagatacaatacacaaacagggaaacggaatgatacttgcctattgtcacctcacttgaaatagtatttggatttaggggaataatccatatggatcgtcaagttagatgttcaaattataagttttcgaaggtagcaagtagccaagtaggaaaagcccctaattggccaagtattagcgattactactacctagcaagtctgaaaaatctggctattggggatgatcgaactgttaaaaagtttgtctgaatatttgtctgagactgaaatcttagcgagaagagtccttg

SEQ ID NO: 18803 - DNA, 1545 bp, Oryza sativa
  ref <308>: DATABASE ACCESSION NUMBER: AK069185
  ref <309>: DATABASE ENTRY DATE: 2001-12-06
ggacgattcccaatccaagaggagcgatggcgcgctgctccccgccgctgctgcgccgcctcttctgccgcgccgccaaatccgcctccgccgccggcgccggcaccggcggcactagcaagaagaatatcgtcttcttgggctccccccaggtagccgcctccgtcctggaaactttgctggtggcgtcggagtcgccggactcctcattccaggtttccgccgtcgtgacgcagccgccggccgccaagaaccgggggaggaagctgatgccgtcggccgtcgcgcagctcgcgctcgaccgcgggttccccggcgacctcatcttcaccccggagcgcgctggagaggaggcgtttctgtcagacctgaaggaggtgagaccagagctctgcattactgctgcctatggaaacattctgcctcagaggtttcttgatatcccgccttatggaactgttaacatacacccgagtttgctgcctctatatcgtggtgcagcacctgtgcagagggcattgcaggacggtgttgaagaaacaggtgtttcccttgcatatactgtccgtgccttggatgcgggtccagttattgcttctgaaaagtttgctgtagatgagtatattaaggcaccggagctgcttgctatattgttcaacttaggatccaagctattgcttcatgaactaccctctattcttgatggaacggctaaagaaaaggcaaaaccacaagatgactccaaaattacacatgcaccgaagctgaattctgatgagtcatggttgtcattcaaccaagaagctaaattgctccataacaaggtacgagcctttgcaggttggccaggaactcgcgcaaagttgcagcttgtgaaccaaaatggggaacccgatgtgcttgagattaaggttatcagcacgaaggcttgcgcatcctgtgacaaaaccggagatggaaatgaggtactcttctcggggaactcattgctgattccttgcggtggatcatcttgtctcgaggtcgtggagcttcaactccctggaaagaaggtgacgacagcaagggacttctggaatggtttgcgtggtcagaggctgctgaaatcaccatagaagaattaccatgatcatcacagcgtatactaccactgcatgaacaacaaagacgatcgtatgtgatatgcgcttgatttctacaagtcatggtagaaactgatgctgtcaatggagaacattttcaggagaatgctactacaggtagaggcacattactcgacgagatcttttacttttcagatcgtatcattgtgaagataaaattccatgctgcttcgtgtttttagatacctcgtacctccattcgccattggaatctgtattatctccaaaattttgggaaagagtgcacaattgttagctactatttgtaagagagacagagagtgctgaccagtacaattcctgattgccaacaggggccaaaatgaaaactatggatacatctatgcgttgatgtgaagaaattaaaacacagacaaatttt

SEQ ID NO: 18804 - DNA, 1596 bp, Oryza sativa
  ref <308>: DATABASE ACCESSION NUMBER: AK069186
  ref <309>: DATABASE ENTRY DATE: 2001-12-06
ggcaatcaattgctcaccggcggagaggccgccgccgccgccgcgttcttcctcctcctgagccctaaaagggaatccagctcgaggtcgaaccaaccaaaagcttggcggcgtcgcggagacgcggccaacctgctccacatacaccgcccgtttcgccagtgtcttttctctttttactggcgcgcgcgcgggcgcgggcgcgggagaggcgagggagtggtggtggcgcgctgcagggggggctgcttggctgcggagtgcggacgacggctataaagagggcggaaagagagcgcccgatcccgctactcatcagctgccgtctcctctgtgtgtgtgctcgcgcgcgcgctccggttgctcctccttgggttcttgatttgctacacgcgtttgcttgctcaccacgtgtttgatggaatacctgtgaggtgagtttgcaggcctgatactgcctgttggtccctccccatcaaaatgcttggttcacttatctcttactcaccttcagtgaatccaaagacggagaaccctgatgagttaattgcgactggtgtccttgcgagtctgcaaaactttatccgcaaatgcatcgtagctgtcctctcatatggcccaatgcctaaacatattgcatttattatggacggtaaccgtagatatgctaaattcaggagtatccaggaaggctctggtcacaggatgggcttctctgctctcattgccagcctactctactgctatgaaatgggcgtgaagtatatcacagtgtatgcatttagcatcgataattttaagcgagatctgactgaggtgaaatccttgatggagttaatggaggaaaagatcaatgaactgctagaaaacagaaatgtcatcaacaaggttaactgtaagatcaacttctgggggaagttggacatgttgagcgaaccggtgagggtagcagctgagaaactgatggttagcactgctgaaaacaagggactggtcttctctgtttgcatgccatacaactccacttctgagattgtcattgcggtcaataaggtctgtgcagaaaggagggatatactgcagagggaggatgttgacagtgttgcgaataatggtgtgcattcagatatttcagtggcagatctggaccaccatatgtacagcgctggttgccccgatcctgatattgtgatccggacctcaggcgagactcgcctgagcaatttccttctgtggcagacgacgttcagtcatttgcagaatccagaccctctttggccggagttctctttcaagcaccttgtctgggccatactacagtaccaaagagttcacccttatattgagcaaagcagaaatctggctaagaagcagctgtaatcacatcctccctgggaggagatagaaaccatcatacaagatatctgtagttacacaataatctgtattctcctttgatatctcctagaatgtgaaatatacaaaaaaaagatagctattccattgtaggcaggccaaacatgtgtatgcttgagttggtccaaatgtgtgaaatgtaataacatttggtctaagcaaagtgccttattttccctg

SEQ ID NO: 18805 - DNA, 1027 bp, Oryza sativa
  ref <308>: DATABASE ACCESSION NUMBER: AK069187
  ref <309>: DATABASE ENTRY DATE: 2001-12-06
gggaggccatccgtgactgggtcaccaatgttgagaacactcactacattttgggatcagttgctggtccgcatccatacccgatgatggtgagagagttccataaggtgattggcaaggagacccgtagacaggccatggagaagtggggtggcaagcctgatgtcttggttgcttgtgttggtggtggatcaaacgccatgggtctcttccatgagttcgttgatgatcaagatataagaatgattggagtggaggctgctggctatggtgtagacactgacaaacatgctgccactttgacaaagggagaagtgggagttctccatggatcattgagctatgtgttgcaggatgatgatggacaagttattgaaccccactccattagtgctgggctggactaccctggtgttgggcctgagcatagctttttgaaggatattggacgtgctgaatatgacagcgtgacagatcaggaggcactggatgctttcaagcgcgtctctcggctggagggcatcatccctgctctggagacgtcccatgcgctcgcctacctggagaagctctgcccaacgctgcccgacggcgtgagggtggtggtgaactgcagtggaagaggagacaaggatgtccacacagccagcaagtaccttgatgtctgaaaaaactctagaggggctaaaaaatgatagcttttccatgagcagttttgaaagggtgcaatacaacagcagcaattgattagagctttgttatttggataaaaaagtaccaataatgcttggaagttcatattagctacaagagtatctttgtttgtttgtctttgtatctgaatgatgttattggcggagttggtaaatataactaaataaacaccaatctttctccattctatcagcatatcttttcagctttgctccgtagtatgctgtgttctctctgaatcttcagttgtcttgttactttgtgaagaacatgatgaaaggaacaaagaggaggtgaattgtgacatttgttt

SEQ ID NO: 18806 - DNA, 3039 bp, Oryza sativa
  ref <308>: DATABASE ACCESSION NUMBER: AK069188
  ref <309>: DATABASE ENTRY DATE: 2001-12-06
gagatctgagacaagccaccgggctccctctccctcctcgcgcgcgcggggccttcgcgaacctcctggaagcttccggaggcggaggcggcggctgctccggggagatgggggtgttcgaccggctgccgccgatggaccgcctgcggtccgagaagatgtgcttcgtgcagctcatcatccccgccgagagcgcgcgcctcgccgtcacctacctcggcgagctcgggctcctccagttcaaggacttgaatgaggataagagtccttttcagcgtatatttgtcaatcaggtaaagcgatgctctgaaatgtcacgcaaactaagatttttcaatgatcagatcaacaaggcaggtgtaaagtcctctgttcgacctgcaatgcaaccagatatagatttggaggagctagaggcaaaattgcgcgagcatgagaatgatctgcttgagatgaatacaaatagtgagaaactactacaaacatacaatgagcttcttgaattcaagatggtcttgtcaaaggcaggtggtattcttgcttcttctcacaatcatgctgctccagctgagcgggagctagatgaacacatatatgacaaggaaatggatgatggaaatgcctatttacttgaacagggtgtgcatctaggggcttcggagaattctggagtgaagtttgttagtgggattattttaaagtccaaggcaatggcttttgagaggatgctattccgagctacaagggggaatatgtttttcaatcaggcgcctgcaggggaacctgttactgatcccatttctggtgaagaggtagagaaaactgttttcgtagttttcttttctggggatcaggctaaagcaaaaatattaaagatttgcggttcatttggagcaagttgctaccctgttcccgaggagatggttaagcagagacagatttttcgcgaggtatctggacgccttgctgatctggaagccactttggatgctggaatccagcacagaaacaaagcactagagtcagtaggttcacaattatggaggtggacaatcatggtgaaaaaagagaaagctgtatatgatacattgaacatgctgaattttgatgtcacgaagaaatgccttgttggggaaggatggtgtcctatatttgctaaatcacagatcaaggatgttttgcagcgtgcaacgcttcacagtaattcacaagttggaataatatttcatgagatggacactattgattcaccgcctacatatttccaaaccgataagttcactaacgctttccaggagatagttgacgcatatggtattgctcgatatgaggatgctaatccagctgtctattctgtcatcacattcccatttctttttgctgtgatgtttggagattggggtcatggtatatgtctattgttaggagcatgtgttcttatacttcgtgagaagaaactttcctctcagaagcttggtagctttatggagatggcatttggtgggcgttatgttatcctcctgatggcattgttctcaatatactgtgggcttatatacaatgagtttttctcagttccatttcatatattcgggaaatcagcgtatgaatgtcgagagaaaacctgcagtgatgcacatactgctgggctcattaaagtccgtgatccctatccttttggagtggacccaagttggcgtggaagtcgatctgagctaccctttctaaactccttgaagatgaagatgtctatactaatgggtgtaacccagatgaacttggggattgtattgagttattttgatgcaaagtttcatggaaatgctcttgacataaggtatcaattcataccacggatgatctttctgaacagcctctttggctacttagcactcctaattctcatcaagtggtgcaggggctctcaagctgacctatatcatgtgatgatatatatgttccttgatccttctggcaatcttggagaaaatcaactattttggggccagaaggaacttcagatacttttgttgcttatggctattgtagctgttccgtggatgctcttcccaaagccttttatcttgaagaaacttcacaacgagaggtttcaaggtcacacctatcgctttcttgggacctcagaaatggatccagattctgaaccagactcagcccggtcacgtcatgatgacttcaactttagtgaagtttttgtgcatcaaatgatacattccattgaatttgtacttggcgctgtctccaatactgcatcgtatcttcggctttgggcattaagtttggcgcattctgagctatcaacagtcttctatgagaaactgctggtacttgcttgggggtatgacaatcttgttgtgaagttagtggggcttgtaattttttcttttgctactgcctttatattgctggggatggaatcattgagcgccttccttcatgcacttcgtctacactgggttgagtttatgaacaagttctaccatggggatggctataaattcagacccttttcattcgctctgctagctgatgacgaagactgatgcatacaaaattcagcagataaagagattaagcttgtttcttgccatttttggagcacgtgagtgggattctttcgaccaagatgggtttccccaatacacagcattttgtcagaccgccgggcttcttccgaacgcatgtgtgcagtcctggttgagattgccagcgtggtgggaggagattttgtaagttcacggcaatactgtagagggcaggtttctcgtacagttcctccagtggagaagcagattatagatgctaacaacaaagatagaaatgtagatttgctatgtctacttttagctcttatactttgtccaagtgactgtcccagtatcccttaccacttgaaaatggaagttgcagtcgttttttttaatcattacgtgattaggttgtaacgaagggtgacaattattgaactacaatgtttgtcaattcaaataagaaaagctaaagcatatatggtttccc

SEQ ID NO: 18807 - DNA, 1343 bp, Oryza sativa
  ref <308>: DATABASE ACCESSION NUMBER: AK069189
  ref <309>: DATABASE ENTRY DATE: 2001-12-06
ggacgaaggccacttccctcgccgccgccgccgcggttgccgccggcgaccacgttgcccccacgccggtggcgcgatggacgttccgttgcccggcgggagcgtcgaccagtcggaggactactccccggcggccaccgtggtccgcttcgacccgccgctcccgctcctccgtgcgcccgtcccgtcgtctgccgcatccggcgagccacccgtcctcgccttccgcgacgccgcgagctggcgcgccgcgtgggaggccgccgaggccagcctcctgtcgcaatgcgaggctggggcacggtctgggtgttcaattactgcatcacgcaaatgcaagccaccctggtggaaaggtttattgggaggagcaccaactgactatcaagaaagagagagatgtgaagagcgtgagatggccgcttgtcttgaagcagcaagagaagcttgtgttaagtttgccaaggaaaaatgcattgaacccttccgagatgcaaggattgcttctgagggtcttcttgaaaatacaaagttcgccatctggggtgctggtagtaacagaacatcatcagcatccttgtgtatcgcaaacagtcagtacccgttcaaccctcgtcctggttctacgaactacaaaggaagtgatttgcttgatagttttccgtctgaagacaacaatattaaggacgatgactgaacaacacacctgcattggtaagaaatggtctatatatgttttcagaattggatgcatttcaacaagggaattgctagaagcctagaactagtgaaaaatcaatggattgaagaactgagattaaataactggagtcctgaggatttacagcaagatctggaaagaaagaaaaactggacacccaagaatatgtgcatgttatttgtatgacagtcttggtctgttttttttactacgggggcaggcaggcagcacaataagcggaggatcgggccattttgatgtcaatttgattgaatggcagatcctttggagctacgaaaagcagagaagtacattggttccttgttttgacaacaactcttccaactgtcctgcctgtactatctcatttctaaggatttcactaaggaagcattataatgttgtcacgttctgcattgtaaataaatgcctgcagaagtgtgtctagaatagtggcaaaagaagttaccctcaaatgacttgaaaattgacttctgagttctgaccaccacaattttagcagctaaactcatggctctcaattgtaattatttatgtacctaattcgatctgtgctacttccattgactagttgcaacaaataaaccacaccttcatttcc

SEQ ID NO: 18808 - DNA, 1254 bp, Oryza sativa
  ref <308>: DATABASE ACCESSION NUMBER: AK069190
  ref <309>: DATABASE ENTRY DATE: 2001-12-06
gggggatgtcgccgtcgtcgtcgtcgtcgagcacggggccgatgggggtggcggtgtcgccggaggtggaagcggcgctggcgcgcggcggcgcggtcgtcgccctcgagtccaccatcatctgccacggtatgccctacccgaagaatctccagaccgccatggaggtggaggccgtcgtgagggagaacggggcggttcctgccaccatagccattctgaacggcgtgccacatgttggccttagcggcgagcaattgaagagcttggctgtaagtggaagacagtttcagaagacggctagaagggatattgcacatgttgtggcctctggtggtaatggtgcaacaacagtttctgccactatgtttttcgctcataaggttggcataccaattttcgtaactggagggattggaggtgttcatagaaatggtgaacagaccatggacatctcctcagacttaactgaacttggaaagactcctgtcactgttatttcagctggtgtgaaatctgttttggacataccacggacacttgagtacttggaaactcaaggagtaacggttgctgcttacaaaaccaatgaatttcctgctttctttacagaagtcagcggatgtaaggtgccatgtcgcgttgattctcccgaagagtgtgccaagataatatatgcaaacaagaatttacatctaggatctgggattttgattgctgtgccgattcccaaggaacatgcagcttcaggaaatgctatagagtctgcaatacagaaagccctcaaggaagcagaggataaaaatataataggcaacgcgatcactcccttcatgcttgacagagtgaaagtactaactggacgatcttcgctagaagccaattgcgcttgtaaagaacaatgctcttgttggtgctaaaattgctgtggccctttctgatcttcaccagagagtaacaaacagatttcggaggtctgccttatagagtgcatgtacaaaggcaagcgaggtctgaaacatggggcatcctattcatcctcacaatgtatgcttgtacaactagttggaaacttgtagcttcatccttttctggcactatataaatgaaacctgaggtgcgagtgcatgatttgtagcgagatttgctactgtagacttaaattagtacattccactccagcataatgtgttcttcactttttcgggcgtgttcttcacttttttgttaatctgatcttctgctttcaccttg

SEQ ID NO: 18809 - DNA, 2619 bp, Oryza sativa
  ref <308>: DATABASE ACCESSION NUMBER: AK069191
  ref <309>: DATABASE ENTRY DATE: 2001-12-06
gcctccaccgagcgcggattctccgccgccgccgccgggcgcgctactctccccgcgcgcgctcctctcctttccccaccagcccccgcgcgcaactcctcccttccccacatcgcgcgcgtgccaggcgcgggcccggcgccgactgctctcgctcctttccccaatcgcgcgcacgcgtcaggcgcgggcccgccaccggccgctctcgcatccccgcgccgcttctcctccaaccctctccccccggcgcttcttctccaatccacccccctctagcgcttctcctccccccccccccccaatctttgtttcatccgagctttcacttctgcgaggttgtgtgttcttctaggggattctctccccggcgattctctggccgcttctcctccctccgtatatctattgagtcgagtgatggatgccacaggcgatttgtgttcttgcttcctatcttcagtccctgcatgtatcgatcaaaattgaggagtttctatcaggctgtctgctcctgttgctgcagaaacgagtgtaaggtaaatttctccatccaatacgtatctctgtttgataaaatgcccacatgtatcctgtatttcaggtagacaagtagcatcagccaccaggcatcatgattcacttttgagtttccatttttatggtgatcttctgcaaacgacttttgaatatatatagctgtccaaagatgcagcctatggatacatgttaagacattaaggtaacaagtgatatgagcaatgtttgtctccctaaatcagtattcatgcatcgttctagggtgggggatatttgccaataatttctttgtaacataaaacctcaggattataagttttagcctgtattttcctaacattgctactaatattggatgcaagatatagtatgattcaacacgtcaaatttgagtcaattcatggtatttatttggtttccactaaccctgttcatggtatataaatcaaatttacaactttgctgtagctataatttgttgtgtttataaatttatattgcagttcattcctattcctattgtctactatcattgtagcagcagctatgggctatcactgaggtcagtccccataacattcccatccaaagcagcggcttatctggtttctccatatgagttctctatcaagaaaatatcccaatatatttggtaccacatattcgttcatggtcaccgactttccagatattataatacaaccatcctatgatatcttctttgtaagaggtactaagcaattttctcctttgctgtgccattatcctctcacttcaggtagccgatatcatcttttatattttactcattcattcatttatttgttctttttatctcttgctagattgttagctcaggttaatctttgttctcccccctccccctcctataaacaaataaccaaaggtttgtttggaagattcagtatcttcggtaagcagaggtggtcaaaggtacattctacctggatggccactcgaggaaaattggcctcccctttgatgctaaataatatatccttacaagtttgtgatcccctacctctctaccttcccatttcatctgtttgtcactaatgaaaattatgatggtgatttcagaacattcaagggatttgatctatttcacatttctttcagatcaatataactccttttcatcgtaatgatataatggcatcaagtgatttgatcaagcacaagaaagagtgctactgctacagtgcggagttacatatttgatttttggcatgttcagaacttcttttgaccaatttctatgctctcagaattttgttaccatcattcacttagtatggttactgttcttgatgaataccttgtgaaaaaaaaaccatggattaagccttttaccttacggatttcatgcatcaaatattgcataatttttttatttcatcgaaaagatataagctctactacgataaattcgtcagttcagccgatgaagtttgcaatattgcagtatgaggtaaaatggatgtttcagtggattcagtcactgaatttcacttccttttgctaaaaagtaatttgaatacaacattttttaaaccatataatacaatattaatgttttccttgcctcataaatattagaattatcatatatttgtttatctattttcatatcattttgcagtgccacgtcctatataggttggctttgcgcaaccttttacatcgttgctcgattcgtcatcacattgttagctgggggagctagactattcttatgaagcttgatacttgatcagtaaattacatttttttgcagggatcagtaaattacttagactgctgctaaaaacagacaagtatgaacgtttaaaaaggaggctaataagcagttccattcttgatgaactttctgtacgttaaaaacgtatttgactatggtttcctaagtgtttttgagtttatatagtactcttatccatattaattgactccgtgggctgtaaaaggtgcacatgtcactatgtaatatactccaatcttgctcttttttcataagaacatatcaatatgtatttactgtagtctcaactacaactc

SEQ ID NO: 18810 - DNA, 1112 bp, Oryza sativa
  ref <308>: DATABASE ACCESSION NUMBER: AK069192
  ref <309>: DATABASE ENTRY DATE: 2001-12-06
gaacagcaagcatgcataatgatagtacgataaattgttacatgaaaatatcaaaggaggaggccgagcacgaggagcagcttcgacgccgacgagagggagccgaaggtcgacgtcgtggcgacgccgtgggagcggcatggggagaggaaggcgctgcagaggcctgggttaccggcgaatgacgtggcgttgaagtaggcgaactggccggtcgctgggacctcgccggagagattgttgtcggagaaatcgacggccgttaggctctgcattccggcgcgttgtgggacagattgagatagttgaggattcgtagcccagctgctcggctcctccctcgcctgcctcctcctcgccgccctcaccggcggcgaggaggccgtcccggtgcacgcgccggcgcccggcgtcggcgcggcgcgcgccgtggccatggaggccgtgctcaccttctccctcctcttcgccgtctacgccaccgtcgtcgaccggcgccgcgccgtcggcgcgctcggcccgctcctcgtcggcctcgtcgtcggcgccaacatcctcgccggcgggccctactccggcgcctccatgaacccggcccgctccttcggcccggccctcgccgccggcgaatgggccgaccactggatctattgggttgggcctcttataggtgggcctttggctgggctggtttatgagggcctcttcatgggcccgcccggccatgagccgcttcctaggaatgacggcgacttctaagttaattaggccttaataataactttgatctcgagctagtaaaaataatgaatgtatgagaagtgattggtttttaggtgcatgtaatttctactcgtttggattattgaataagaattttaggttaaataattagcatttgggctagatttggttctgggtcaagccttccattggttgggctaagaatgcttaaaagggcaggtccggcttggactgtgaaattgggccgtctttatcactctctatttgagtttcctgtactactagtatgaaccaatgttgtgccatttgatttttttttttcaaaaagatgccattttttaaaaagaaagaactgcagctataagcct

SEQ ID NO: 18811 - DNA, 1831 bp, Oryza sativa
  ref <308>: DATABASE ACCESSION NUMBER: AK069193
  ref <309>: DATABASE ENTRY DATE: 2001-12-06
gggactccacctcggcacctcgcgttccccttcccccctcacctcgcctagggtttcgtctcggctcgcgcgccgcggcgccattgctacagctctgctacatctctgggtcgtgcgtcgctgatgatgcccccgaggttttgtgattaagctcttggtctcgtctccgcgagctcagctcagagtgggaggcttttttttgggggggcgttgcttggggtattatgggtggaggcgggcggctgagctgttcctgggcaatgccggggaggcccggtgccgattgctagggttttgctcgtggattcgcgtggggaggcggggatcgcttggaatgcgtgggtttcgtgcaatctactgcttgctttgaccccccaatttggtctcgattcatcaggagggggggggggggggttctagggagggttgtggggaggggagctgtggccgcaatgtccggggctaacgcgagggggcggctctcgccggcttccggcggcggtggagactctgagccgcggtctgcggggagcaggacgcggtcggtttccgctacaaggggacggaagccgtcgccgaggcctgggagggatgcggcggcggcggcggcggaggagaagaagcccgccgcggtgcccacattgctgccctcgctcagtgtgccggcagggatgcgcaggcaggagctgctgctgcgctcggggctgtcgctcgacgcgtcgtgctcgtcggacgcatccacggactcgttctgcagccgggcgtccacggggcggattgggaggccgacgtttggggctaggaagaagaagactctctgtcagactgatcacaagattgtttccatgctggaaagggaggttggattggcttctgctaatgatgtgcctggtctgaagaggaggtgttcatgggtgacagctaatactgaaccctgttatgctgcatttcatgacgaagaatggggagttccagttcatgatgacaaggtgttgtttgagttgctggtgctctcaggtgcattggctgaacttacatggccaacaattctgaacaagagacctatattcagggaggttttcatggattttgaccctgtattggtctctaaactaagtgaaaagaagattattgcacctggaagtcctagcagtaccttgttatctgaacaaaaactgcgtggtgtcattgaaaatgcacgccaaatactcaagattgtagaggagtttggaacgtttgataagtattgttggagctttgtgaacaacaaacctattttgagcagattcaggtatccccgccaggttcctgtcaaaacatctaaagcggatgcgataagcaaagatttggttcgcagggggttccgtagcgtaggcccaacagttgtctacacgtttatgcaagtttcaggcatgaccaatgaccacttgatctcctgctaccggtttgctgaatgcgctgctgcagcaactggttctaacacaactgttgggagcgaaacgaattcagacagtagcaatcgtgccacggaacagcagatgaatggaaccaatggactagctgctgatattgcacgtacaatagatgaacttagcatttcatagcgaatagggggaaatgctcaaatgatgtataagcatgtgtgtattttgtttatcgtagcgtttaggtgtggtctgatcgttgttacttgtcacgttgtagcgtaggacattttagactttagcatttcaagacaaatgaaacggcggcatgtaatgatgtatattctttctttgtgatgcttgtttccaaacctgcagtactgagttggcatgtgaagttcaccctc

SEQ ID NO: 18812 - DNA, 996 bp, Oryza sativa
  ref <308>: DATABASE ACCESSION NUMBER: AK069194
  ref <309>: DATABASE ENTRY DATE: 2001-12-06
gctccaatcccccgcgacaatcgccacaaattcccccgcgccgcgccagccacacccacacgcgcgcgccggccagcctacgcttttcccctccccccctcccccgcaacgagccgcggcggaaggaaggatggggagccttggcggggaggagggggcgaggccggctgcggcggcggagggggcgcggaggccgaggttcctgtgcctgcacgggttccggacgagcggggagatcatgcggaagcaggtggtggggaagtggcccgccgacgtcacggcgcgcctcgacctcgtcttcgccgacgcgccgttccccgccgaggggaagtccgacgtcgagggcatcttcgacccgccctactacgagtggttccagttcgacaagaattttacagagtacaggaatttcgacgaatgcctgaactacatcgaggaattgatgattaaagaagggccttttgatggactgatgggtttctctcagggctcgattctatctggcgcccttccgggcctccaagaacaagggttggccctgactagagttcctaagatcaagtacctcataatcataggaggcgccaagtttcagtcgccgacggttgccgagaaggcgtacgccaataacatcaaatgcccctcggttcacttcctcggtgacactgactttctgaaaacccatggcgaaaagcttatagaatcatatgtggatccattcatcatacgtcatccaaagggccacactgttccaaggcttgatgagaagagtctggaaatcatgctccgtttcctcgataagattgagaaggagacagcgctcgagcattcatccactgatgttgacgaagaggaaatgtacttgtgaagggtagaagattagtgtccagtccagatacacaccaaattcatactatagacaagcatactgttgtacttgtatcctccttatttatgtggtggtacaaagagttgaaaactattgaataatcacgc

SEQ ID NO: 18813 - DNA, 1537 bp, Oryza sativa
  ref <308>: DATABASE ACCESSION NUMBER: AK099088
  ref <309>: DATABASE ENTRY DATE: 2002-08-28
gaaacccctcctcttctcttccccttcctcctgcgttctagggttttgcctcccagcggcgactcggcgagcgagaccaccggcaagctcgtcggcgatggagcccacctcgtcggcggcgatggcgaggcagacgtgggagctggagaacaacatcccggcggcggcctccgacccggacgccctggacgcgatctaccgctacgacgaggcggcgcaggcgcgggtgcagcaggagaagccctgggcgaacgacccccaccccttccgccgcgccaagatctccgccctcgcgctcctcaagatggtcgtccacgcccgcgccggcggcactatcgaggtcatgggcctcatgcagggcaagtgcgagggcgacgccatcgtcgtcatggacgccttcgcgctccccgtcgagggcaccgagaccagggtcaacgcccaggccgacgcctacgagtatatggtcgagtactccactatcaacaagcaggctggaaggttggagaatgtggttggctggtatcactcacaccctggttatggatgctggttatcaggcattgatgtgtctactcagatgcttaatcagcaatttcaagagccattcttggctgttgtgatagaccctacaaggactgtttctgctggtaaagtggaaattggagcttttaggacatatccaaaagattacaagccaccagatgaacctgtgtcagagtatcagacgataccactcaacaagatagaagattttggtgtccactgcaaacagtactatgctctggatataacttatttcaaatcatccctggattctcatctccttgatctactttggaataagtactgggtcaatacgttatcttcatcacctctcctgggcaacagggattatgttgctggccagatatttgatttagctgataaactagagcaagctgagggtcaactggcacacagtcgatatggcatgcttatgccatcgcaacgaaagaaagagcaagaggagtctccactggctaaggtaactcgggatagctcaaaaattactgctgaacaggtccatggtctcatgtcacaggtcattaaggatatcctcttcaactctgtgcacccgtcaaacaaggcaagcacaagcgcaccagattcatccgggcctgagcctatggttgaagcatgagtgttctacagaattccttcattagttagccttttgttgatgctggattcacatacactgggtgcctagttgtttcatgactaaaagctgtgtccagcataactacccgattcaaaatgcgttagctgcgttttatcgtcaaatcataactgatatgtaattatgagttgccttctgaatctttcggctgccattgtgaaggtgcgtggtctacgttaagataaccaattaccttggcccaacttaccatgttctctcaacaatgaatggtcccaacgtcgctaggcacagtgtatgttgatttggatgatctttctggtatttatcctccgattttggtttctatatttccagttc

SEQ ID NO: 18814 - DNA, 958 bp, Oryza sativa
  ref <308>: DATABASE ACCESSION NUMBER: AK069195
  ref <309>: DATABASE ENTRY DATE: 2001-12-06
gatccattccccgcaagtctccctctcgcaccacaacaaacgcgcctcctccatctcgaactctccagtctccaccacccccgtccccgtctctcgatcgccatggcctccgccctcgccgcctccaccgccgtctgctcctctcccctcgcatccgcctccgcctccgcttcgtccgcgcgccgcctgcgcgcggtcccgccctcccgcggcatccgctaccaggccctccgcgcggactccggtttcgccgggaaccgccggggtggcggccgtggagcgtcggtagtgtgcgcggtccagggccaggacacatccatccaagttccagaagtgacgaagtcaacatggcaatcacttgttatggagagcgagcttcctgtccttgttggatactgggctacatggtgtgggccttgcaaaatgattgatcccgttgttggcaagctctccaaggagtatgaagggaaactgaaatgctacaagctcaatactgacgagaatccagatatagcaagtcagtatggcgtccggagcatcccaaccatgatgatattcaagaacggagagaagaaagatgcagtgattggagctgtgcctgagagtacactgatcgcatccattgagaaatttgtcgagaggtaaaatgcaaatgccaaaactgaaccctttgaacagttagcattacacgtccaactttcagaacttcagatcattcaagagtcgaagccatgctcaatgtttatatgcctacgtgtatagatagtattgggaatcgctttcggtagcatccaataaatgtaattcgaggatgcaggttgaatgatgaaatcatgaaagtcgcaaggaagcctggtttcatgtgtccattcttttggctgtagatatgtatggtattgactgttaagatacatattacccttttacactatattattgcttatgatatgttccttcc

SEQ ID NO: 18815 - DNA, 4282 bp, Oryza sativa
  ref <308>: DATABASE ACCESSION NUMBER: AK069196
  ref <309>: DATABASE ENTRY DATE: 2001-12-06
ggctcgctggtgccacgtccttttcttgtcccgtttgattcttgcaagcctcctcatccagcttgtgctgctagctacgaggtcggctttggcggtggcggggggcgccttgaatccgaggcgatttggtgtctgactgattgatttgcctcacttggggtgggggggagttggggtttcttggtttcatcggggcggccgcggaatgcggtgaattggcgggagtccgttcgtggagacactttcttggccgtgagttcttggttcgtgcgccatggacggtgcgaaatcggggaagcaatgccatgtctgccagatctgcggcgacggcgtgggcacggcggcggacggcgagctcttcaccgcctgcgacgtctgcgggttcccggtgtgccggccatgctacgagtacgagcgcaaggacggcagccaggcgtgcccgcagtgcaagaccaagtacaagcgccacaaggggagcccgccgatacttggggatgaaagcgatgatgttgatgcggatgatgctagtgatgtgaactatccaacatccggcaaccaggaccataagcacaagattgccgagaggatgctcacctggcgcatgaactctgggaggaatgatgatattgtccattctaagtatgatagtggtgagattggtcatcccaagtatgacagtggtgaaatccctcgcatatatatcccatcgctcactcacagccagatctcaggtgaaattcctggagcgtcccctgatcatatgatgtctcccgttgggaacattggcagacgtgggcatccatttccctatgtgaaccattcaccaaacccatcaagggagttttctggtagccttggcaatgttgcatggaaagagagagtagatggctggaaaatgaaggatgaaggtgcaattcccatggctaatggtactagcattgctccttcagaaggtcgtggggttggtgacattgatgcatctactgactataacatggaggacgccttactgaatgatgaaacacgccaacctctatcgagaaaagtgccaatttcgtcatccagaataaatccgtacaggatggttattgtgctccgattgattgtcctatgtatattcttgcactaccgtatcacaaatcctgtgcgtaatgcatacccgctatggttgctctctgtcatatgtgagatttggtttgctctatcctggattctggatcagttccccaagtggtccccaatcaaccgtgaaacttacctggataggctggctttaaggtatgaccgggaaggtgaaccatctcaattggctcctgttgacatttttgtcagtactgtggatcctatgaaagaacctcctcttgtcactgccaatactgtgctctccatccttgctgtggattaccctgttgataaggtatcttgctatgtgtctgatgatggagctgcaatgttaacatttgatgcgcttgctgagacttcagaatttgctagaaaatgggtaccgttctgtaaaaagtacagcatagaacccagagctccagagtggtactttgcacagaaaattgattacttgaaagacaaagttcaggcttcttttgttaaagatcgtcgtgccatgaagagggaatatgaagaatttaaagttcgtgttaatgctctcgtcgccaaggcacagaaagttcctgaggaaggatggattatgcaagatggcacaccttggcctggtaacaataccagagaccatcctggaatgattcaggttttccttggtcatagtggaggccttgataccgaaggcaatgagcttcctcgtttagtctatgtgtctcgtgagaaacgtcctggattccaacaccataaaaaggctggtgctatgaatgcacttgttcgtgtatcagctgtccttactaatggacaatacttgttgaatcttgactgtgatcactacatcaacaatagcaaagctctccgagaggctatgtgcttccttatggatccaaacctaggaaggcgtgtctgttatgtccaattccctcagaggtttgacggtatcgatagaaatgatcgatatgcaaacaggaacaccgtgtttttcgatattaatttgagaggtctcgatggtctccaaggaccagtttatgtgggaaccggttgtgtgttcaacagaacagctctttatggttatgaaccccccattaagcagaagaggccaggttacttctcttcgctttgtgggggacgaaagaagacaaaaaagtcgaaggagaagagcacggaaaagaaaaagtcacacaaacatgtggacagttctgtgccagtttttaatcttgaagatatagaggaagggattgaaggttctggatttgatgatgagaaatcactactgatgtctcaaatgagcttagagaaaagatttggtcaatctagtgtttttgtagcctccactctgatggaatatggtggtgttcctcaatccgcaactccagaatctcttctgaaagaggccatacatgttatcagctgtggctatgaagacaaaagtgactggggaactgagattggatggatctatggttctgttacagaagatattctcactggattcaagatgcatgcacgtggctggcggtcaatctactgcatgcctaagcgaccagcattcaaggggtctgccccaattaatctttcggatcgtctgaaccaggtgcttcggtgggctcttggttctgtggaaattctttttagcaggcattgtcccatatggtatgggtacggaggacggcttaagttcctggagagatttgcttacatcaacaccactatttatccactcacatcgattccactcctcttgtactgcatattgccagctatctgtcttctcactgggaagttcatcataccagagattagcaactttgcgagtatttggtttatctctctctttctgtcaatctttgctactggtatccttgagatgaggtggagtggtgttggcatcgatgaatggtggaggaatgagcagttttgggttattggaggtatttccgctcatctatttgcggtcttccagggtctgctgaaggtgcttgctggaattgataccagcttcactgtcacctcaaaggcctctgatgaagaaggcgatttcgctgagctctacatgttcaagtggacaacccttctgatcccaccgaccactattttgatcatcaacctggtcggtgttgttgctggtatctcctacgctatcaacagtggctaccagtcatggggtccgctctttgggaagctcttctttgccttctgggtgattgtccacctgtaccccttccttaagggtctcatgggtcggcagaaccgtacaccgaccattgttgttgtttgggccatcctccttgcatcgatcttctccttgctgtgggttcgtatcgatccattcaccacccgtgtcacaggccctgatacccaaaaatgtggtatcaactgctaggagtgagcaagatagtaggcaaagaatcgccagtttgctatccattctgttgtgtaagttattagtggatgactctatatagtctactgtaagatcttagctgccggaatgcttgttatgtattaaggagtagtaagtggtaccttgctgttcatctgttgataattaagttagtagaactactttgctgaaaaatgcctgacaacattctgctgcacttaatgggaatatgaaatcaatgttgctctgtatgaaagaatttacatgtatataacttgaatcaatttaacaaatacactctgtagccttgtaggcacactgcattgcaggttcctggtagaaaccccaatgagtgtatgcacaatgtatgcataaatatgactgattccttctgaatttttttatacacactttatacagtaatgaactttatcaggcccagttcctcctaatttgtgctggtgcatggttgtggaacaactgttccagatttcctccattttgcattctggcaagtacttcctgtggcaccattgtcatccaccatttccaggttgatgtcctgtaaggaaatgtcatagcatgggtagttcttgctgcagttcagagtgatggcactcttggaaattgttgtccctgcgatgttcttgaagaccacattgctaatctccactgctgatccctgagatccatgttcatggcaaatttgcaataattgtgtgatttggatgatttttgttgagcattactcactggtgttaaataaaggattggtttttgagagct

SEQ ID NO: 18816 - DNA, 1178 bp, Oryza sativa
  ref <308>: DATABASE ACCESSION NUMBER: AK069197
  ref <309>: DATABASE ENTRY DATE: 2001-12-06
ggtcttactgtttgaggctcttcgcgaggccttgatagaagagatgaaagaagatccaacggtatgtgtctttggtgaagatgtcggtcactatggaggttcttacaaggtgaccaaaggtctggctgagatgtttggagacctacgagtccttgatacccctattgctgagaactcattcaccggcatgggagttggagcagcgatgaaggggttgaggcctgttgttgaaggaatgaacatgggtttccttctccttgcttacaaccaaatctcaaacaactgcggaatgcttcactacacctctggtggccagttcaaaatcccaatcgtgatccgaggtcctggtggagttggtcgccagcttggtgctgagcactcccagcgtctggagtcttactttcagtcgatccccggcctccagatggttgcttgctctaccccttacaacgccaagggtctgatgaaagccgccataaggagcgagaaccccgtggtgctattcgagcacgtccttctgtacaacctgaaggagaaaattcccgacgaggaatatgttctatgcctggaggaggctgagatggtgcgtcccggagaacatgttaccatcctcacatactcgcggatgaggtaccatgtgatgcaggctgcgaagaccctggtgaacaaagggtatgatcccgaggtcatcgacatcaggtcgttgaagccatttgacctgcacaccataggcaactctatcaagaagacccaccgcgtgctgattgtggaggagtgcatgcgcacgggcgggatcggcgccagcttgagatcggccatcatcgacaacttctgggactaccttgacgcacccatcatgtgcttgtcgtcgcaggatgtgccgacgccgtatgctgcgcctctggaggatgccaccgtcgtgcagcctgcccagattgtggctgccgttgagcaaatatgccagtaatctagacaaccgtttatacattgttctttgcgtggaaagtttttgttcatcgttttgcccatgtagcgaggtatccattgtggtataggcttatttatagccatttttattcgtattctgagttgtactttagctgcgaggacatgctccacaggatatattcgtgcactgtatcatgctgaattctaggatttaaacatgtttttactgc

SEQ ID NO: 18817 - DNA, 1740 bp, Oryza sativa
  ref <308>: DATABASE ACCESSION NUMBER: AK069198
  ref <309>: DATABASE ENTRY DATE: 2001-12-06
cactctcgcccgagctcgccgtagcccgtagcgccctagccgcctccaccctagcgccgccgtcgtcgccgagtttccagccgcccctagcagccgtctcggtcgtccccgacctgtgccgctacctccctcggcatcgcagcaccgaggaaaagcccgtccactcctccgttgccgctgctcatcgccggaaagccgccgtcgtcgtcatcccgacttcgccgcccttcggagctcgtcgccggccgttttccgtcatcttttatcgtcgccgtcaccaccagtgagttcctctcgtcgtcctctccgcgttggtgctctcggatagtccggccgagtttcctagcgcttgtggccttgcggtccagtgcgttgccggcgatgatgtcatcaatgatgtcataaagcctatttcttttctaaaataaatcgttaattattttctgtataaggctaaaatcagatttatcttgtaaaattcataactaattcatatgaactcggaatgagaccgttcaagtctctaaatccatctaaaatcatgatctgtatgtcgcacccaatacactccaatatgtacaaaaatcatgttttggtgctttttaaactttttcattccggtaaaaaacatcgcacccgtgtgggccaatatatgctaatattggcattaattgacaaaagttcgtcgagcgaatcacgaagtgagtttttgctacgaatgcacctaatacactccaatatgtccaaaaatcatgttttggcattttttgagctttttgattcctgtcaaaaacatcgcaccttcatgtgccaatattagcattaattgacaaaagttcaccgcgcgaattacgaagtcagtttttgccacgaacgcacccaatacactccaatatgtccaaaaatcatgttttggcgttttttgaactttttcgatcctgtcaaaaacatcgcaccctcgtgtgccaatattagcattaatgatagcagcctgagtaaaccgagagagataggggttgtagtcgccggaatggagagatacgagttgcagctgttccttgctctaaaaccttgcatcaacgacctgcggagagagctatggaggctcaatataatggcacacacgagggacaccatggataggaaggaaacttaccaagtggaggaaaaacatggttattttgctgctgaaaccagcagcaagttccacctattttcttcctgatctctctcacaaacccatgcatgtggaagatatttggatggatgggaggcttggatacttgaggttgttgttgtgtgacatgcaggcactacaggaaaaatgaactattaccacaaaaatattgcaaagatatagaaagtgtgttaataatttacaatttcaccacaaatttaacttttgtagcaacaaacaaaaaaatcttgccacaaaatattgtgtagcaatattcaataattctgttgcaatataaatgagttgttgccacgaaaaaaacgacctgttgcaatatatagagttctgttgctacagttattttttgtgttgcaaatagtggtgttatattgtcaccgaatataactgttgtaatatgtaaaaaaattcgtagcaataaaaatagttcttgccacgaaaaagtgctcgttgcactatttgggtgcatttgccacgatattgtaatcaattttgtcggatacttttatcccttcggtaaataataaaaaatatatatttccccg

SEQ ID NO: 18818 - DNA, 2708 bp, Oryza sativa
  ref <308>: DATABASE ACCESSION NUMBER: AK069199
  ref <309>: DATABASE ENTRY DATE: 2001-12-06
gatcgtctcgtcctccacacaaaccctccccaactccacgaatcccgccgccgccgccgccgccatgaagcgcgccgccgacgggatggagaagcccaagttcctcacgcgggaggagcgggagaagctggcgctcgagcgccgccaggccgccgtcaccgaccagcgccgctccgccctcgacctgctccagtcgctcccccgcccccctccgccgccgccgcctcccctttccaacccccctcgcgactcctcctcctcccaccaccgcgactcctccgaccgtgaccgtgaccgtgaccgggaccgggatcgggacagggaccgggaccgtgaccgggagcgccgccgcgacgacgactcccgccgcgaccgagatcgggatcgggaccgcgaccgaggcgactcctcccgccgcgaccgcgacagggagcgcggtgaccgcgaccgcgaccgtgaccgggagcgcggggacagggacagggagcgaggggacagggagaaagatcggctggagaagatggcggagagggagcgggagaaggagctggacgcgatcaaggagcagtacctgggttccaagaagcccaagaagcgggtcatcaagccgtctgagaagttccgcttctcgttcgactgggagaacacggaggacaccagccgcgacatgaactcgctctaccagtcgccccacgaggcccgcctgctctacggccggggattcctggctggcattgatcgccgcgagcagaagaaggtggccgccgcgcatgagaaggagacccgtgccgagcagcggcgcaaggccggtctggatgaccgccctgaggacgacgcagttgataagaaggaggctgatgctgcagcgaagtatgatgccttcgacatgcgcgtggacaggcactggactcagaagtctcttgatgagatgacggagcgggattggcgtatattccgtgaggacttcaatatatcctataagggttctaaggtaccccgtcccatgcggaagtggtctgagagcaagcttggtactgagctgcttcgtgctgtcgagaaagctgggtacaaggaaccttcgccgattcagatggcttccattccacttggtctccagcagcgtgatgttattggtattgctgaaacaggctctggcaagactgctgcttttgtgctccctatgctttcgtacattacccgcctcccacccataagtgaggaaaatgaggctgagggtccttatgctgttgttatggcacctactcgtgagcttgctcaacagattgaggaagagactgtgaaatttgcgacctatcttggcattaaggttgtgtctatcgttggtggtcaatccattgaagagcagggttttaagattaggcagggctgtgaggttgttattgcaactcctggtcggcttcttgattgcttggagaggaggtatgctgtgctcaaccagtgcaactatgtggttctggatgaggctgataggatgattgatatgggcttcgagccgcaggttgttggagtccttgatgctatgccatcgagtaacttgaaacctgagaatgaggatgaggagcttgatgcaaaaacgatctataggactacctatatgttcagcgccactatgccacctgctgtggagcggcttgctaggaagtacctgcggaacccagtcgttgtcacaattggtacagctggcaaggccacagatctcatcacacagaacgtgatcatgacgaaggagtcagagaagatgtcaaggctccagaagatactcacagatcttggggataagccagccattgtgttctgcaacacaaagaaatcagcagatgctcgtgcgaaggatctagacaaggcaggcttccgcgtcacaacactacatggtgggaagtcacaggagcagagagagacgagccttgatggatttagaaaccggcggttcactgttcttgtggcaactgatgttgccgggcgtggtattgatattcccgatgttgctcatgtcatcaactatgagatgcctagttcaatcgatacatacacacatcgtattggaagaactggacgtgcaggaaagaagggattggcaacttcgtttttaactctggagaacactgacattttctttgatctgaaacagatgcttatacagagcaacagtcctgtgccacctgaacttgcaaggcatgaagcatccaaatttaagccaggctcagttcctgatagacctccaagacgaaatgacacagtctatgcaactcactgaagcatctactgcagaatgggccaaagatcctccagtattacaagggaacttttggaaacagaaggatctaattctagattagtacttcgagagggcatatattgtatctgatcttcattgtggagattttatgtggtctagcaacattgaatatttgagtccaaagaggtgctaattttctttcttctttcatatgtttttgtacaccgtttggcttggtattcaaaacggagaaatctgtcacctccacctcctgaactgttaaactgcctaaataacccctgaactatctaaaaccgtctgaataacatacaaggtagttttgaaggcttgttttgtatgtggcatgcaggtgtgcactattatttctgtataacgactctcgtgcttgcttctccaaagtttatcctaataaattttctatacccatacg

SEQ ID NO: 18819 - DNA, 2554 bp, Oryza sativa
  ref <308>: DATABASE ACCESSION NUMBER: AK069200
  ref <309>: DATABASE ENTRY DATE: 2001-12-06
gtttcctcatggcctctccctccctcctaacccgtttccttccagataaggctatataaatacccatcatctccttcctctcttcctcgctctccccacccctctcggcctctcctcggtggtcgacggcttcaccggaccggaccggaccaccgctcgccgccgggcacgcccgcgccgcggtctgtatgtcaaagggtacagaaacaatcaatattctgatatagttgctgggaatttcaatccctaaattcaaaatgaccccggtggttcattgctctgttggcaatatcagcctgttccacatcggcagtttcaggccaagccatgaaatccaaataaggaggttccgcagcacagagaggtattcaagagtaccttcacgtaggctgctgcaaccgcaacgagcattcaacttgatcagtatttacaagagaagcagctggtcctctgcccgcaggccaagaactctgtcagcagcaactgttgggactgatgttactgtagaggatccgaatccaccaccttccggagaaacttctgaagaaagctctgaggatacagcacctgacactgctgaagcaagtgagcaagctgaggcaagcacttcttccattcccaaagcaggacgaaacataagaaagagtgagatgccaccactgaatgatgaggatctagttcctggtgcatcttttaccgggaaggttaggtctatcaaaccatttggtgtatttgttgatattggagcattcactgaaggccttgttcatatctctcgagtaagtgatggatttgtaaaagatatatcttccctcttcactgtcgggcaagaggagtcagtgagattagtggaagcaaataaagagacagggcgcatctcattgacaatgcgaacaggtggtgattatgtcaagcctaaaacagaaacacctaaggctgcaagtggcgggaggaataccactgcaaccacgtccagaggctcgccaaggcaaacgagggaaagagatgaagccaagagcatgggcgaaacaaactatgtgcaaggacaatttctggatggcgttgtgaaaaattcaacaagagcagggtcatttgtgaccctacctgatggaagcgaaggattccttcccagagaagaggaggcagtggcattgttcacccttatcggacattctgcactggaagttggtcaacaggtaagggtgaaagtattgaacgtagtacgaggccaggtcacgttgacaatgaaggagggagaagatgatgaagaggatctggcttcattaaacacacagctgaagcagggttggtccagagggaccaatgcatttgagctagctttccgtaggaataaggaaatctctgcatttttggatcagagggaaaagataatagttccagatgtacaagaagctgctgttgcatcagtaggtactgaacttgatgcagaagtaggaattgagcaaagtccaggcaaggaacctgagacaggcaatgctgaatcagttgcaatcgatagttctataacggaggtcaaggagactgatagtatagctgcagtggagaaggatagcgaaattagcaagactgaatcagttgagactgctagttcagttgtaatttctgaagatgatagcacagttgatggcaaactcgttgaaccaactgcttcagtttctgcaactgaaactgagattaaagaagatagctctgagggatctgtcaccactgagcctacagaagctgcttcaacagaatttgtcaccgcagtcgttgaggaaagcgctccgactgctagttcagttgaaacttctgaagatgatagcacagttgatgacaaactcgttgagcctactgcttcagtttctgcaactgaagctgagagcaaagaagatagctctgagggatctgttgcttcaacagaatctgtcaccgcagtcgttgaggaaagcgctcctgtgtcatcagtagcaattgaagttcctgctcctgaagcatcagaggcctccgctcaggagataattgaggattctactactgtggaaggtgccgccgatgatcaaactgtagaatctgatagtccacctccagaaggtgttgagctgtcctcgaatggggctccagacagctctattgctgaggataagcctgatgaaccagaagaatcgttgatagtagaagaggttccagtaactgcaagtagtgagtctgaggataaagaacctgctgcggtacctgaagaagtagcagcctcaagtgagaaaactgcagatgttgctgttgcaggagctgaagcaagcacggccacaggtcagcagtaatttcgtcaaccagatcttacgggcctgacgtgtagtaatttcatgagccatattctgtctgcaaaaggcttttcgagcaactctacctaactaggaacagaatgttaggattagttgcatgtaaaacattcaagtgactgctttttccagttgtttacattttttttcttgtattaaatttcttcattaatgttctgtggtttaatatgatggtcaaaggatcaatcgatgcc

SEQ ID NO: 18820 - DNA, 913 bp, Oryza sativa
  ref <308>: DATABASE ACCESSION NUMBER: AK069201
  ref <309>: DATABASE ENTRY DATE: 2001-12-06
ggcagcatacacactactatcatcgatattttgtttgagatgtgcaacagacaaagcccgaccgaagaaccctaacaatggcgtcgaagctcgtgacggcggtcgcccgtcaagcggcggccacatctcgcgccgcccgcttagctgcggtggcgcgccatgacgcggcggcggcatctcgctccgccggcttagctgcggcggccgcatctcgcgccgcccgcttagctgcggcggccgcatctcgcgccgcccgcttgaagcctcgtcccccactggacgacgctgcccgcctctccttccgctacagcagtgaacctccagatgatggaaagtgcgtgacaaaagaggaccttgagtcggacgaagccgtgtgggccttatttgagcgctattgcaagtcatacaacaggaagtatgatcatgctcagatggttcgccgcttccgtatattcaagttcaatgcaaagagaacatattgctggaaccagtatcttcataaagacgtaaaggaattagctcgcgccaaaaaggatagggatttaggactacctgtcgactcttggtacctacaaaaagagttaggcgaatacgacgatgggggggagccacttactgaatattggcggaaattttgatggaaaaccatctgccgctggtgtgtcctgcatcactccacatgttactgcagtaagagcagtttgctccccaaatcacttcactgtaataactagtagtcctttgacgttccgtgtttcttactaaggatgcgttcgtttgggtgatagggagtgagaatgcacatcgttttccgcacgcacgcttcccaaactactaaacgttgtggttttttgcaaaaattttctatatgaaagttgctttaaaaaatcatattaatccatttttaaaattt

SEQ ID NO: 18821 - DNA, 1998 bp, Oryza sativa
  ref <308>: DATABASE ACCESSION NUMBER: AK069202
  ref <309>: DATABASE ENTRY DATE: 2001-12-06
gatcgtctccatctcctgcttgctcttggtagctagctagtggagatcgccggagaggagagagacgacgagagagagagagagggggcaagatggcgggagggttctctgtgtcggggtccggggtggagttcgaggcgaagatcacgccgatcgtcatcatctcctgcatcatggcggccaccggcggcctcatgttcggctacgacgtcggtatctcaggcggagtgacatcgatggatgacttcctgcgcgagttcttcccgacggtgctgaagaagaagcacgaggacaaggagagcaactactgcaagtatgacaaccagggcctgcagctgttcacctcgtcgctgtacctcgccggcctcacggccaccttcttcgcctcctacaccactcgccggctcggccgccgcctcaccatgctcatcgccggcgtcttcttcatcgtcggcgtcatcttcaacggcgccgcccagaacctcgccatgctcatagtcggcaggatcctgctcggctgtggcgtcggctttgccaaccaggccgttccattgttcctgtcggagatcgcgccgacgaggatccgcggcgggctcaacatcctcttccagctcaacgtcaccatcggcatcctcttcgccaacctcgtcaactacggcaccgccaagatccacccgtggggatggcggctgtcgctgtcgctggccggcatcccggcggcgctgctgacgctgggcgcgctgttcgtggtggacacgcccaacagcctgatcgagcgcgggaggctggaggaagggaaggcggtgctgaggaagatccgggggacggacaacgtggagccggagttcaacgagatcgtggaggcgagccgcgtggcgcaggaggtgaagcacccgttccgcaacctgctccagcgccggaaccggccgcagctggtgatcgccgtgctgctgcagatattccagcagttcacgggcatcaacgccatcatgttctacgcgcccgtgctgttcaacacgctcgggttcaagaccgacgcgtcgctctactccgcggtgatcacgggggccgtgaacgtgctgtccacgctggtgtccgtctactcggtggacagggtggggaggcggatgctgctgctggaggccggcgtgcagatgttcctgtcgcaggtggccatcgccgtcgtgctggggatcaaggtgacggaccggtcggacaacctcggccacgggtgggcgatcatggtggtggtgatggtgtgcacgttcgtgtcctccttcgcgtggtcgtggggcccgctcgggtggctcatccccagcgagacgttcccgctggagacgcggtcggcggggcagagcgtcaccgtgtgcgtcaacctgctcttcaccttcgtcatcgcgcaggcgttcctctccatgctctgccacctcaagtacgccatcttcgccttcttctccgcgtgggtcgtcgtcatgtcgctcttcgtgctcttcttcctgcccgagaccaagaacatccccatcgaggagatgaccgagagggtgtggaagcagcactggttctggaagcgcttcatggacgacgccgacaaacaccacgtcgtccccaatggcgggaagagcaacggcgccaccgtttaatttagtcgctgaactgttctatatatatgtcactgtctcactgatcaaatcacggttgagaaactacaccgatgctatgtatcagctcatgcgtggccatgtgagattgatcgataagcagctagcgacggcatgcaaacttaagggtagtgtagcaatttcggctctgtacgtactgcaagcaatggcgagtatttcaattcggagtgcttcttgagtttgtagtttgttgtatgagttgtatccttttatgtttctccgagcaagcctgacacgagttggcgcctcagtgtaacttgcagaacagaatgccatatatctgcacctttttttgccaaattttaattctggagctctg

SEQ ID NO: 18822 - DNA, 2437 bp, Oryza sativa
  ref <308>: DATABASE ACCESSION NUMBER: AK069203
  ref <309>: DATABASE ENTRY DATE: 2001-12-06
gtggccgtcaaggccaaagatctcgccggcggcgacgacctcatcggccgcgtggggttcgacctctccgaggtgccgatccgtgtgccgccggactccccgctggctccccagtggtaccggctcgagaacaagcgtggcgagaagacccgcggcgagatcatgctctccgtgtggctggggacccaggccgacgaggccttccccgacgcctggcattccgacgcccatgcggcggccggcccgggggccgtcgcctccacgcgcgccaaggtatacttctcccccaagctcgtttacctccgcgtcgccgccatcggagcgcaggacctcgtgccgctggacgcgtcgcgccccgcgaacttctgcgtcaagctgcagctcgccgggcaggtgcggcgcacgcgccccggcgcgccgcccggcacgttgaacccgatttggaacgaggagttcatgttcgtcgtgtccgagcccttcgacgagccgctgttcgtcaccgtcgaggaccgcgtcgggcctggccgcgacgagcctctcggccgcatcatgctgcccctcaacgccgcaatgccgcgccatgaccacttcggcaagccggtggagccgcggtggtacagcctcgcgcgccccagcgacgatcctgacaagaaggaaggcaagttcgcgagcaagatacagcttcggatgtcgctggactttgggtaccatgttcttgatgagtccacctactacagtagtgatctccagccatcatcgaagcacacacggaagccaagcattgggatccttgagctggggattcttggagcacgaaacttgataccaatgaaggggaaagatgggcgcaccaccgatgcttactgtgttgccaagtatggaccgaagtgggtgcgcacgagaaccattctcaacactctgaatcctcagtggaatgagcagtatacttgggaggtgtttgatccttgcacggtgattacagtggtggtgtttgacaataaccagattggcaagaatggcgatgcccgggatgagagtatcggcaaggtgagaatccggctctctaccctggagactgacagggtgtacacccatttctaccctttgttggctctcaagcccagtggccttaagaagactggagagttgcatttggctgtgcgatttacatgtacggcatgggtgaacatgattgcgctgtatggccgtccattgctgccaaagatgcactacacacagccaatctcagtgatgcagttggattacctgaggcaccaggcaatgcagattgtcgcggcgaggcttagccgtgccgagcctccacttcgcagggaggttgtggagtacatgctcgatgtgggatcgcacatgttcagtctccgccgcagcaaggccaacttctaccgtatcacctcgctgttctgtggttttgcagcgacggccaagtggtatgatggcatcagaagctggcgaaacccaattacaaccgtgttggtgcatatgttgtttctaatactgatctgctacccagagctcatcctgcctaccatcttcctctacatgttcatgattggattatggaactaccgttacaagccaaggcatccaccttacatggacactaagctatgccatgctgagtttacaaacccagatgagcttgatgaggagtttgattcattccctagcagcaggccagcggacattgtaagaatgcgctacgatagactaaggagtgttggaggtcgtgtgcagacagtcgttggtgacctggcgacacaaggtgagagagcccatgctttgcttagctggagagaccctcgggccaccgccatcttcatattcttgtccctggttgttgccattgtgctgtatgtgacaccattccaggttctgctggttattgcaatgctatacctgttgcgccacccccggttccgcagcaggatgccctctgtgcctttcaacttctacaggagattgcctgccaagtctgatatgctcctttgagcccaatgcattgagaacaagagaaaatggaggaaaccctgtaactttgtttctctcttccattcagttccctactgattagcatcagatcagatgtgaatatacttaaggagttggtaaattagaggcaagttagcggccagggaataatgtgttcattcgaatgttatttgctcagataggcagaaagaagggattgactggaccccttcgagtttgggggggcagagtttgttaatgtcgtgtttcttggggtaagaacaataggcaggcgcaagctaatcttcagtgtattttgtttatggatttgtgccaattttgttattttcttcatgtaatcatgtactacctgttggatgatgatgttttgcatttctgtgtgcttattcctcttgaagcactcggccttctttttcagtggtcatgc

SEQ ID NO: 18823 - DNA, 2803 bp, Oryza sativa
  ref <308>: DATABASE ACCESSION NUMBER: AK069204
  ref <309>: DATABASE ENTRY DATE: 2001-12-06
gtccacaaaaaccctaccgccgcccccaaaaccctcgcctcgccgtcgccgccgccgccgccgttgctgtctcccctcggcgaatccacggtagctctcccgctccccctcctcggtggtaggagtagcggaggagatgctcggggcctcgaggcgttccgtctgcaccgccgcggcggcggcggcggccgggtcacgccgccgcgccgccgccggcgtcgcctccgccgtttccggggattcctccgtctcgtcttcctcggcgcccccacgctcggtgattaatggggagcctggtgtccctcagcttcagaagaggttgctctctgtgcttgctgcgcccaagcttaccgggaccgacaatgctgcctccctcaagctgagggagggttcccttgttggcaggcgatatgaatcgagtgctgcagcagttgattcttctgatacgccacctgtggagaagcatgagtaccaggcagaggtcaataggctcatggacttgattgttcacagcttgtatagcaacaaggaggtgtttcttcgagagcttgtcagcaatgcaagtgatgcacttgataagttgcggtatcttagtgtcactgatcctgatcttataaaggatggtgctggtcttgacattcgcatccaaacagataaggagaatggaataataacaatcactgatactgggattggtatgacgaggcaagaacttgttgattctcttggaactatagcgagcagtggaactgccaaattccttaaggcactaaaggagagccaagaggctggtgttgacagcaacttgattggtcaatttggtgttggattctattctgcgtttcttgtttctgataaggttgcagtgtcaactaagagcccaaaatctgacaagcaatatgtttgggaaggcgaggcagaatctagttcttacaccattagagaggagacagacccagagaagctccttcctaggggaactcgccttactctgtaccttaagcgtgaggacaagggtttcgcacaccctgagaagattcagaaacttgtgaagaattactcacagtttgtttccttccctatttatacttggcaagagaaaggttacacaaaagaggttgaggtcgatgaacctgttgaagctaaagaaggcgacgatgagactaaaacagaggttaagaaaaagacaaaaacagttgttgagaagtactgggattgggagcttacaaatgaaacacaacctatatggcttcggaaccctagagaggtatcaactgaggagtacaatgagttttacaagaagacattcaatgagtacatggatcccttagcatcctcacactttactacagagggggaagtagaattcagatctattctctatgtgcctgctacaaagaaggaggatataactgataggaagaccaaaaatatcaggctttatgttaagcgcgtgtttatatcagacgactttgatggggaactgttcccaagatacctgagctttgtgaggggtgttgttgactcaaatgaccttccattaaatgtttctcgtgagatcctgcaagaaagccgaattgtgcgtataatgagaaagaggttggtgcgaaaggcctttgatatgatacttggcatctcttgtagcgaaaacagagatgactatgaaaggttctgggaaaactatggcaagttcttaaagctgggttgcatggaagacaaggaaaatcacaagagaattgctcctttgctccgattcctttcttctcaaagcaatgaagaattaattagcttggatgaatacgtggaaaatatgaaacctgagcaaaaggacatttactacattgctgcggacagtttgagtagtgcaaaacatgctcctttcctggagaagctcaatgaaaaagagtacgaggttctatttttagttgacccaatggatgaagtgtctgtcacaaatctgaactcctacaaggataagcgtttcgttgatattagcaaggaagacttggacttaggtgataagaatgaggaaaaagagaaggagatcaagcaggaatacagccaaacatgtgactggatcaagaaacgcttgggtgaaaaggttgctcgagttgatatatcaaaccgtctcagctcatcaccatgtgttctagttgcagctaagtttggttggtctgcgaacatggaaaggttgatgagagcgcaatctatgggtgacatgtcatctctggatttcatgcgttctaggaaagtttttgaaatcaacccagagcatgagatcatcaagggcttgaatgctgcctgcagagccaaccctgatgacccagaagctctaaaggctgtagatatcctgtttgaaacttctatgatctctagtggctttacacctgacaaccctgccgagctaagtgggaagatgtatgagatgatgagcacagctatggccagcaagtgggcctcgcacgctcaacccgctgagatgaacctgcagcgagactcacctgtcagctctgagccgattgaagccgaggtgattgagccggagttggtggacgatagccagaagaaataagggaatcgtcaagttttccctcaagttctataaaccttaggttctttttcggatccatttcatacgattatgccgtcctcccagaatattgtagcttaattttgttgccgaaacgctgagatttttttttttcagtttggttgagcggccagtgcaatgagctgtgtgttaaaccaataggattgtgttatgttaggaataatggtttctttgctaggaacaattactttg

SEQ ID NO: 18824 - DNA, 1344 bp, Oryza sativa
  ref <308>: DATABASE ACCESSION NUMBER: AK069205
  ref <309>: DATABASE ENTRY DATE: 2001-12-06
gtccccctccgtctccagatctccccccacccacattccccagcacctgtcttgctccggtccatgtagagcaccccgccttgtcggaaccgcgagctcgaggagagagagatgggggcggagaccggcgagcccagctccttcctcagcttatctgctgccttctcctatggaattgcatctatggcaatggtattcgtgaacaaagcaattcttatgcagtatgctcactcaatgactcttctcaccttacagcaaatagctacagcacttatcatacattttggtcaaattctaggagtgtctaaaagaaaagatttcagtatggcaacaggaaggaagcttcttccgctgtcgatcttctacaatgcaaatgttgcatttgcgctggcaagcctaaaaggggttaacattcctatgtatattgcaattaaaaggctcactccccttgctgtactggtggctgggtgtttacggggaaaggggaaaccaccaacacaggtgtccctttcagtcatctgcacggccgctggagtccttattgcagctcttggagatttttcctttgacttgtatggatactccatggctctaacatcagtcttcttccagacaatgtatttgattcttgtggagaaatcaggagcagaggatggtctttcctccgttgagttgatgttttataacagcgtattatcactaccctttctgtttttcatcattatagcaacaggagaattcccctattctctttcagtactctctgaaaagacggcctcgctaacattcagtgctattcttcttgtttcgctggtgatgggtatcgtcctgaatttcaccatgttttggtgcacgatagtgaactccgctctgacgacaacaatagtaggagttctcaagggtgttggatctactaccctgggtttcgttctgctgggaggtgtggaagtgcatactctcaacgttactggattggtgatcaatacatttggaggtgtctggtattcatatgcgaagtatatgcagaagaggaagatgccaaagaggattgcacctgatgtagaggcacatcctcacaagtaacatcattcagtagctctgaagcatagatatagtagctatgtagttaagcttcattctttaagcagataaattattgaaatgccataccagttccaatccaatttttacctgaactcccattctaacatcagcaaaatagctggtgcagtgaaggaagctaattaacttttttttttgtgaaagaccagttgatcacctggctgtagtgtactccaatatcagtcccagtaattcaatagtagtaatacaggtttcgcatgg

SEQ ID NO: 18825 - DNA, 2927 bp, Oryza sativa
  ref <308>: DATABASE ACCESSION NUMBER: AK069206
  ref <309>: DATABASE ENTRY DATE: 2001-12-06
tgggggaattgagtggtgttttgtgctgattgggcgtgtggcggtgtggggatttggtagaggcgacgcctaaacactaggggagttgtcggctcccctttctcatgtttctcttagatctacgaatagagtttctcttctccataggagttgtgattggtcgctcaatcgttattttttttggtttgtcagttggtcgatcccactttcctcaagtttgatttctcgttaggaagatctttccgctcgagagattctgattccttttcgattccatcccgtccttgtatggacgggccgcagtatcggattagcaaatccatgtgaataacataagctagattaacttgtatggtatttccgtatttatatcccgatcctaccattcaccgaaagattttttttaaaaaaaaacttgtgtggtaaaaatatttgcctgtgttgtgctaattatgcgttagtttgatgaatgaatttttaccttgtatcttcatgcttactacatgtgtgcagtcatggtatcgagggaacccttttaaggctaacacactaggatttcatgatttgtctatctctttccaccaccaaggcaccaagctgatatcctggttgcagcagcaccatgggtggagaagatgaggttcacggagtgtaaaggtcatctagtgatgggggttctgatggcagggggatgacttggggcattttgggggtgaaggaaggctaggcacaaaccctcttgacaggacagcggtgggttatagatcatgtttaggtttgttctggtaggattcgatggtgccaatgcaggatggtatttatcgcacctggacaataaggttttggcaaacctttatagttagatttttggttctagaaagggaataagttaaacgttctgaggagcattgatgattcggaccacttgtgccgttaactctgcttctactgcactccagctcctagcgcataaagcttgtgtttccctaaatgtaaccaaccagttagagatgaagggttgttactatgaattgatatacatagctcatctttgaggtgaacatgttaactcgaacaattacatattgcatggtttctgtgacacaccgtatacatcatcctagtattatgaacaagctgtttagcacagcttggatcttgcgtcatgttttgcgttggttcaaagtgaaaatggatggaaatgctaaaggcggtgggcattctgaggcactgaagaactacaatcttggaagaactttaggtattggctcatttggaaaagtgaagattgcagagcataagcttacaggacacagagttgctataaagatcctgaaccgccgccaaatgagaaatatggaaatggaggagaaagcaaagagagaaatcaagatactgagattgttcattcatccccatatcattcgcctttatgaggttatatacactcctacggatatatatgttgtgatggagtactgcaagtttggagaactgtttgattacattgttgagaaaggcaggttgcaggaagatgaggctcgccgaatcttccagcagattatatctggggttgaatactgccacagaaacatggtggttcatcgtgatctgaagccagaaaacttgctactggattcaaagtataatgtaaagcttgctgactttggtttgagtaacgtcatgcatgatggccattttttgaagacaagctgtgggagtccaaactatgctgctccagaggtgatctctggtaaattatatgctggacctgaggttgatgtatggagctgtggagtgatcctttatgctctcctttgtggtactcttccatttgatgatgagaatatccccaacctattcaaaaagataaagggtggtatatatactctcccaagtcatttatctgctctggccagagatttgatcccaaggatgcttgttgttgatccaatgaagagaatcacaattcgtgaaattcgagagcatcagtggtttcagattcgccttcctcgttacttagcagtgcctccaccagacacagcacagcaagccaaaatgattgatgaagatacccttcaagatgtcgtaaacttgggttatggaaaggaccatgtgtgtgaatctctgcgcaatagactgcagaatgaggcaactgttgcatattatttactcttggacaatcgattccgagctaccagtggctatttgggagcagactatcaagaatctttggagaggaattttaatcgctttgcttcatcggaatcagcaagttcaaatacaaggcattatcttccaggaagcagtgatcctcatgccagtggtttgcgcccacattatcctgttgaaagaaaatgggctcttggacttcagtcacgagctcaacctcgcgagataatgattgaggtcctaaaggcacttcaagacttaaatgtctcctggaagaagaatggacagtacaacatgaaatgcagatggagcgttgggactcaggccactgatatgttagatgttaacaacagctttgttgatgactcaatcataatggataacggtgatgtaaatgggaggctacctgctgtgatcaagtttgaaatccagaccagagacgagaagtatctgctggatatgcagagagttacggggcctcagctccttttcctggacttctgtgcagacttccttaccaagctgagggttctatagtacccttgtgttggcttcagtgaaaaaccaaacctagggttttatcatgtgcggtttttcactgcaataatgaataaaggacaccatgtaaataggcagctgtgactttcttcccagtccttagacagcgaaggttgttgtttgagtgactagtgttgtgttaagcaccaaaatgttggttgttacagacttacatagtatatagatctttataagct

SEQ ID NO: 18826 - DNA, 925 bp, Oryza sativa
  ref <308>: DATABASE ACCESSION NUMBER: AK069207
  ref <309>: DATABASE ENTRY DATE: 2001-12-06
gaccgacctcgacctagctaattaaggcgcaacacagaaaccctcaccgccgcccgcatccatggcggaggagcacgagacgaggccgccgtccgccggaaggccgccgtcgtccggccgcggcagggccgacgacgctgacgagagggaggagggggagatcgccgacgacgactccggccacgcgccgccgcaggccaaccccgccgcgccgcacccgctcgagcacgcctggaccttctggttcgacaacccgcagggaaagtccaagcaggcaacctggggaagctccatccgccccatccacaccttctccaccgtcgaggacttctggagcctttataacaatatccatcacccaagcaagttggttgtgggagctgacttccattgctttaagaataaaatcgagccaaaatgggaagatcctatctgtgctaatggaggtaaatggaccttcagctgtggcagaggaaagtccgacacaatgtggttgcatactttattggcaatgattggcgaacaattcgattatggggatgaaatttgtggagcagttgttagtgtgcgtggcaagcaggaaagaatagctatctggactaaaaatgctgccaatgaagctgctcagataagcattgggaagcagtggaaagaatttctggattacaaggactcgattgggttcattgttcatgacgatgcaaaaaagatggacaaaggtctcaagaaccgctacacagtttgatctgagcactcctgtccagatatccaagagagtagtatatccacatgtaggatgggttttcttcgatgctttagtgtttgtcattcgcttgtagcgagcgcttgaaggctataatattgccgtgaactgtttaaacttgaaacgtaatataatgacgtatcagaggtgtctctgtactct

SEQ ID NO: 18827 - DNA, 803 bp, Oryza sativa
  ref <308>: DATABASE ACCESSION NUMBER: AK069208
  ref <309>: DATABASE ENTRY DATE: 2001-12-06
gagccactccctctccctctcatcctcccatcctccctctcactctcactctcctcctccccatcctcccatctccctctccctctccctcctccttggcagcggcgagcgcagacggcggcggcagacggcgcggcgcgcggcccctcccctccctccctttgcatccggcgccggtggaggggaggcatgggggcggtggcggcggcggacggcgggcgtaggcggcggcggcggacagcgcggcgcgcggcccctccccttgcatccgtcacaggcggaggggaggcatggtggcgacgggcgcaggcggcgcgcggcccctcccttcccccctcggctacccttgcagatccagcagagggccggtgaggcatgggggcggcgggcgcaggcggcggcgacgacgggacccgcgcagctcctcctctcccctctcctccccggcagcgacgggagcgcgcgggcagcggatccggcgtcggtgaaggtaacggacggcggatccgtcgccggcaaccacgggggcgacggcggcgcgcctcggctagggtggcggtgccggcggcggcggctggattagggttagggtttgttttttctttttttttgtttcgattttttattttcccgtgcgggcggcttaagcccccgcacgcgaaaatcgattttcgcgtgcgggtgcgtcactcgcacaaaaaaatcgtgcattttcgcagacgatttcttccagacggtcgaatcttccgcacgcgaaaatcgatttcatcctcacggaaaaatcctcgtagtagtagggtgtg

SEQ ID NO: 18828 - DNA, 1562 bp, Oryza sativa
  ref <308>: DATABASE ACCESSION NUMBER: AK069209
  ref <309>: DATABASE ENTRY DATE: 2001-12-06
gggcgactcggcgaggcaaggaaaagaaaaaaaaaggaaaagaaaagaaaagaaaagagagagaaggtgtggtggtggaaggaaccctagcggcggcgaccggctccgatggcccctccaccgccgtctccatccccatctccggcgagcggcgcgcagtacgcgcaccagttcctgaacacggcgctctcccagcgcgggccctccgccctgccctacgcggaggacgtgaagtggctgatccgcaaccacctcgtcgccctcgccgacgctttcccctcgctccaccccaaggccgccctcttcacccacaacgacggccgcgccgcccacctcctccaggccgacggcaccatccccatccaccacgccggcgcctcctacaacctccccgctgtcctctggctcccggagccctacccgcggtcgccgcccctcgtcttcctctccccaacacgcgacatggtcatcaagccccaccaccccctcgtcgaccgctccggcctcgtcgccaacgccccttacctccgctcttgggttttcccctcctccaacctcgtcgatctcgtccgatccctctctcacctgttcggcctcgacccgcccctcttcaccaggagccccaatcccccacccccttccccttccccgccgatccctgccaccccgctccctcgcgtcaacccctcctcctcctcctccccctccccatccccctacagattccctgcctcgccccagcttgccgcgcgccccccacccaccgaagaccccgctgaggtctacaagcgcaatgccatcgctaagctcgttgacatggcctatgccgatgccgccacgctgcgcccagtccgcgaggctgaggtcgacactctcttcgccatgcaggctacgctgcgcagccggggggaggtggtctctgatggggtgcgcaagatgggggaggagaaggaggcacttgagcgccgcctgcaggatgtaatgatggccacggacctcatggaggcgtgggtcatggagaacaccaagggtgctgccggcgacactgaagcggacgaggcaattgagaccgcagatgtactgtctaagcagatgcttgagtgcactgctgcggatttggcactcgaggacaccatttatgcgcttgacaaggccattcaggagggttctgtgccatttgatggctacctcaggagcgtgcgagcgcttgcacgggagcagtttttccaacgcgtcctgtcaaccaaggtgaacaaggcacaacaacaggctcaggttgctagaatggctgctcgggcaccacagtatgcatcataggaccggtgaggggtaacttgagtatacttactttgatattgcctttgtctaccaactctactatagctgtcacagtgtaaagttcgtttgctctttgcacatcttttttggggtggatgggggttacttactagatattggatggatgatcccatgtcaaataagaaccttagttgggagtgctgcactggatcttgtgtacgatttctgtacttcaatacatatcttcagttttgttctttgtg

SEQ ID NO: 18829 - DNA, 1884 bp, Oryza sativa
  ref <308>: DATABASE ACCESSION NUMBER: AK069210
  ref <309>: DATABASE ENTRY DATE: 2001-12-06
gagttgctgctgcagcgctgctcactgtgccgtgtccacctcgcgcgcgcctccctcccgttcccgtatagcggtgggggctcggctagctaaccgtgtgtgatcgagcgttgcgggggggagaggatggggaattgccaggcggcggaggcggcggcggtggtgatccagcacccgggcgggcgcgtggagcggctgtgctggtcgaccagcgccgcggaggtgatgcgcgccaacccggagcactacatcgcgctcgtcacgctccgcgtcgccgaggagcgccaggacggcgacggcggcgcgcgccgcaccgtgcgcctcacccgcgtcaagctcctcaagcccaaggagaccctcctcctcggccacgcctaccgcctcatcaccacccacgaggtgaccaaggcggtgcaggcgaggaaggaggagaaggtgaggaaggcgcagcagcagctggaggagtcgaggcagaagctgcagagcaaggcacgcgccgccgcttcggcggcggcggaggtggatgaggccgcggaggagaacgacaacgacagcgacaacttcgacgacgaggcggcgttggatgcgagtcttgatcaggtgggtttacatggatcagagtggtagtaacctgtcctgctttaatccaaccactttttgttcgatgctcccatgcacgtccgtggcatgattgatacatgctcctactacttctttaaggctgtgttcgcattcaccttttcccatccccttcccctcgttttccgcgtgcacgtttttcaaactgctaaacggtgtattttttataaaaagtttctatacaaaagttgcttaaaaaaatcaaattaatccctttttaaaaaaaatagctaatacttaattaatcacgtgttaatggactgctccgttttccgtgcgcagaagttgggttcccatctcccccatccgaactcagcctaaattgtctctctcagatgctgtcgttagttgttcctcgcgatcaccgtgtccttccatgattctctatctccttttaacttctgtctatctgactttatcatccaaaagaagtgttctttttttttggttttgggatttccatttaagatttttgcaaccgctgaatctccctagtaatcacggaaatcaagagtcctcgtcttaatgagcccagttgagaatacagtactacctattcccaacctccaagtgacatgcattcaataagattataaggttgtggccctatggggccaactggttttaatagttggtttctctaaatttagtgagtggagtagcaactagtgtcaggtttccaggaccatattgcgagattccttaccacttctgagaccgcggcaacatgcaaaggttccatcttttctgattactctactgtttacccacctgattgcagttggcgcgtcaggacagcaaccggagctccagcgcgcggcaccggcaatggcggccttcgctgcacagcatcgacgaaacgacggggagctgatgccctgccaatggcgtcaagcatagaacacgatcatacgatggttaatcgtcgagcggtgaatctgtatttttcggtgtttcacccggccttgattagctttgcaaaggttggcgcgtttgcacactgtgaagttgagtttgacacctcaggatgacagggctgctcgggaaactctggccctgatgaatccgtgtaaattttcaggctttgatggggccttgttgtgaggttgctcgttttttctttcttgatacatttgcacctggaatcagaacaatgttgctccagaaaaaaagagaaaaaaaaagccagaaaaactctgtacttgatgctctcctacaaatgggaatcgagcgcatttcatgatc

SEQ ID NO: 18830 - DNA, 1388 bp, Oryza sativa
  ref <308>: DATABASE ACCESSION NUMBER: AK069211
  ref <309>: DATABASE ENTRY DATE: 2001-12-06
ggttctcctccgctccttgcgccgccgccaagacgagcggagggccgggcggcgatctccatctggcaagcagagcagcggaggggaggaggggatcctgggaaggatattagtgattttctactgctgtttcgtcagaaggacaagaactgaagaattcagttagcaacagtatggtgttgccttcatcaaataccagggccacttcttccatggcttaccctgtttccctgagcagcctccaccaccaccccaacaaccaccatgctttttttcttccctcgaaaacaaaccatgataatactcataaacctattgaatcctctagaatttctagacggtctctcatcttcctccctgtcctcccttctcttctatacgcttcatcatcccctgccttagatgacgcaaacattccatccacctctgccattgataccaccatcacagatcggatcttcatggacttcagtgtctgccctagctactttcgctctgaccgcactttaggagctgagcttgctacatgtcctgattctgaacctcttggtcgtgtaatttttggtttgtatggtcgactcctccccctcactactgccaacttcaaagctgcttgcacttctgctgcataccggggaacacttgtccacaagctccttcagggccagttcttcgttgctggccgccaaggtcctcggcgtgacaggggcgaggtccaacctcccaccggacttgtgaggaatgctgagactattgaccctaaagcatttgaactaaagcatgcaaggcctggcaccctctcattgtgccttggacagaacgatgacgatgatgacatcaagctcaatcctaattatcacaatgttgaattcttggttaccactggaccagggccctgcccagagcttgatggacagaacattgtctttggaactgtattggaaggaatgaatgttataaccagcattgcaactattcctacctataaaccagctgaaaggatccgcttcttcaatgattttgcccagttgattggtgatgaaagagctcaaactgctcgagcgttgtgggatcgcccgctaaaaactgtttatatcagtgattgcggagagctaaaagtgaccaaaccatcactttcccctccaagtctgccataaaaaaccacagaggcaattttgtgtacctacacttattcttctccctccaatgtcaactgtatatatgccatctagtattaactgacatctgctgtgtttctggcccaaaatgtgtacgacgggtctctgattcatcgaagtaaatatattacagtgctgtgcaaaattcttgacctgtcagctttcatcttggataaccgttgagactatgatgctaatgattagcttctc

SEQ ID NO: 18831 - DNA, 2337 bp, Oryza sativa
  ref <308>: DATABASE ACCESSION NUMBER: AK069212
  ref <309>: DATABASE ENTRY DATE: 2001-12-06
gacccggcccatctgcaacccgtcgagtccaacccgccgccggtccgccgccatcccgccgtctctctccccaccaccgcgccgccatgtccgccgccgccgccgccctccggccgaccgagccgctccccctcccgagcggcctctccctcgcgccgcgcctcaagctgctcctcaccttcttccgcgccgacctctccgtccgccccgtcgacgagtggcagctcaagaccgcgctcctcgccttcctccgcgacccgcccctctccctccccgtcctccccgactccgacctctccgtgcgcaccctccccgacctgcataagcgccgccgcgacgagcccgtcgcctcgggcgtcctccacgtccgcgacctctccttcctccgcccacgccgccgcaacggggatgatgaggaggaggaggccgaggagatgacccgtgagcaggaggaggagaagtacttccagtggaggagctccctggtcgagaagctggccgggatcgagctcaacctcgagggggttaagtttcggatgagcgtcgagatcccgccctccgatgacttcagggcaatgaagaagtcttgggagaatttctacgcctccgagctcctcagtagcagtatgggattcatttttttaaatgaaaatgctgctcttagttgtgattcttgctaggtggagtttgaattgatgtttgctttgctcagggaatcctgtgaggaagatagcgaaaaggccagacaccattcttgtccggggtgtgccatccaggtggtttgcggagacgaggatatcatcgaaagcctccacgctggtcacacacactattttctcggcacttggtaaaataaggtgcattttggtgttctcaacttctgtttggttcattatattgtaaatgcattcatatctctgggatacaaggcagaatattagtgccggacgtaagctaataaaagcgaaaagagtcctaaacttagttgacatgagcatccataaggaaattgtttgattcagttttgttcaatgtccatcctggtggtttcctattttgtttgtggactcatattttgttcttacttgccttcccattccggtatacacaccttttgagagcttaatatgcgcattaaaattagcaccacctgaaacctgaaggtctgccctgtctagttggttttcatccacatataagtttcttctcactcatatcgcttcttatattttgaaatctatgatctgattctccaagatagcaattaaactcagcaaaaaccagttcatacagtttctgatgttagtgtggtagcttaggtgaatgtgttagctatgttcaaaattcataataaagaagcttgggaagtaacatgggtaaaataaatttctttagtagtattagatattgcacgcataaaatccatgtcacacaaaacaacatacgacataaccctagtgcatcaagcacaataatggagtaatgtctattgtatacatgtgacttctttaaataacactgcacccaatttcttttaaattctgcaggttatgaactgcccttcacattttggggaacttactccgcatacccttttctttggcattcttctgccaattttcaggaaccttaatatttctagtgatgatgaatggggagcaaaacaagacggaaccaataaggagattatatctggactaaattgcaaagtgtgggtgcaatttgagaactacgacgatttcaacagtgcaatgcaggcattatgtggacgttcattagaaaaagaaggatcacggttgaaggtagactatgaagtaacttgggatcatgaaggtttcttccgcaatgcacaatacgagcctgttcgcagcaatttagaagagagaaattcatcggctcatggaaggaagaaacattacacatcgcgaattgagtcagatcatagaaagagatttagggattgatggatatagggcatggcatgatggtgggattacttggttccaaggacagggaaaatgattgtactgtatcattctgttgtttcatcattagtctaacagtaaagtctttctgaattaggtattgcgtagttattactattagcctatgtcctggttgattcccagagatcatcacaacacagtcttgcttgtgatttgtaaaagaatttgcactgttggcatctcaatgtatgctcattcattgttcaatcacaaactcacaattttgctgaatgagaaattgcaatggctaagatcagcctaagcctgcaaattctaagcataactgtttgtattggttaaaagtcagataatgtgaattgacattgacgag

SEQ ID NO: 18832 - DNA, 1392 bp, Oryza sativa
  ref <308>: DATABASE ACCESSION NUMBER: AK069213
  ref <309>: DATABASE ENTRY DATE: 2001-12-06
gggcgttggtggccatcactgagcttatcattggagcggcctcagctgagctcccaaccagctgcagcagcagcagcagcaggggcagcctcagttcaccgcccggcgccgccgcatccatctgcattgctcgctcggaggcctcagtaatcattgttggagaaaatggttgcagaggcctttacagtagatttgaatgaacctcttgtatttcaggttggacatttaggtgagcagtatcaggaatgggttcaccaaccaattgttagcaaggaggggccaagactttttgccaacgatgtcttagagttcttaacacgcacggaatggtgggcaattcctcttatctggttgcctgttgtatgttggtgcctgactaaatcagtcgaaatgggacacacactttcagaagtagctctgatggttgtgtttggaatatgcctatggacattgatcgagtatataatgcatcgattcctgttccacataaatactaaaagttactggacaaacacagcacattaccttcttcatggaattcatcacaagcacccgactgacggccttcgacttgtctttccaccagcagctgcagctatcttgtgctttccgttctggaatctaatcaggctaattactactccgactacaactcacggcgtgtttggaggcggcctgttgggttatgtgatgtatgactgcacacactactatctgcatcatgggcagccgtcatctgatccaggaaaacacctcaagaaataccatctgaaccatcacttcagaatccaaaacaaggggttcggaataacatcgacgctgtgggatcatgtgtttggtacattgccctcgacgaaaaccatcgacaagaagagctcttgacttgcgctgcattttgcaaaaagccagaaatggaggcaaagataagcatgtattatgttctccaatgtccacctcctcaagccaaatcctgttcaggtgttctagattgatttgctcctgcagaatccccatgattgcatgattgatgacaggcctgatggatgatgaatcactgatcgatttctagttcttattctctgaagatgaaccgaagatccaagattggtccatgagattatcctttcttgatttggccctccgagaatagattcctgtgcaatctagtcagtagttgttcaggtcatgtaaacgtacggtaagaaatttatgtgcagagggttttccagtttatcctatgcatttgacctctggtcatgtattgattctgagacaaagtgtagtgatcgcttgatgatactagtacacattgctgccttcttttttgtcctgtaaaagatttattattggcagcaatggatggtagagagggcaatctgcttcttagttttg

SEQ ID NO: 18833 - DNA, 839 bp, Oryza sativa
  ref <308>: DATABASE ACCESSION NUMBER: AK069214
  ref <309>: DATABASE ENTRY DATE: 2001-12-06
gcgttttgccgccccgtttcttctcttcttccatcttcgtcatcttcctcctcgactcctcgttatattagctatcgcagatcagatcggagacgaagaagatggcgtccaactacgtcgacaccaccggcgacgagggcaggttccacggccaccacagcaccaacaccacgccgacgggcgccgcggcgtcgtcgccgaggacgatgcgccggagcttctccaacgcctcctccggcagccacggcggcggcggcggcgccaagtgcgtgtgcgcgccggcgacgcacgccgggtcgttcaagtgccgcctccaccgcaccaactcccagggccacggccacggccacccgcacccctcccctcccacctccccggccgccggcggcgcctccgccgcgccccggccgtcctccgcctcctcccgcaccgtcgaggcccagtgacccctgacctccccggccgcaccaagaaaccaaccaaccaagaagaggaggagaatcagagtgggggagaagagagtaaaaaagagcatcgcgtatcatatcatcggaagggagtttatttttgatttccctcgttgtgatctccatgttcttggaagatttttcttccatttttccttttctttttcttcttcttcttcttccttcttttggctttatgggatctctcctactacatggccaaaccttcctcttcaccatgatgagaaactccaaatcatcccctgctcgaatcagctccactggctagtagctgctacttctcctccctctattattataatctattggatgatgataagctgataaatggaaagataagggttacccttc

SEQ ID NO: 18834 - DNA, 1856 bp, Oryza sativa
  ref <308>: DATABASE ACCESSION NUMBER: AK069215
  ref <309>: DATABASE ENTRY DATE: 2001-12-06
gatcgctcgtcatctagcgctccaccatggccgcgaccgcgagcgcgcccgcccaaactcccgctcgctgcctccgccgatagctcgagctccccggaactccgccggcgaccgcgccgccgcccccgcattcccgatcccacggctgcgggaaagagctaggtaggtaggtaggtaggttcttgaggagcataattgttcgacagtgctcagttcttgtgctctgaacaagccgttctactctactgttctaggagcgattggttcactctgaattctgaaaaaagaagggggcaatttctgctgccagaatcttggtgattaacctcacttgcgtgccataatcttcagtctttttcacctatgggccatgttgaagaagcatctggcagtgatgacgatggggtggagttgctgtcggtttcttggaaccaggacaacagctgcttcattgcagcaaccaccaatggcttcagggtcttcagttgcaagcccttccacgagaccatgaggaggatgtttggccccaatggagggattggaatcgccgagatgctgttccgcaccagcatattcggattggcaggtgcagagtccaacaccgagttcccacccaccatgctccagctctgggacgattacaacgaacgccgcatccacaagtacaacttcgcaagcgagatccgagccgtcaggctgtccaaggactactttgtggttgttcttgagaagaccatcaatgtttacaggttcaaggacctgaggctgttctaccaggctaggacggtgtcgaacccgaatgggctgtgctgcctgtctcatcacgcaaacgcctccgttttcgcctgccctgggacgtccaaggggcaggttctcattgagcatttcgggttgaaggagaccaggttcattgctgctcatgactcgcccctttcgtgcatgacaatggccttggatggaacactcttggctactgccagtgtcaggggtactttgatcaggatattcaacactagggacggcacctgcgtgcaggaggtgcggagaggacttgacagagctgagatatatagcattgcactgtcaccaaatgtgcagtggctagcagtctccagtgacaaaggaacggtgcatgtcttcagtctgagggtgaaagatgcagaggaggatgcaaaaaagggggagtctgcaactgcaggtgcacaggtgaatgacaattgcaactatggttctacggttccagttacacaaacaaagattggatccaatacgagctcatccctgtctttcatgaaagggattctgccgaaatacttcagttcagaatggtcttttgctcagttccgtttaccagaaatcacgcggtatattatggcatttggagatcaagacactgtaatgatgatcggtcttgatggcagtttctacagatacagctttgaccctgtaaatggcggggagatgatgctcaaggaatatcacctgtttctgaaggccagcaaatctttgtgaagaactccaaacacctgagcttcatggtgggtcataccatcatctcagtttatatctagatggtctgactaagttcaatgcgtactgttctctctagtaacatttctcactagcaaggttaatcagcataggctatttcattccgaattaggcgtaatttttgcacatattaggggttagtcttttttttgttggcttttctacatcagtaagcttaactgaaatgtataaatttcttaggaatgagtcatttcccaccggatgtgacctagttgtaactttaaattcgtagtggagggatttctccctgccttcatcttgttttattagttatttattacatc

SEQ ID NO: 18835 - DNA, 1103 bp, Oryza sativa
  ref <308>: DATABASE ACCESSION NUMBER: AK069216
  ref <309>: DATABASE ENTRY DATE: 2001-12-06
gggtcagagttcccctcctcctggttcccggcggcgactgcggcggcggcggcggcggcgacgcgaacgccgagatgagcgtgttcggcggcgacagctgggcgcgcgacgcgcggcagcggaagcgccgcctcgacgacctcatgctccccgcctcggcagtgtccccatcctcgtcctcgcccgattcgttcaggaggctctccaacggcaagttcgcctgcctcgtctgcccccaccgccccgtcctcgactcccccctcatgctctccatgcataataaaggttcacggcacattgcagcagaatcgaggctgagggagaaagaattatcaagacaacaagagatcaacaagagacttgctatttctccagaagcttccgtttcaagttctggtaagcaacattatggtgttaggtctagtgatatgaaagaaaaaccattgattcagcagacaagacaagctattttggaagcacagtccagcagatttatcatcgacagcgccaacaagaaatctcatgatctggagaggacatcaaattcttcactgtgtgattcccaagttactcctagtgttccaatggaaaaatggagtggagatactgtgaaaggaaaaatctttgctggtgacagaactgcaaccaaaatgcttgcagaggagcaagcagatttccaaaaacgccaggagcaagaactcaaattcactgcttcaggatggaaacgagatggccatggaagatggtacagggatgaaaatgtggagtttgactcagatgaagatgatcctaacatatgccttggctaaccattttaagggcattctggatgcaacatgataatggttcgaccttaaactcagattgctattttcaatgccagatgaaaagcatgagtccctcaaagatttttgctcatctatgctgtcagtcttccatacttactggctacttgtaacacaggtatcttgtctaacaggttgattattagttgtgccgtggttgttgtactgtctgttttctaattctttttccttgtatgtattcataaaatgatgatgtactataatgtgcctactgaactgaatttgtctttgcgagtg

SEQ ID NO: 18836 - DNA, 1234 bp, Oryza sativa
  ref <308>: DATABASE ACCESSION NUMBER: AK069217
  ref <309>: DATABASE ENTRY DATE: 2001-12-06
gattggagacccagccttcctctcgccgccgccgacgccgacgacgaggagaggaggaggtggccatggcgaggcggagggtcgcggcgctcgcgtcccagctcctgcggaggcagctgctcatgcggagacccccgccgcggttcctctcatccgcggcggcggcggcttctggccccctcgaccgcctcaggtcgccgcccttcgcgcgcacggcggcgcggcacgggagccctgctctttccccatggagccgcttcggagggcagaagaggggcatgttcatccagacgcagtcgaccccgaacccgcagtcgctcatgttctatcctggaaagccggttatggaggttgggagctctgatttcccgaatgctcggaccgcgatgacatctcctttggccaaggcgctgtttgcaatcgacggagttaccagagtattctttggatccgattttgtaactgttacaaaatcagaggaaacttcttgggactatcttaagcctgaggtttttgctgtgataatggacttttactcatctgggcaatcactctttctggactcaagtactgcagcttctatggacaccgcaattcatgaggatgattcagaaatagttgcaatgataaaagagttgctggagactcgcattcgaccagctgttcaagatgatggtggtgacattgaatatcgaggatttgatccagaaacagggatagttaagctaaaaatgcaaggtgcctgcagtggatgtccaagttcgtcagtcacattgaagtctgggatagaaaacatgctcatgcattatgtccctgaggtgaaaggagtagagcaagaacttgatggtgacgaggaagctgaactgactggccagttggaatgacttttctttacggccaaatctcaacatcttcacatgtcgagggaaactttgcatcgttgtttgtgaaaatcaatccttcaaaaaccatagtcactttctttgttttgagatcaggactagttcaaagttttcaccacgaatagagagctgtaattttgaacctgatgtatgcaacagcgaagaagcatactttcatagattgtagaggcagcgttaactagcctacacaaatatcagttgcaatagggcttaaataaagtgatacagtgagttgatcactgcttttatctaatccttgtatatgccgagcctttcttatctaagcagagctgatcagtgattactacagc

SEQ ID NO: 18837 - DNA, 2625 bp, Oryza sativa
  ref <308>: DATABASE ACCESSION NUMBER: AK069218
  ref <309>: DATABASE ENTRY DATE: 2001-12-06
gactgtgacgcactagtcttcttcccactcgcggtcgcggcgagtacgtacgtgaccgaatggtgctcctcctgctgctcctgctcgcgctcccggcggcggcgggcgggctggcggcggacgggcaggcgctgctggccttcaaggcggccgtgctgcgggaccccgagggcgcgctcgccgactgggacgcctccaccgccgccgacccctgcgcctggaacggcgtctcctgcggcgccgggtccggggccgggggcgccgaccgccgcgtcgtggcgctgtccctcccgaggaagggcctcgtgggctccctcccggcgtcgccgctcccggcctcgctccgccacctcaacctccgcagcaaccgcctcttcggcgagctccccgcgccgctcctctccgctgcggcggggctgcagagcgtcgtgctgtacgggaacgagctgtacgggccgatcccgccggagctcggcgacctcccctacctccaaatcctcgacctctcgtccaactccctcaacggcacgctcccacccgcgatcctgagatgccgccgcctccgctccctcgcgctcggctggaacaacctcaccggcgcgctgccgcaggggtttgccaggggcctgtcggcgctggagcacctcgatttgtcccacaaccgcttctccggcgccgtcccggaggacatcggcaacctgtccaggctcgaggggacggtcgacctctcgcacaaccagttctccggccagattccggcgagccttggaagattgccggagaaggtctacattgatctcacgtacaacaatctgtccggcccgattccgcagaatggggcgctggagaaccgggggccgacggcgttcgtcggcaacccgggcctctgcgggccgccgctcaagaacccgtgctcgccggacgccatgccgtcgtccaatccgtttgtgcccaaggatgggggctccggcgcccccggtgctgggaagaacaaggggttggggaaggttgccattgtagccattgtgctcagtgatgtggtggggattctgatcattgcactggtgttcttctactgctattggagggctgtttcctccaaggagaaggggaatggtggggctgctggttctgaggggtccaggtgtggcaaggattgtgggtgttttagccgggacgaatccgccacgccgtcggagcacaccgagcagtatgacctcgtgccgttggaccagcaagtgaggttcgatctcgatgagctgctcaaggcatcagcatttgtgcttgggaagagcggcatcgggatcgtgtataaggtggttcttgaggacgggcttacgatggccgtcaggcggctaggagaagggggactgcagaggtttaaggagttccagactgaggttgaggccattggcaaggtccgccatcccagcattgttaccttgagggcttattactggtcttatgatgagaagttgttgatatatgattacatccctaatggcagcctctctgcagcaatccatggtaaacctgggacaatgacattcacaccattgccatgggatggacgtctaaaaatcatgcaaggggttgcaaaggggctatctttcttgcatgaatttagccataaaaagtatatccatggggacttaaggccaaataatgtcctccttggatcaaacatggagccatacatatcagattttgggctcggacggcttgcaaatattgctggaggatcacctttcacacaatcagatcatgctggtatagagaaagctcagagccagcagtccgatgcctcggtgagccctcttgtgggcaaaggatcatgctatcaagcaccagaagcactgaaaacactgaaaccatctcagaaatgggatgtatactcctatggtgtgatcttgctggaaatgatcaccggcagatcgccggttgttctcttggagactatgcagatggaccttgtgcaatgggtgcagttctgtattgaagaaaagaaaccatctgccgatgtgctcgatccttctctcgccagagactctgaacgggaagatgagatgatcgcagcactgaaagttgctctcgcttgcgttcaggccaatccagagcgaaggccctctatgaggcatgtcgcaggaaccctggatcacctcaatggttcaggctagaaaagtagtatcatggaaggcggtcattttttagagcatttgatggttgtacagctcaaggaaggcaaggaagcttaggtgactcaagcttcatcagttcgctatgtaaaattgtcattttcgcaggaccctcagattctgctccgctcttaacatgttagatagcctttttctgttagcttgctatcatgagttatgactattgtgcttgcctataagtcatgggaatgggtgaatttaactgtgtatgcttgcagcttgctctctgatagtctgaatgaacaagaactgataggattatatggagcactttgtttggagaacagagccacggatgtcattgagataggggtggcaaatagttatttgccaaatctaaaagtggcaaatagttaaaaccccctctccttgtactacttaattggtatcaattttttttttaccatgg

SEQ ID NO: 18838 - DNA, 1046 bp, Oryza sativa
  ref <308>: DATABASE ACCESSION NUMBER: AK069219
  ref <309>: DATABASE ENTRY DATE: 2001-12-06
tgacgcgactacgcgtacgccacgccacaacgcttctcgctctccctccactcgtagcagctcgagctgcctgtagcagatagcgcgacgctgcgaccttcgtgtgcccggccgctcgccgccccgcgcgcataagagggaggaggaaggaaggaggagagatcgtagcaagagcgaagcgagatggctgccgggctgggcgtgaaggcggcgccgttcacgtacgtggcgcacgcgctggccgtggcggcggcggtcatggtgctcgtctggtgcatcagcttccggggcggcctcgcgttcgaggcggacaacaagaacctcatcttcaacgttcaccctgttcttatgctgattgggtacattatcctcggcagtgaagccataatgatctacaagatattcccaaaactgaaccacgacacaaccaagctgatccacctgattctccacgcgatcgccattgttcttggcgccgtcgggatctactgcgccttcaagttccacaacgagagcgggatcgccaacctctacagcctgcattcctggctcggcatcggaacaatctcgctgtacggcattcagtggatatttggattcgtggcgttcttctaccccggcgcggcgccgcacgtgaggcgcggggcgctgccgtggcacgtgctgttcgggctgttcgtctacgtcctgacgctggcgacggcggagctcgggctcctggagaagctgaccttcctccagagctccggcctcgacaagtacggcgcggaggcgttcctggtgaacttcacggggctggtcgtcgcgctgttcggcgccgccgtcgtcgtggccgccgtcgcgccggctcacgtcgaggaacccgagggctatgctccaattccggtcaactagctatgtttcgcggttgctggaagtgatcattaataccacgaaatcaaaggtgtaacagcagaattcatataccgatttgtttgtattcggtggacgatactgtgcgataattcaacactatccaggtaatttacgtttactacagtgaatgc

SEQ ID NO: 18839 - DNA, 2605 bp, Oryza sativa
  ref <308>: DATABASE ACCESSION NUMBER: AK069220
  ref <309>: DATABASE ENTRY DATE: 2001-12-06
gacgccactcccccctccccaccaccattgttcaaatcatatcagctccagtttttactcacaagtcgcaagtgagagccactgagccagcatccaaccagtgtacatcatgaggactcaacgaatcctcctcgccgtagtagtgtccatggttgtttcctcagcgatgctggccgttgtctcctgcgcgcgggagaggaagaactacgtggttcatctcgacccgagggaggacggcggcgtcgccgactcggtcgagctgtggcaccgctcgttcttgccggaggccacgccggaggcggcgggggatgatggcccgaggatcatttactcgtacagccacgtgctgtccgggttcgccgcgcagctcaccgacgacgaggctgaggcgatgaggaagaaggaggggtgcatcagactgtaccccgaggagttcttgccgttggcgaccacccattcgccggggttccttgggcttcacctcggcaatgatgggttctggagccgctccgggttcggccggggcgtggtgattgggctcctggacaccggtattttgcccagccacccgtcgttcggcgacgccgggatgccgccgccgcccaagaagtggaagggcacctgcgagttcaaggccatctccggcggcggatgcaacaacaagatcatcggcgcgcgcgccttcggcagcgccgcggtcaatgcgacggcgccgccggtggacgacgcggggcacggcacgcatacggcgagcacggccgcgggcaacttcgtcgagaatgccgacgtccgcggcaacgcccatggcacggcgtccgggatggcgccgcacgcgcacctggccatatacaaggtgtgcaccaggagccggtgctccatcatggacatcatcgccgggctggacaccgccgtcaaggacggcgtcgacgtgctctcgttctccatcggcgcgtcccccggtgcgccgttcaactacgacctcgtcgccatcgccacgttcaaggccatggagcatggcatctttgtcagctccgccgctggcaatgatggcccagtcgccgccaccgtgggcaacggcgcgccatggatgctcacggtcgcggccggcaccatggaccgggcgatacgcaccacggtgacgctcggcaacggccaggtgttcgacggcgagtccctgtaccagccgcggaacaacaccgccgggcgccagctcccgctggtgttcccgggcctgaacggcgactccgactcacgagactgcagcacgctggtcgaagaggaggtgagcggcaaggtggtgctctgcgagagccgcagcattgtcgagcacgtcgagcagggacagaccgtgtccgcgtacggcggcgccggcatgatcctgatgaacaagccggtcgaaggatacaccacattcgccgacgcgcacgtgctgccggcgtcgcatgtgagctacgccgccgggtcaaagatcctgtcctacatcaagtccactcccaagccgacggcgagcgtcacattcaaggggacggtgatggggtcgtcgccggcgccgtccgtcgcgttcttctcgtcccgggggccgaacaaggccagcccgggcgttctgaagcctgacatcaccgggcccggcatgaacatcctcgccgcgtgggcccctggcgagatgcacaccgagttcgccgacggcgtcagcctctccttcttcatggagtccggcacgtcgatgtccaccccgcacctgagcggcatcgccgccatcatcaagagccttcacccgacatggtccccggcggcgatcaagtcggcgatcatgacgtcgtccgacgtcgccgaccacgacggcgtgccgatcaaggacgagcagtaccgcagcgcgagcttctacaccatgggcgccggctacgtcaacccgtcccgcgccgtcgacccgggcctcgtctacgacctccacaccaacgactacatcgcctacctctgcggcctcggcatcggcgacgacggcgtgaaggagataacccaccgccgcgtctcctgcgccaagctcaaggccatcaccgaggcggagctcaactacccgtcgctggtggtgaagctgctgtcccagccgatcaccgtccaccgcatcgtgaccaacgtcgggaaggccaactccgtgtacaccgccgtggtggacatgcccaagaacgtcgcggtcaccgtgcacccgccattgctgcgcttctccagggcgtacgagaagcagagcttcacggtgaccgtgcggtgggcagggcagccggccgtcgccggcgtcgaggggaacctcaagtgggtctccgacgagcacgtcgtgaggagcccgatcgtgataccgccagcgaaggccgtcgtgtagtggatcgaattgagcagcaaaatcagcagcttctctgctcgtgttcgacgagagtagaatgcactcagagtacgtgtccggtgtacgtaacgtatggcgacgtaggcgtattacggatcgatttgttgtatagggctaccgatcgttgtaacggcagcaagctcagctgcaacggagttgtgtaaatactggaaaaataatggatttttagtctgtaagatgactcgatcg

SEQ ID NO: 18840 - DNA, 2565 bp, Oryza sativa
  ref <308>: DATABASE ACCESSION NUMBER: AK069221
  ref <309>: DATABASE ENTRY DATE: 2001-12-06
gtattatttattaagtgtcaatgattgaaatggatgatttaccatgtgacagattaattattaaaattatattgttttcatccgttgcaatgcacgggcattttgctagtctttaaaaaaaataagttcagttgaggctaggtggtgtttttgacactatcaaaattaagtacagtttttataagtaaatttcagtagcatttagttttaggattatactggcagtatgtttgatttgttttccttcaattttggcattcaaatttatgtttttatttaggaccgtttttgttcttgccattttttcagtaggaaaaccagaagtattttaatcaatactatcatactgtattaagatttggtaatttcaagagctttcattcttatgaacatctccaaaaattgatgtatgggtgtgtttagttctttgggtgtaaagtttttaagtacacggacacacatttgaagtattaaacgtatactaataacaaaaacaaattacagatttcatctgtaaactgcgatacgaatttattaagcctaattaatctatcattagcaaatgtttaatgcagcatcacattgtcaaatcatgacgtaattaggctcaaaggatttgtctcacaatttacatgcaaactgtgcaattgttttttcctcacatttattgttccatgtgtccgaacatttgatgtgatgtttttgatcaaaaatttttaaatctaaataaggccataaggcttaaaaccaaatactcctgaaatttaacattgctaaatttcagtgggggttcaagagtggcagcaatctctaaacattggatagaacttttctccttcggctatagtgtcactgtcctcgccttctccggcgagctctcctccgccgtctcgtcccttctccgatgatctcgctggctgttccggcgatatactcgttgacctcccagtttcccagtgccaccacgcacgccagggcgccttcccgatgcgcgtgcgcgtgcgtgcccggtcggcaagtagcggagcagccactagcttccatgaaggccgagcaggcggcggcggcggcgggagagacgccgaggttcaggtgggacacgttcgggtcagcgccgtcggagcctcagtgggaggcgattcgggggctctcccccaagcttcccaatcgctgtagggccctgatggcgcgcctcgtgtgcttgcctcctcctgatcaggatggagatgaggatgaggagactcttggtgcgctgctcgtgttctgggtgaaagccatgaagcccaagaggacggattggttgctggtgctgaaggagctcacggctatggagagccctctccttgctgaggtgctcgagcatgcattgctggaggattcttttgaggcaaatgtccgtgactacaccaaattgatccacatatatggcaaacaaaagctattgcagaaagctgaggatgcattccatgccatgaaaagcagaggtttgccttgcgatcaagttatgttgactgcactgatggacatgtacagtaaagccggagatctcactcgtgcaaaagaaattttcaacgagatcggattgcttggcctaccgatggataagcgtgtatacggttcaatgatcatggcttacatcagggctgacatgttagacaaagcagaagacatgatcagtgaaatgggggatcagcagattgttgcaggaaaggaagtttacaaggcattgctgagagcctattcatacaaaggcgattcagaaggggcacagcgagttttcgatgccatacaattcgcagggatagtacctgacacaaagctttgcgcacttctggtgaatgcttactgcctcgcggatcgaatcaacgaagcgatgatagtaacacggaatatgagaagcgcgagaatcacaccgtgcaacaaatgcattgctttgatattgggggcttatgagaaggtgaacaggctagaaggagcactggcatttttgacagagctcgaggagaacggcgttattattggccaagaaccttctcagctgcttgcaggatggctcagaagacttggtgttgttcaagaagtcgaacaggtactgaaggacctcgctgtagacaggaagaacacccttgaagtagacaggaagaagaacctcgcatcagacaggaagatcaagaggaggaggagcaagagcaaacgcagttttgcatcatctctgcaacgcaagtgattagctagctgcaacacaaacctgcaacattcttgactggcaacaaggacatgtgctgccccatgagtcagattacaatgcaaacttgtatacatgtttgggatttcacaggcgatactacgataagatggtaattaagctatctgaaaagaaaaggctccatccaaggtgatatgcatcacatgtaactcttagaggaacccctaggccctaactagaattttgatacccagaacagcagcaatgttacaaggaagctctaaccagagcagcaatgttatccttgacacttaagttgatcatgactcattatcaacaatgttttggactttttcttc

SEQ ID NO: 18841 - DNA, 3252 bp, Oryza sativa
  ref <308>: DATABASE ACCESSION NUMBER: AK069222
  ref <309>: DATABASE ENTRY DATE: 2001-12-06
ggtgttgttattactccttggatcgactcggccagcataaatgccccgcctttaatggcttccccgatctgatgcttccgccctccgcttctcgcctcgccgccgccgctgccgagaataccgccgctgcggcgctccacgtcgtcgccgtcgccgcgaggccacgtcggtaggcaggtgttgtattggtgattttttgttgcgggggatcgagcggatcggatgctgaagaacgggggagaaaagtgttggttttaagtagagattgtttgggatttgaagggagttgctacgagcgatggggacggagaaaggtggagcaaagattggtggcggcggcggaggaggaggaggaggaggaggtgggggtgggctgttcaacctgtttgactggaagcgcaagtcccggaagaagctgttctccaactcacccgagggtgctaagctcgtgaagagaggcgaagaaaccttgccgtctgggcgcctccacttgattgatgatgatgaggggattggtgtgtcaagcttcaaagggagcagcgactacagctgtgcttcctcggttactgacgaggaagggcgtgagatgaaggcgccaggagtggtggccaggctcatgggcttggatgccatgccctctaccggggtcccggagccgtactgcacaccattccgtgacacacggtcgtttagggacagccagagcctaaagagaagcccagagtactccgggagtgaccagttcagttatgtgccacgaagagttgatggctacatgaggaagccattggatctgagagctcagaagatgccgagcagcccgattgagaggttccagatagaaacattgccgccaaggtcagccaaacccttaccaatgtcccatcacagattgttatctccaatcaagaatccgggatttagttcagcaagaaatgcggctcaaatcatggaggcagcagccaagattcttgagccaaggccacaggtcagttctagggagaaaatctgctcatacagtcctgcgcggattcctttgaggatttctgagacacgggagaatatcccagcttctcagagggcagtgtctcggcagctgcagtcatctcggaccaatcttgagctgcctgatgtgagattttccagggggcagcaaatgaacaggagctggaatagcgaagatgacatagtgatctttaggacttcatctgattcttatgagattaataaccctggcttttcaaagaacaacaaggggaagtccatttcattggcactgcaggcaaaggtgaatgtgcaaaagagagaaggattgggttcttctgggaagaattcaggaggacagaaagatcgtgatgagtgcagaacaagccaaccttttaggagtcagtccaatgcccagaagaataagcagcagaagaagccgtcatcatcaggtacttcctcccctgtccttaggcaaaacaaccagaaacaaaattctatggtaagcagaggaaagtcagcaccaaacaaatcagtctcaagccagcaaggtagaaagatggctggagattcctcaactgggaagctgaagaatgcaagcaaaatatctaaaggtggcagcagaaaggatattgtagaaagcataagttgtgataaggaaggttcatcgtcaaacaacaaggactttccacaaaagaagcgtttgatagagaggaactccaccaatgagaagggtatgttcgtgcctgaaaaatcagcagctagacttcagaagcaagttcaacctaatgttgtcatggatgagcacattaagtggaacaacgatagtaaagattctacagatgtagtatcatttacctttacctcaccattggttaaaccatcagcaggaccctccagactgtcagggaagtgggatacaagaagcaattttaatttggatgccataaatgagaaggatgattcagacaaaaagtccgaagggctctcatcagtaggattgaactttgtaaatggtgatgctttgagccttctcctagaaaagaaactaaaggagctaacatcaaagattgagccatccatcaactttactaggggcgacacatttgtgcccgcaaacttttccttggaagagcccgtggtctcctcttccagcaattgggatatggaaagcggagtatttgactgcagcccttctgaaggaaaaccttctcaatatgttgattattgccaatcagcgcagtcatcaaccaaaggccaaattttccgtggaagtaaattacaggtggaggaaccagaagaatgcagcagcataagcaacgcaaggaaagaacaggagcatgaagatttaagtcccctctctgttcttgaaccaacctttctaaatgagagttgctggtcttctgattgctgctcaggcagtagcgatggaagcaaaggatattcatcatcttctgaagttaaaaacatgccaaagaatttcctaagcaatccaccatcagtggatgctgaggccaagacaacagattcagtgtcttcttcatcgattgatgcatcagacacctcagcatcaatagatgcgtcggacatctcagatatcacccaatgttcaaagaaatctagaaactcagagctggagtacattggggatgttctaggcaatgtcaacctgacaaagggtggattggggtcattattcatcagtcaagatgatgtatcggtgatggacccccacctctttaacaaattggagagcatgaacttgtatacacaagggaaaaaaaatttggaccggcgagggtacagaaagctcctgttcgactgcgtaagtgaatgcctggagacgagacgtctcacatacttcagggcaggatatgcagcatggagcaaagggatggcagcgatgagcaggggcatagaaactgaagtctgcaatgagataggtggttggaggagcatgggcgaatgggtggaggatgaacttgtcgacaaggacatgagcagtgggctgggcacatgggttgattttcgggtggaggagttcgagacaggagaagagttggagagggaaatactgagctcactggtcgacgaggtgatcggcgacgtctttgtgagacgacgggacggcaggagtgtaaatttgtaatctgatctcgagtgttgttgtttttgttctgtaattttgttttgttaagttatatccatccctatttgatttgtcgaccagacttgatcaaatcagttatatatatgtgttgatttgag

SEQ ID NO: 18842 - DNA, 1748 bp, Oryza sativa
  ref <308>: DATABASE ACCESSION NUMBER: AK069223
  ref <309>: DATABASE ENTRY DATE: 2001-12-06
gacttttctcccttgtttgcttcgcctcggccccttccccgtcctcctcctcctcctcctcctccgccgccgccgccgccgacgacgacgaggtctaccctccgctgaccacgatgatgaaggacaagatgaaggatctcacgaggaaggtcacctccgcctcctcctcctcctcatcctcctcctccaagggcaccgcccacatcctcggctccggccccgacctctcctcctcccgcacctcaaaccctagccctagtcgccccgctgccccccaggcgagaggccgccgtcctccggctccggctcatctccacctcctcccgccgcgccagcgccaccaccgaccctcccgcgtcgggggaggggaacgacgacgccgccgtcgcgtgccccagctgcgcagagccgttcccctccgagctggcggtgtctgaccacctcgacggctgcctcgcggcggcagggggagcccggccccgctcagccgcgtacctggccggctggccggcgatgcccccgcgtccgctgtggaggtggtgaagaggctgctcgggaacctgctctccgatccccggaacgacaagtacaggaaggtcaggctcgggaacccgaggatcaaggaggccgtggcggacagggagtgcggggtggatctcctcgaggccgtggggttcagggtcgccgacaagggcggggagctcttcgccgtcatggacgaggtgcccggagacgcgaggctcggctggatcaggcaagccgtgctcctgctccagagggcccggccttcaacgccgccgccgaagcaggcagatgccaaggggactcgcccggatggagttggcgaacagcagggggttaagaggccggttgatcaccagattcgggtgttcttctctgttgctgcaagttctgttgcagaaaatgatctaccagattatttctatagccttagtaatgaggagataaggaatgaggcaaagatgaggagggggaggctagaacaatcttggttgctgattccaaagtcatataaggagaagcaggcactggctgcccgacagaagtataaacaagctctgattcgtattccgtttcctgatggagtaattctacagggtgtgttccttcccacagagcccattagttccctatatgagtttgccgcatctgctttgaagcagccaagtttggaattcgatcttatctgtccagctggtcctaggacacgtgtcacacctccttttccacaaccaggggagcgggcacacacactgctggatgaagacctagtcccttctgctcggcttaccttcaagcctaaatagactgattcggttgtgttcactggtctgttggacgagcttcttgaggccagcgagccgtttacatctgcatcctcatgaactgtgaatactgccggcaattatttcgtggctgctgacttccattgtgtaaaacagatatccgaatgctctgttacatggctgtaatttgacacagggctattgaaggctggatacctgatatgtgatacatgtaattgcttggcaattgccaaatgccaaaccatacggtagaagaggccagcaattcatcaggcctaggtctacattcttctgtaacttgtgcgatgagtaggatctgctatgtacaaaaacaacagatggaaaccatctcttagtttcatgttcgctgttgtgattctcaatatagctactcctatcaaatcaatatactgttctggc

SEQ ID NO: 18843 - DNA, 1444 bp, Oryza sativa
  ref <308>: DATABASE ACCESSION NUMBER: AK069224
  ref <309>: DATABASE ENTRY DATE: 2001-12-06
aagacgagccgcccggcgccgacggcgagctcctcctccccatcgacgactacgcgttctccgccgtcgacgagacgcagccaccaccaccaccggagcatcagcagcagcagcaattcacccagatgcctctcccggtgatgggcggcgcggcggcggagcacccggcgctgcaggcgcagctgagcagcaccgccaccgagctgatgcagtacgccgggttcaccgacgaggtcttcgcggcggcgttggccactggagccggagctggggcgggagggtacatgggcctggacgacccgctctgcccgcagcagcagcattccggcgcgatgctccccgccgccgccgccgccgccggcgaggcgttcttcagcaaggacgcgcacgcggcgcaggccgccttcttcgccgcggccggcggcggcggcggaagcatggtgatgtcgatgatgggaatggacgagatcggcgagtaccagcggatgatggaatgcggcggcgcgcttctcggcgccacccacgccgccgacggcgccgacatggccttcggcaacgccgccgccgcagagttgcagatgggcggaggcgggagtagcccagcgcggctgccggcgacggggacgacggagacgacgagcttggaggacacgagcttcaagaccgtccgcctctccaacgaggagaggaaggaaaagatccacaggtacatcaagaagaggaacgagaggaatttcagcaagaagatcaagtacgcttgcagaaaaaccctcgcggatagccggcctcgcgtccgtggtaggttcgccaagaacgacgactactgcgaggcatccaggtcgatcggctcgcagaatcacgaagagtatgaacaaattggcggcgtgaagggagaagacatgcttgattctgacgctctagcgcatatcagcgggatgagctcatacatgtacaatcacacagtggaatcctggatataaactcatacgacacagcactgagaaactctctcgaattgctttttctttttttttccaccctattttgtgcagatttaaccggtcctttacttcaaacctctgaataattttgtagaaatttgatgtatgttgatcagctggagttgctgtagggtcggtctgttgtcatatcaatctgcttttcacttgtttgtcattcttgcaggtgaatgaaatagatagagttaatttgcataatttgtatagatacaaatgtcgtgtgtacttaacgatgttagaaggcattttgaaatgcctagtatgttttgaggtggtcctggaaacggttgagaaaattggagcagggaaaatcaatatagatttaggcctttagcaatctgagggtgtaaaggaaaaggatatatttgcaaatgtttgacggtataatacctctatatgaatatattatactattgactttattc

SEQ ID NO: 18844 - DNA, 1268 bp, Oryza sativa
  ref <308>: DATABASE ACCESSION NUMBER: AK069225
  ref <309>: DATABASE ENTRY DATE: 2001-12-06
gtggcaggcaaggggaggggcaggaagaagggaagaattgaagaggctgaggctgttggattggaaaccgtttccaattctccatcctctctatcttcctctcttccttctcctccggtccctctctctctcccccctccatctccatctcctctcttgtatgtatgtatgtatcttaattgttgcagctagctaagaacatcaatcaaattcaaatattacatacataagcctattgattgatttgcttgctgcagttagcctacttacgtgtatgcatgtcaaaacaagacgaaataacaacaggcatgcatgtatgtatgcttattttgccgtgctagacggcttttgattcgtcttctttgatgggcattcatccctttcagctccaacccctacagttgatgctatggttgggaataggatatggtttgggggccttttcaccagctcaggtagaaggcgccagatcaatgctgagaagacctttgagctgagccctgttcaggagcaacgtttgcaaaagctgaaggaaagactaaatataccttatgatcaaactcggagagatcatcaggaagctctcagggctctgtggagtgcttcatttccggatgcagagctgtcaagcttaatttcagagcagtggaaggacatgggatggcagggcccaaacccatcgactgatttcaggggctgtggatttgtgggacttgagaatcttctcttctttgcaacaacatatccggcttcttaccagaggctgcttctgaagaaacaagggatgagagccacatgggagtacccctttgcagttgctggtgttaacgtctcatacatgttgatccagctgctggagctcaacgcagaacggcccaagtctttgccagggattaactttatcaaagtgctgtcagaacacgaagaggcatttgacgtcctgtactgtatagctttcgagatgatggatgcccagtggctggcaatgcgagcatcctacatgcagttcaaagacgtgctggaagcaacaaagcagcagctggagagagagctatctctggaggacgtcaatggaatccgtgacataccagcttacaaccttttgtacaagtagctagctaggggaggctcaagaaaacataaacagaaaccttcttgtaaattgcatatcagcatgcatgttttatgtactgcacccaagagagaaaaaggcagacttttacatttatacacaataattttatttatacacacttataagtttgacc

SEQ ID NO: 18845 - DNA, 1562 bp, Oryza sativa
  ref <308>: DATABASE ACCESSION NUMBER: AK069226
  ref <309>: DATABASE ENTRY DATE: 2001-12-06
gaatcaattcctctcccgcgacacgcgcgcgagctcaactgcctcgcttcctccctcctcccgatcgaccgcgccatggctgccgccgctgtcaccaagtcgccgccggtgctggtgcccccggcggggcccaccccgggcggctccctcccgctctcctccatcgacaagaccgccgccgtccgcgtctccgtcgacttcatccaggtcttcccctcctccgccgaagccgccaaggaccaggccgcatcggtcgccgccatgcgggagggtttcgccagggcgctcgtccactactaccccgtcgccggccgcatcgcggagccggtccccggggagcccgagatcgactgcaccggggaaggggtgtggttcatcgaggccgaggcgagctgctcgctcgaggaggcgcgcaacctcgagcgccccctgtgcatccccaaggaggagctgctccctcgcccgccgcccgaggtccgcgtcgaggacaccgtgctcctcgcgcagattacgaagttcacatgcggtggatttgctgtgggcatttgcttcagtaacttggtgtttgacgggcaaggtgcagcccagttcctgaaagcagttggtgagatggcaagagggctccctgagccatcactcaaaccaatttgggccagggatgccattcccaaccctcccaagccacctctaggaccacctccatcgtttactgcattcaactttgagaaatccgtcattgagatctcgttggatagcatcaagcgtgtcaaggaccaggtcgcaagtgagaccaaccagaaatgctccaccttcgatgtggtcactgccatgatgttcaaatcccgtactttggctattgactttgcacctgatgccgatgttcgtctgggttttgctgctagcacacgtcacctgctgaacaatgtgctgccttcagtcgacggctactacggtaactgtgtctaccctggtggcctcgccaaaaccagccaggaggtcaaggatgcgtcgctcgtagagattgtgacagcgatcagggaagccaaggatgtgctctcgacacggttcctcgattggatgagcggtggtgccaaggagaaccattacaatgtgtcgctggattacggcacactagtcgtcacagattggagccatgtcgggttcaacgaggtggactacgggtttggcgagccgagctatgtgttcaccctgaatgatgatgtgaacattgtgccgtccgtcgtctacctgaagccgcccaagccgaagcagggaatcaggttggtgctgcagtgcgtggaggctcagcactccaaggttttcggtgaggagttgcagaagcttgcatagaggtaacttcgtgtttatacgcctacacttcgcagcgttgagagctgttgtattctggtgtgttgaatagccgcttcttgaacttggttacaaataaaacaaggtggatcgtgtttgtattctgtattgttgttaccatactacattatacattgattgacattgttgaggcagtactgttacagttgagaacaaatgattccattgatttc

SEQ ID NO: 18846 - DNA, 984 bp, Oryza sativa
  ref <308>: DATABASE ACCESSION NUMBER: AK069227
  ref <309>: DATABASE ENTRY DATE: 2001-12-06
gcttccccaccatcaccaccaccgccgcttcctcctccgcctccgcctccactccacaactccgccgccgccgcaatgctggaggccgtgatcccggcggtgtggagcgccgtccacgggtggttcacccccgcggtgctcttcctcgtcctcaacatcgtcatcggcaccatcgcggttacttccaaggtcaccgcctcctcctcgacggcgggcggcggcggcgagggggttgggtatggagcgtgggcgggtggtggtggtggtggtggaggggagcagaggaggttctcccgcgtgccgtccatggcgctcgaccggctccggtcgtttaatctctccggcggttctccgcagccgcctctgcccctgctgctcccgaggcggccgcggtggtgggcggggtgctggatctgggcgcccgcgatgaggcgacgacggcggcggtggtgaaggatgtggggggcgggagagagcgcgaggaggaggtggaggatgagcaggagcgcgcgcaggcggcgcatgtggtggagaggagcaagtcggaggcgacggcggcggcggcggacctcccgcggctgccggcgcggctgcgcaagtcggccagcgaccagtcggcgttcgcgcacttcgaggccgagaagaaggcggcgcggccacgccgccgccgccgccgccgcggtgggcagcgacttgtgagacgcgtgtgatttccagcaatccgagggggctagccgcaaaactgctgataaaaaaaagaagaagagaaatacagggagaggaggaagaactcgagagagaaaaaaatggtagtttctttctttctccccatctcttctgttttggtttattttctttttttttctcctttcaaaatgcttagtagtagtataatattatcgtagcatccgactttttggatagaatcttgtgtaatgcagcaccatatcatgtgaaaatttcatcctcataagagatttggat

SEQ ID NO: 18847 - DNA, 1776 bp, Oryza sativa
  ref <308>: DATABASE ACCESSION NUMBER: AK069228
  ref <309>: DATABASE ENTRY DATE: 2001-12-06
gacctcaagaaccctagacaattggcgacctcgaaaagccctagagccgtctccaatggcggaccaccagcccgccgcctcctcccccaagaggaagaagaagcactccaagaagccggaggacagcaatgccaccgtcgacgactccctcgccgccgccgcctccccctcccccaagaagaaggagaagcactccaagaagaagcgggaagccatcgatgccaccatggccgctgcctcccccaagaagaaggagaagaagcactccaagaagcaggaagacaccaatgtccccgagaagaagcgggaagtcgtgcatgtcaccgtggacgcctccctcaccggcgccgccgccgcgggcgcagcccccgtcgtcgcctacttcccgaccggctacgaccccctggccgccggcggcggcaggaagggtagagaggccccccgcacgaggctgttccgccacacgaagcacccatcccgcatcgagctcgtggtcggcgccgccactggtggcggcggagggccggacttcgtcgggcggagctacgccggcgaggccgtgctgccgcagctcactggctacgcgctcggtgtcctcgacaaggcctccggcaccctcaaggtcgtccccatcgccgccaacaagaaactggcgcattcgcagcactctggggcagtaggggaggcagtatcatcagcaggagatgctgacttgaaggtacaggatattaccaaggcgtttggaacccagaaagacaaggccaaggatattaagtggcagtcattaaatgaacaaaggaatgatccttctgcttttatggaccttgaccttgggaatgctgataccagtgtgggtgctaatgaaagtcaagaaccaactgtacggaacattccaccttatgatcctgcagcagatacatcagaaagggcatatctttttgatgagattattccaaagagtataaggccgcaccttgtggatattataggacattttgagtcaggagaaatttcttcaaaaggctatgggagttttgtgtcaaatcgtgttaataaattacaggagcttcagggtgaagataaggagaggcttgcttggatactgtcctacatcacacatctcctatccctgctggcacggaacagctccatgtccaagcggcacagaaaggaaaaccaggctaccagtggaccagtgatcccacagtatgtatatcgtaagatggtgctaatgtttacggaaccaggatctagcgccttgtcaacagagaaacacgagcttctgatcaactacattctcgtactcacgctctacgctgatgacttcagatccgaccctaaggatatatgtgaagacctgaaaatgacccgccagatgattaaaccatattatgaccagctgggatgcaaatcttcgtcggccggtgcatttaaatcctctgtaatgacacttccagctcccctcaagttcccaaaagaagctacaaggagaaagcgacgaaggttctgatcatctcagaaggatctttagccttatctgaatgtgggtgtgataggaaaagattgttcgaagttgggcctgagtttatgcatgctcagcccagccttccgaattactgaaacatgtggaatatggcttttgccttgtttttgtttccccttgtcacctggagttgctgtcacaaaggcagaatattgtttatgtattgatgacattttttaaccctttttttttctcatcttgcctaccagaatttacattgaagatatctagcg

SEQ ID NO: 18848 - DNA, 2544 bp, Oryza sativa
  ref <308>: DATABASE ACCESSION NUMBER: AK069229
  ref <309>: DATABASE ENTRY DATE: 2001-12-06
gatttgggggaaatttctccaacgagaagctgtgggtgattaatggcgtcgccatgaatccgatcaaccatccaggagcaccattaatggcggctacgaggtattcgtgaggtgggcttggtgacgatcgacgagagagtccgaggatgtcgtacgcgtccggtggcggcggcggcggggagctggcgacgaagcggtcggcgttccacatcgactatgggggtggcgtgtcactgcggcggctggcgcagccggaggccctggcgcgcgggatgatcacgcaggggtcggcgcagctgcggacgctggggcggtcgctgcggacgggggcggccatggcggtggtgttccaggaggacctgaagaacacctcccgcaagatcttcgacccgcaggaccggctgctggtgcgcctgaaccgcagcttcgtggtctcctgcatcgtctccatcgccgtcgacccggtgttcttctacgcgccccaggtgacggcgaacggcggcaacctgtgcgtggggatcagccgcgacctggccatctccgccagcgtcgtgcgcaccgtcgtggacctcttcttcgcggcgcggatcgtgctccagttccggaccgcttacatcgctccgtcgtcccgcgtattcggccgcggcgagctcgtcatcgacaccgcccagatcgccgcccggtacttccggcggttcttcgccgccgacctcctctccgtgctcccgctcccgcagatcgtgatctggaagttcctccaccggtccaagggcgccgccgtgctgtccaccaaggacgcgctcctcatcatcgtcttcctccagtacatcccccgcgtcgtccgcatctaccctctctcctccgagctcaagcgcaccagcggcgccttcgccgagtccgcctacgccggcgccgcctactacctcctctggtacatgctcgccagccacatcgtgggggcatcgtggtacttgctgtcgatcgagagggtgagcgattgctggaagaaggcgtgcaacgagttcccgggatgcaacaagatctacatgtactgcggcaacgaccaccaaaaagggttcctcgagtggcgaaccatcacgcggcagtacatcaacgagacgtgcgagcctagggacggcgtcatgcccttcaactacggcatctacacgccggccgtcaggtccgacgtcatcaagtccaacgacttcacctccaagctcctctactgcctctggtggggccttgccaacctcagcacgctggggcaagggctgcagacgagcatatacacgggggaggcgctgttctcgatattcctggcgacgttcgggctgatcctgatggcgatgctgatcggcaacatccagacgtacctgcagtcgatgacggtgaggctggaggagatgcgggtgaagcggcgcgactcggagcagtggatgcaccaccgcctcctcccccaggagctccgggagcgcgtccgccgctacgacgcctacaagtgggtcaacacccggggcgtcgacgaggaggtcctcgtcgccaacctccccaaggacctccgccgcgacatcaagcgccacctctgcctcggcctcgtccgccgcgtcccgctcttcgccaacatggacgagcgcctcctcgacgccatctgcgagcgcctccgccccgccctctacaccgagcgcaccttcatcatccgcgagggcgaccccgtcgaccagatgctcttcatcatccgcggctgcctcgagagcatcaccaccgacggcggccgctccggcttcttcaaccgcagcctcctcgaggagagcgacttctgcggcgaggagctcctcacctgggcgctcgaccccaaggccggcctctccctcccctcctccacccgcaccgtcagggccctctccgaggtcgaggccttcgccctccactccgacgagctcaagttcgtggcggggcagttccgccggatgcacagcaagcaggtgcagcacaccttccggttctactcccagcagtggcggacgtgggcggccacctacatccaggccgcctggaggcgccacctcaagcggagggcgatcggctcgtcgacggggctcaagaccaccatgctggtgtcgcgcttcgccgccaacgccatgcgcggcgtccaccggcagcgatccaggcgggccgacgaggtcctcatgatgcccatgcccaagccctccgagcctgatttcggcgccgattactgatcagccggcaaatgcatgtgaattagcgcttatgaaatgggtgtaaattgtgagtaaatgttgtcggatttagctgtgcagtgcagtactccctccatttgatagtcatatttcatcttggcacacagactaaggataagtaattctacttatcatctatttaaatgtgctactagtcattcctcgtaaacaagtgattcattaatatttacatttctcaatgcccatgtagccaatcatgtgtggaagaatgaagagtcatgtattaaatccaagaaagtcattaagatgataagttgttggattg

SEQ ID NO: 18849 - DNA, 796 bp, Oryza sativa
  ref <308>: DATABASE ACCESSION NUMBER: AK069230
  ref <309>: DATABASE ENTRY DATE: 2001-12-06
cagaggtgcactcaagcgaacacatcgccattgattctccactcgaagcttagctacacagagagaagcatctagtagtagtcgcatgggcaacagcttgcagctgccatgtccgtgccaggaggccacggcggtggccacctcgggagtcaagaagaggaggaagaagtcgccggccaccgccgctgtcaagagcagcaaagcggcggcggcggcgtcgtcgatgcacgtggttccggtgatagacacgccgggggaggaggaggagatgaggatggcgtggccggggtgccacgtggagccggccgtcgacggcggagacggcatgcgggtgaaggtgttgatgaagaggaaggacgcggcggagctgatggcgaggctggaggagcggtgcgctgtcgagaggaaggctaagatggtggagctcaacgccgggctccgcggcggccacggccacggtcacggcggcggtggcgccagggacgcgtgggcgccgcggctcgtggccataccggagaactagcaaattaagcaagaactgcaactgcgaaaaaattctgcatgcacagtacagtagctgtaacatttttggagccctgataaaattacatatagctcgagtacattagctagcgagtttttaattagtgacatggtgaattgaattagtgatttctactctctttgtgtttgtttttcttctgctgagtccgctttgcttcttgagaagacgaactctgtcggctcgtcatggtgcacagtgtatacataagtatcaatttgcacctatgagagc

SEQ ID NO: 18850 - DNA, 1690 bp, Oryza sativa
  ref <308>: DATABASE ACCESSION NUMBER: AK069231
  ref <309>: DATABASE ENTRY DATE: 2001-12-06
gaccgtctccatctgtgcacggagggattcattgtccctccggccaatttcccggccggccggaacggcggaacctcgcccatgatcacttgaaacacctcccttgctcttcatggccatggagacgacgagccaagattcgcaggtgatcatggggcggtacaagctcggccggctcctcggccgtggcacgttcgccaaggtctacaaggcctataagttggccaccggcgaggccgtcgccatcaaggtgttcgacaaggaggcggtgcagcggtccggcacggtggagcaggtgaagcgcgaggtggacgtcatgcggcgtgtgcaccaccgccacgtcatccgcctccacgaggtgatggctacgcggtccaggatctacttcgtcatggagtacgcgagcggcggcgagctcttcacccgcctctcccggagcccgcggttcccggagcccgtcgcgcgccgctacttccagcagctgatcaccgccgtggagttctgccacagccgcggcgtgtaccaccgcgacctcaagcccgagaacctcctcctcgacgcccgcggcgacctcaaggtcaccgacttcggcctcagcgcgctagacggaggcctccgcggcgacggcctcttgcacaccacgtgcggcacgccggcgtacgtcgctcccgaggtgctcctgaagcgtggctacgacggcgccaaggcggacatctggtcgtgcggcgtgatccttttcgtgctcctcgccggctacctccccttcaacgaaaccaacctcgtgatcctgtaccggaatatcacggagagcaactacaggtgcccgccgtggttctccgtcgaggcgcgcaagctccttgccaggctgctcgacccgaaccccaagacccggatcaccatctccaagatcatggacaggccatggttccagcaggcgacgtgcccgctcggcgacatgtccctcgtcgcgagcgcgccctcggtgctgcttgccagaaaggaagccagccagcagcacgacgacgaggaggacgatgggtttgcacgggagaagaagaagcggtccaatgtgatcatgtcgtcgccggtgatcgacgtgaggccctcgagcatgaacgccttcgacatcatctcgcggtcgagagggctggacctgtccaagatgttcgacgcggaggagcgcaggtcggaggcgcggttctccaccagggagaccacgacggcgatcgtctccaagctggaggagatcgcggaggcggggaggttcagcttcaagctgaaggagaaagggagggtcgagctggaggggagccaggacgggcggaagggcgcgctggccatcgaggcggagatcttcaaggtggcgccggaggtgcacgtggtggaggtgaggaagaccggcggcgactcaccggatttccgggacttctacaagcaggagcttaagccgtcgcttggcgacatggtgtgggcgtggcagggaggtgattcgccgccgctcgtgccggcggcggggaggaggccgatcacgaagcgctcttgatatgccgactcgatatcgaattttcacgttgtaattgatatgctctctgcttattgatctctcgtacgtgtttgtgaagggtgatgggtgaaccaccgtccagctgatctgtgagtttttaaaagcacgaattacatttacgttggc

SEQ ID NO: 18851 - DNA, 907 bp, Oryza sativa
  ref <308>: DATABASE ACCESSION NUMBER: AK069232
  ref <309>: DATABASE ENTRY DATE: 2001-12-06
gaaccttccaaaaccaagagaaaatcgaaaagaaaaaaagaacgcatctttcctgcctttcctcctcccaaagctccaaatcgcgccccgccccccaaatccacgagcaccagcgatcgccgtcatcctccgccatgatccggttcatcctgctgcagaatcggcaggggaagacgcggctggccaagtactacgtcccgctcgaggactcggagaagcacaaggtcgagtacgaggtgcatcggctggtggtcaaccgggatcccaagttcaccaacttcgttgagttccggacgcataaagttatatacaggcgatatgcaggactgtttttctcaatgtgtgtggatatcactgacaatgagttggcatacttggaatgcatccacttgtttgtcgagatattagatcatttcttcagcaatgtgtgtgaactcgacttagtatttaatttccacaaggtttatttgatattggatgagtttattctcgctggagaacttcaagagacaagcaaaagggcaataatagagcgaatgggtgagcttgagaagctggaataagaagaaacggtgtacactagcgtacatgggcagatgatcaagagtgttgccatctctttctctgccgtgccaagacattgctctgcattttgtacaattctttgtagctattgtgttatacctagctcacctacattttcaccggctgttcatctgtgtaagtctcctttgttgcttggtgaggctactacacactgctagattgttctgttgattaccatggaatcagtcatctttgtgcatttgcttgaagtaatcatcattatagcaatctcttttttttcacctgtctgattgggagtctgatcttttgatgctgaatcaataatatgactgttttaagc

SEQ ID NO: 18852 - DNA, 1842 bp, Oryza sativa
  ref <308>: DATABASE ACCESSION NUMBER: AK069233
  ref <309>: DATABASE ENTRY DATE: 2001-12-06
gaaattctccggcgtttccagttcaaaaataaaaaataaaaaatctccggcgcaaatcctcctctccgccgccgccgcctccacctccaccgctcgccccctcgccgcgcctccactcctcacaccacgctcctcctgacctcctccctcgcgcttctccggcggcgcctcgctcctctgcgcggaccgttgcccctggccgagcgcggcgcggcgcgggccgcccgcggggggatcgggctcgggtagaggcgggcgacctggcgggggaagtaaggggtcgcgcgtggcggggagatgatctacacggcgatagacacgttctacctgacggacgagcagctgcgggactcgccgtcgaggaaggatgggatcgacgaggccaccgagaccgccctccgcgtctacggctgcgacctcatccaggagagcggcatcctcctcaagctaccacaagcagtgatggccacagcacaagtattgtttcatcgtttttactgcaagaaatcatttgttcggtttagcgttaagagagttgctgcaagctgtgtttggctggcagggaagttggaggagagtccaaggagatcaaagcatataatcattgtcttccatagaatggaatgtaggagagagaacgtaccaatagaacacttagatgtgttttcaaagaaatactcagacttgaagcatgatctggtaaggacagaacgccatctgctgaaagagatggggtttatttgccatgtagagcatcctcataagttcatatctaactaccttgcaacacttgaagcccccgaactgacgcaagaggcatggaaccttgccaacgatagcttgcggacaactctatgtgtaagattcaagagtgaagttgtagcatgtggagttgtgtatgctgcagcaaggaggcatggcgtgcccctccctgaagatcctccctggtggaatgtgtttgatgctgatgaggcaggaattcaggaagtttgcagagttcttgctcatctctacagcctccccaagtcacaatatatacaagtgtataaggacaatgattccttcacgcataggaggacttctgatacaaatgcttcaaaggaaagtcctgcaacgactgttgcaagcgataagggtacccctgtaccgtcaagttctagccaggaaaaggatgcactgattaaggcagggtcagataaggtgaaagaaaaaggtgacgatgatgggaagacgttaccttctgaacccaatggtaaagaaggccctgcagtgaatttgaatagtgagaagtcagaatccaatgttgatcgctctcgggaaagagaaagagatagatcaagagggcgggaccgtgatagcaggggccgggactctgatcgtgatagcaagggcagggactccgatcgggagagggagcgtgatagagaagcagacagggataggcagcagagacaccattctaaggacagaagttcaggatactctgacaaagagaagtcaaggcaccgctcatcaagagatcgtggtgatcactacagttcgcactcatctcgtgacaaagatcggcacaggcggcagtaatctagcagagctcgaaaacatgtaaactgatgaagtacacgttgcactatcgtggtaaaattgccattgcaactgggttccggggtgtttgttatgattgttaaactctttttttatttgcaacagaaaaagaattcttcttttgtggtgagtatcagacttcatagacttagctttgtatgacgcgtgggtctgggcatgaatcacttgttatgggagaaacttattcttgctatgcaaatctatatatcagttgattct

SEQ ID NO: 18853 - DNA, 2634 bp, Oryza sativa
  ref <308>: DATABASE ACCESSION NUMBER: AK069234
  ref <309>: DATABASE ENTRY DATE: 2001-12-06
gagtgaaccccagccagtgggcgctggccccctacctggctacctccccgtccttcctcccctccctcgcgcctcctcccaccgctacggcactgcctagtccagctccacatccatcaggttcccctgatacaagaattttagggccccgaatttctccagcattttctccaagggcaatgtctccagaatccactggcggtccggtgcaccctccttcacacaagcaccacagaagaccatatcatcctcattcgccatccccatctccccttccacaaggttgtactgataactgctctgatccaatgactacaacaccgattggctccccctgtggttgtgtgctgcctatttgtgttattgttgatctggatgtagctccatatttgctattcatgcgcatagcagaactagaagttgaagttgcagctgggacgtttcttaaacaaagccaggtgaagatcatggctgcaattccaagtatccaggatgaccagaagaccagggttaccatttatttggtgccactaagagaacagtttgatggctatactgcctccctgatatctgataggttctggaataataagattcagatcaattcatctatttttggagattatgaagttataaatgttacctatccaggcttgcgatctccgccaccatctctgcctgagacatctcatggatctgatccaacaggaaccggagaagatccaataaccgctgatgtgcaccatgggaagaacaagaaattagattcatggatcattgtggtagttgcagggtcttctatcacacttatagcagcatgcattgggcttggggttttactattaaaatggtataaacttagacagcttcaggaggctgtgagccctgcaactaccccagcagttaatagaagatatggtggcagatcaactttgtctgttagcagggtgagctctgcatcggcgtcaatgctctcaacagtggcaacttgcacaacatcagtaaagacattttcactttcccagcttgaaaaggccactgatggttttgattcaaaaagagtgttgggtcaaggtgggtttggacgcgtctaccatgggaccatggatggtggagacgagattgctgttaaattgctcacaagagaagacaggagtggtgatcgagagttcattgcggaggttgaaatgctcagtcgactacatcaccgtaatcttgtcaaattgattggcatttgcattgagcacaacaaaaggtgtcttgtttatgagcttatacgcaatggaagtgttgaatctcaccttcatggtgctgataaggctaagggcatgctgaactgggatgttaggatgaaaattgctctgggtgcagctagaggcttagcatatctacatgaagactcaaaccctcatgttatacatcgtgacttcaagggcagcaatatattgttggaggaagatttcactcctaaggttactgattttggtttagcaagggaggcaactaatggaattcaacccatttctactagggtaatgggtacttttgggtacgttgctccagaatatgccatgaccgggcatcttcttgtgaagagtgatgtctacagttacggtgttgtcttgctggagcttttatcaggaaggaagcccgtatgcatgtctgataccaatggtcctcagaaccttgtgacttgggctcgtcctctgctatgccataaggagggtttggagaggttgatcgacccttctctgaatggcaatttcaactttgatgatgtagctaaagtagcatccatcgcttccatgtgtgttcacaatgatccgtcacagaggccattcatgggtgaagtagtgcaggcactgaagcttatttacaatgatgcggaggcggcttgcgatgattcttacagccacagggactcatcgtgtgaccagtacgatgactaccatggggccctggcccttgacagcggtagtggtagctggtggaatagaagctcaaatccttctgggttttttgacaaccggaaccccctaccagttattaccatggaatacagctctggcaggatcgaaggagcgcgtgacccccgctttgcattgtcaacaggtggtcatgcacaatcaccagccctgcagaatagatcaggacccatccggatgaagaaaaagcttgcctcattttaccggtctagaggtagcttcagcgagcatggccagctgcctcgccattgattaataatctagtgttagactgttagcttcagttgacttgggattgaggctgtggggggatttcttttacctctcgttgattcttgcctccggttagtgtacagttttcccgacaatcctggtgaccgccagtatagatgatgttttcatttgccttaatttctgcctccccaaagaagcaaatgaggatatggggttggcaggtgctctctaattttgcgatttgcggttcattcctcatgcatctctgatttgtgtaatctgggtaggaaaatttcttgccagaattctgggcatcatgttgtaatgggttgttaaagaattcgattattcgaccctcccctcgttgccgaggctgtacatgtcaggtgttaccgtgttagcattccttccgagc

SEQ ID NO: 18854 - DNA, 3732 bp, Oryza sativa
  ref <308>: DATABASE ACCESSION NUMBER: AK069235
  ref <309>: DATABASE ENTRY DATE: 2001-12-06
ggctattcctcccctccacccgcgccatctctgccgcgcaccccgcctctgccgcattcaatccaccgtgcatccgcacagcaacgacaaatcctcaaaacgaacgcgcctctccccgccaccgcgcatccatccatccatcggcaccggaggtttcgccggagctatcgcatctcccattcttcccctcccctttgtatatcctcctcactccaacacggcgccgggcaccggtcctcctcgcggtctccgccgtcgctgtccatcttccaccggtaatacccgccgctgcctcctccactccgcccgcatcgccgtccaatcaccgcgctgtcacgacacgattcgacctcaaccacggcgctgcctcctgcactcctgccactcagatgtcacccacgtgatccggccctcaagcccgatgtggccagctgatcttatcccctcccccatcagtgaaggattattagggacaaaaggatcattgattctcatgtccaaaaggtgttcgatgaaatgctgctaatagatggttcgttggacatgatttgttccttgacatgatcaatgtgttgcccaagctccagatgacacggtataatgcttctgctctggtcctgaggcctgactattgctgcctatgctgagttctaataaaaaaatataagtgttttggaagactgcaaggaccatggatgccattcgttgttggggcttatcccatagtaaaaatgtaaacaagagctttggcaaggttagttgtcactaatttctcttccatgattttgctgcacttgcatgtaatttcgaggattgggttcaatccatatcgtttagtgtgtgcagcaaaattcaagtcagcttgtagcatgaaacatatgtaaaggtgccttgaaacaaaggacaaggataggtgcctaatcacccatattagcacctacgcaatatgaatgattgagagtaattttctctaggtagaaaatgtgcagtacatgggtttgttgtattgtttagttatatgcttttggaagctttttcaaagttgttcccttggcgatacatttaagtgtacctgctgtttatattaattattttctctcaacacacttaatgacactaatgatttgtaaattgcgaatatcattattttctctgctgatatttgcatccttcatgtcagtggcagatgctcatggcatgtgtgatatggagttaggcatgaaaaaattataagattactgtgatgtttagtattgcttggagtgactaaatcggattaagtgattgacaaattggcaaataattgatattaatagagtagctcactccattttatctgacttttttttcttaggggtaatcgaacgcctatgtcaaatttgagttcatgtatatttatacctatttgtgacttctatttggctttctctattgaatatcaaggagcccttattctttattgatagtactcatgttacatggtggaatgcattttcagggcaggttgtattccaaagtaggtctttgtgctgcccagttgtatgtttcagcgtcatatcgctcttatctggtgatttctggcccatgtgagcactttatttcttaactccggtttcttttttctgccaaccaatttcttatgggaaaatatcttattactgtaataaggcagtgtatccatttcctaatcttttgatacaaatagatgtttgtgttgggtagaggattcttacatccaaaaatatttcgtgattgtaccagcatagatatagccttcgtggaacaatcaacattttagacatacaaaacctatattcctttccctcccttcattatgtgtcagttcttaaaaaaatggatagtttaattgttggttctgtacaatatggtaacaaactgctccatggcatcctgaaaagggttgatttccttctattcacatttttattttcatcaagggaaagattcaaactacctcattattctttccttttttttttgtttttaagcaatttttgtatgaactacccatacatagttgtgcacatattttgctactattctagcttgtcaaggatatgaactcttatcaatgccagcattgagtgcagctgtttgggtttacaggacaaagaagatagaggggaggggcaaaagagaaaagcccgtggaaaatgggctggcgcctcattgagccaggttgacgcagtaccatgccttataattgataatgtacgcacttttgtgttttttttcaatcattgtctcaaatgaactagcagcttcgatacgccagttcacactattgtaaatttgtaatgcgtatcgaaggtagtgtgattcacccgaaaggattttataggaatcatccaaattgacatgttactatggtgtatgaaactctatttttatctcgagattttgttggagtgtactgcctttctaggtcactattgttctctctgtacacacacataatactaaaacgtgccttgcacgtgcacgataactagtatatatagagaaccagtttgacatcgaatggtttggagaatagaactgaacaaaaatgaatgtccaaaaagaattgaactcgtcgtggcatggatgaaattttctcacaggtttctctcagtggtcaatggatggagtatgactgagttttccatggtcgatttggttggttgcatgaagaaaggcaccgagcataagaagcagttgttctctgaactagtagttttctccgagtatgagatagttttatcagtatagttttgacccttgcaatagttggatcacgagccagccaccggttgtaccgtccttagcattgctggtaagatacttgtaagagcttgataagatatttctatttgttagcctccattacaatccatattttgtagttaatagggataatactattatgttgttctctgttttctacagacaatggcaggtattctacagacaatgagaaaaagttagatgggggacaaaccataattgctacatcattgcagagggaagggcgccgccgttgcctctatatggggagcctgccacttcccctccagccagatctggcggatcagagagggtcatcgccatcgcctggatccgtcggctaggagagcagagtagtcatctctgttgccgccacggtggggaggaggcacggtggaggcaggtggggagaggccgcggtagggggcgggtgggagtgtgtctaggatgtggaggacggaggagaagggggtgagtgcggcagcagtgtggaggagaactgtggggataatgctgactgggagcagataaggttggttggttcggtcggcaccttctggtttttttagtaggtgttcatttttaaataaactaatacctataatatgagtgtatgtgtaggttcgtaaaaactgggacctataatatattataggtgtcggctcttctgactgatagtaatactataggtgccgatttttatcgagggtgcatgtgtgggcagaaaaagcactataggtgctggttttagctatcctgacacctataataccatcttctttgtttctctctgtagtagggaatgtcattactattactttgtcacaatgttagtttactttatgtatttctaaataaatattcatatatgtatgttgctgatgccatgggtagggaagcaaagaaataacaagctttatgttgtgcactgattcttttcacatc

SEQ ID NO: 18855 - DNA, 667 bp, Oryza sativa
  ref <308>: DATABASE ACCESSION NUMBER: AK069236
  ref <309>: DATABASE ENTRY DATE: 2001-12-06
gacggactttgaattcagttagcaatgccatgagacaggcagagagagagagagagagagagagagagagagagagagagagatgtgatgctaattttccatttcatgtaagttagcttttcataattagatcaagttttctctacttaatttggtgccctttttgcttacgtttttttttcgctgggaggttttgcttacttaatttaagtgcctgctagtttctttttgctagtccagctagccactgcatacttaaattttatatctgccactgtcagctccaattatttgtcgtttgttttttcaaacaacagtctgcatgcatttcggcatcaatagaggaccatcactgtgtagctcgatcattgtagctcatgaaattgatgtctcttccgtaaaggcgtcttcacttttttctcttaccatgcatatcatgcatcaaggctaaaaaggaattcaaccttttccattttgctttgcttagtactacagtaccatgtagggctcctcgcatgcatgacaagaaatgcagcaagattgtggtgttgagtttgaatactcaatgggagcagtatatagccgatcttgatgaatttatcatcacggaatgtgtctatgtttttcttttttgaaataatcaatgttaagtgcattcagatttttc

SEQ ID NO: 18856 - DNA, 1800 bp, Oryza sativa
  ref <308>: DATABASE ACCESSION NUMBER: AK069237
  ref <309>: DATABASE ENTRY DATE: 2001-12-06
gccccctctccgccatctccaacgccgcctcctcctcctcctcctcaaccccacccacctcgccgccgccgccgtcgccgccgccgccgccgccatgagggagatcctgcacatccaggggggccaatgcgggaaccagatcggggccaagttctgggaggtgatctgcgacgagcacgggatcgaccacaccggcaagtactccggcgactccgacctccagctcgagcggatcaacgtctactacaacgaggccagcggcggccgctacgtgccccgcgccgtgctcatggacctcgagcccggcaccatggactccgtccgctccggcccctatggccagatcttccgccccgacaacttcgtcttcggccagtccggcgccggcaacaactgggccaagggccactacaccgagggcgccgagctcatcgactccgtcctcgacgtcgtccgcaaggaggccgagaactgcgactgcctccaagggttccaggtttgccactcgctgggaggaggaactggctccgggatgggaaccctgctcatctccaagatcagggaggagtaccctgaccggatgatgctcacgttctcggtcttcccatcgcccaaggtgtccgacactgtcgtcgagccctacaatgctaccctctctgtgcaccagcttgttgagaatgcggatgagtgcatggttcttgacaatgaggctctctacgacatctgcttccgcacgctcaagctcgcgacacctactttcggtgatctcaaccatcttatctctgcaacaatgagtggtgttacctgctgcctccgcttccctggccagttgaactctgacctccggaagcttgctgtcaacctgatccctttcccgcggctccacttcttcatggttggattcgctcctctgacttccaggggatcccagcagtaccgtgccctcactgtaccagagctgacccagcagatgtgggatgcaaagaacatgatgtgtgctgctgacccccgccatgggcgctacctcacagcctcagccatgttccgcggaaagatgagcaccaaggaagttgatgagcagatgctgaatgtccagaacaagaactcgtcatactttgtggagtggatccctaacaatgtcaagtcgagtgtgtgtgacattccacccattggcctgaagatggcatccacattcatcggcaactcgacctcaatccaggagatgttccgccgtgtcagtgagcagttcaccgccatgttcaggaggaaggctttcttgcactggtacactggtgagggaatggacgagatggagttcaccgaggctgagagcaacatgaacgacctggtagctgaataccagcagtaccaggatgccaccgctgaggaagaggactatgaggaggaagaggaggacgaggaggttgctgcctaagccacctctctgcatgtttgagctatatagatatcccttgtgacatttgctactactagttaccatcgttgattgggggtgcttgttagatgctaggttaatgttattatttccaaatactatgttgccttgtcggactatttttatctgggttaatggtatgttcaacattattgtcttgaggtggattaactgttggaagtatgtagcaaagcttgaggtggaatgcatatgaaactgaactttagctttgcagggcttattggaccacctctgcgtgtttgaactaaaatgccacctccgacgacgccctgggttatcaacttgattataaaataaatattttagaaaatgtttttttttgg

SEQ ID NO: 18857 - DNA, 2542 bp, Oryza sativa
  ref <308>: DATABASE ACCESSION NUMBER: AK069238
  ref <309>: DATABASE ENTRY DATE: 2001-12-06
gattgtattgtacacacgatggagtggtcgtcgatgcggtggtggtgcctcgccgtggtgctcctcctgtccacgccgctgctcgccgcgggttacctgcaggagaggaagaactacatcgtgcacctcgagccgagggacgaggccgccgccgccgctggcgacgcctccgtcgaggagtggcaccgctcgttcctgccgcaggtggccaagctcgattccgactccgacggcgccgacggaggcccgcgcattgtgtactcctacagcgacgtgttcaccgggttcgccgcgcggctcacggacgaggaggccgaggcggtgagggccacggcggggtgcctcaggctgtaccccgaggagttcctgccgctggcgacgacgcgctcgccggggttccttgggctccacctcgggaacgaggcgttctggagccactcggggtttggccgcggcgtcgtgattgggatcttggacaccgggatcctgcccagccacccgtcgttcggcgacgacggcctccagccgccgcccaagaactggaagggcacgtgtgagttcaaggcgatcgccggcggcggatgcaacaacaagatcatcggcgcccgcgcgttcgggagcgccgcggtgaactcgtcggcgccgccggtggacgacgcggggcacggcacgcacacggccagcacggccgcgggcaacttcgtggagaacgccaatgtccggggcaacgccgacggcacggcctccgggatggcgccgcacgcgcacctcgcgatatacaaggtgtgcacccgcagccgctgctccatcatggacatcatcgccgggctggacgccgccgtgaaggacggcgtcgacgtgctgtcattctccatcggcgcgtcctccggcacgcagttcaactacgaccccatcgccatcgccgggttcaaggccatggagcgtggcatcgtcgtcagctgcgccgcgggcaactccggcccggaccccggcacggtcggcaacggcgcgccgtggatgctcaccgtcgcggccggcaccatggaccgcgcgatacgcaccaccgtgaggctcggtaacggcgacgaattcgacggcgagtcactgttccagccggggaacaactccgccgcgaacccgctcccgctcgtgtaccccggcgcagacggctccgacacaagccgcgactgcagcgtgctccgcgacgccgaggtgaccggcaaggtggtgctctgcgagagcagaggcctgaacggccgcatcgaggccggccagaccgtggcggcgtacggcggcgccggcatcatcgtgatgaacagagcagccgaggggtacaccaccttcgccgacgcgcacgtgctcccggcgtcgcacgtcagcttcgacgccgggaccaaaatcgcggcgtacgtgaactccacggacaacccgacggcgagcatcgcgttcaaggggacggtgattggctcgtccccgtcgccggccgtcaccttcttctcgtcgcgtgggccaagcaaggccagcccgggcatcctgaagccggacatcaccgggcccggcatgaacatcctcgccgcgtgggcgccgagcgagtcgcacacggagttctccgacggcgtcggcctctccttcttcgtcgagtccggcacgtccatgtcgacgcctcacctgagcggcattgccgctctcctcaagagcctccacccggactggtcccccgcggcgatcaagtcggcgatcatgacgacgtcggacgccgtggaccgcaccggcgtccccatcaaggacgagcaataccgccacgccaccttctacgccatgggcgccggctacgtcaacccggcgctcgcgttcgaccccggcctagtctacgacctccacgccgacgactacatcccctacctctgcgggctggggatcggagacgacggcgtgaaggagatagcccaccggccggtcacctgctccgacgtcaagaccatcaccgaggcagagctcaactacccatccctcgtcgtcaacctgctcgcgcagccgatcacggtgaaccggacggtgaccaacgtcgggaagcccagttccgtgtacacggccgtcgtcgacatgcccaaggacgtgtccgtgatcgtgcagccgccgatgcttcggttcacggagctgaaggagatgcagagcttcaccgtgacggtgcggtgggccggccagccgaacgtcgccggcgccgagggcaacctgaagtgggtctcggacgaacacatcgtgaggagccccatcatcatcccagccacggccgcgtagtaattttttgcaacttcagcatgtacagtatgtcagtaaatagctaagatcaataaagatccatcaccttggtttgacctgtgttctgttggtcaagatgtgaagaatgtagcactccttgactagttggccgatcctgtcaactttgacagctactactggagtactactaattaatttccatcttattcatcagaaactatacatcagagattatcattaatagatgagtcaatgctcattc

SEQ ID NO: 18858 - DNA, 786 bp, Oryza sativa
  ref <308>: DATABASE ACCESSION NUMBER: AK069239
  ref <309>: DATABASE ENTRY DATE: 2001-12-06
gaggctgcgagcgaagccgagccgttttcttccccatcgatcaaggcgatcggcggccatggaggccaagatcgggaggctcgtcggcgccataggcgccttcttctccggcggcgacaacgtcccgtggtgcggccgcgacatcatcgctggtgtcgagagagaggtcgcggaggccgcaaccgaagaacacaagaacgtgagcatcatgaggctatcctgggccctcgtccactcgaggaacacggacgatgtcaaccgtgggatcgccatgctccaagcatctttgggtggctccaagagtccactggaggcaagggagaagctctacttgctggctgttgggcattacaggaatggtgactatcccaggagccggcagcttcttgaacactgtttggagattcaacctggctgggggcaggccctgtctttgaagaagacagttgaagataaaattgctaaagatggtgtgattggcataggtatagccacaacagctgttggactgctggttgggatagctgctgctgttgctcggaagaactgaggcatagcggttccagattgatttatgggaattgagatttctgtcgtcagatactcttttatgctggtgacatttttgttcaagttctagtctgcaagaattccctctttattgacacaatttaaggtagtatgatacagtatgctccgaatgctttacaatctcacctccatctcataattctctatcggacaatattttccacgtgatctttcagaattgagatcaatcaatcc

SEQ ID NO: 18859 - DNA, 3557 bp, Oryza sativa
  ref <308>: DATABASE ACCESSION NUMBER: AK069240
  ref <309>: DATABASE ENTRY DATE: 2001-12-06
gtccgccgccgttgccgccgcggccgcgccgctgcggcgttcgctccttccctccctcaacccgagctgtctcttctcctccctcgcgtcctcctcgcaccgcctatctctaccgcgcgccctccgccccgcgggccctttgccctccgatgtcgaagactcggacgattcgaatgccggagacggcgccggcgaggccctcaggaagagccgcaacgacctgaaacgggaggctcgtcgcgccgtgcagtggggtatggacctcgctaagttctcccctccccagatcaagcgcatcctcagggctgcgtcgctagatcgcgaggtgttcgacgctctcatgctcgtgaagagatttggatcagatgtgcgggaaggaaaaaggaggcagttcaactatatcggtatctttacttactgggttaattggattcatgccactgcaaatatgtcaattcaaaaaaatgtcactactattcagtatatcggctacgtggcactgaaaattgtggaaattggatccatgccactccatcacgttttccgtcaaaaatctttattagcccccagctgcacgtgggccccacctcccttccctctcttctctttcctcttcctctctctccaccaccgtagatgcggcaggaggtgtcgtctccgtcgtctccatcattgtcttagagaggtcgggccaggctgcgcctgcgtcgtcgttgttgtcgagcacctcgtctcggagccggtgagccacgcggtctctgtcaccgttcaagggaggaggaggtggtggtggaggaggcatcaccgacgactgagtacccatccttgccaccgttgccgaggacctccatgatgcgcggctaaggcagcggcagctagaggggtgcgctatcagcaaggaccctctcctcaattaatccatcgctagtacgctgctctgatggctcgcttcgccgtcgtcgccatcatcgtcaccctcctcgccgtcacggccgctgtgcaggccccgggagtggcccccatcccggcacccaagatggccccgctgcctgctcccccgacgaggtccccggccaccgcttcctccatcccggcaaaggacaagagtccatggtgcaacagtcacaacaatggcagagcaagcaacagtagtcgcggcacgagcaatttcggtggcggtggcaaaagctcatcgtgatagtggcgaggtctcagtccatcgtcatttttggcttgatgggacaagcagcactgcatcagtcggcatggtggacaagcagcagtcacaataacgaccggggacctcgtcggcatggtgggctaaactaagccctttggtttgagaaaaaccgatccttgtttcaccgaggaaaagagagaaattctgtataaattgacaatgctgacttgaattgactaattcagttccgcctattccacattaatgggagtacatttatgtttctgcttcacgaatataatattttttgggcatttctaataatagcaagccttattcctattttagcattttggatttcagcacttttaagctccggttcgtgaaggaccagagaagctttctagttatgaatcgggtatagaacccatgggggggggcttggttacaattctgaatacgctattacatgtttgcgctagtttttgttgtttttgatgtggaaacggtctttctctacccttgggcaatgagtttcgacgtattgggtatatccgtttttatcgaagctttcatttttgtgcttatcctagttgttggtttagtttatgcatggcgaaaaggagccttggaatggtcttaactgaatattcagacaaaaaaaaaagaaggattgcttctcttccagggaagtttcattttcccagaatgtatcctaatttttggcctaattctgatgatcgatttaatctctgatcaaaaagatagaccttggttctatttcatctcttcaacaagtttagtaataagcataacggccctattgttccgatggagagaagaacctataattagcttttcgggaaatttccaaacgaacaatttcaacgaaatctttcaatttcttattttattatgttcaactttatgtattcctctatcagtagagtacattgaatgtacagaaatggcagcagtctcctccgactccgcccactgatgccctagacaccaatgctccctccgcccttgccttgtctgcggtcacccccaccgcctctgcagtctgcaccgaccggcgctcccaccggcgcccccgcgagctcctctgcattcaccaccaccggtgctcccatcgcggggatgaaggaagagatggggaagaaagaagaggaataatggaggaagatagaactgacatgtgggtcccacgtccaggagggtgacggaaaacgtgatggagtggcacggttcaaaattttcaaatttctagtggcgataagggatcgcccaggatcgggtggaaggtcggagaagccagtcttcaggtccatatttttggaaaaactgtgatgtctggagttgtaatgatataggtcctagaaatttggctggctacgttacttataaccgcagaacgagcaatgaatccccaacgacaaacgaacgtgcaacaattcctgcacccgcaactccatcctgcaagttcagtgctccatcagtgttcagtttcatccatcccaaagcaggtcgagcccacttctgaaccacagccgatggcctgaacgacaccttctgcagactctactggtggtattccccgaggcgacctatatccccaccaatgtgatctccattacagatggacaaatctgtttggaaacagagctcttttatcgcggaattagacctgctattaacgttggattatccgtcagtcgcgtcgggtctgccgcttagttgaaagctatgaaacaagtctgcggtagttcaaaactgggtacctcaaagtttatagttctaagctgaagaaatagcctgagtcaatttatcttctttacaacctccaaacaaacagaaagactaacgccgaaagatatgttttgaagagagctccatcgggttgaagccgaattgcagagaatcaagatcttctacctttgcggagggacttgaattattacttctatttacttgatttgctggggaagaaaatcattaaaataccactaagtaaggccgggcaagtgcaagtcccgataacgggaagaaatgcctaccaagtgaaagaaagagatcgcaatggtctaagatatagtcagtgaacaataactcagggtagccgatatactgaatagtagtggtattttttctaattgtcatatttgcagtggcatagatccaattaacccttacttctttcgttgatgctacagttattcccatccattcttttagttgccaactagacattgttatcttttttaaatgaattatttatgagattttgtcatcttgtaatacatatgtaatgtcttctggtagtgtaagttggaaaaattagtggcatatatgagaatggacattcattagtggt

SEQ ID NO: 18860 - DNA, 2094 bp, Oryza sativa
  ref <308>: DATABASE ACCESSION NUMBER: AK069241
  ref <309>: DATABASE ENTRY DATE: 2001-12-06
ggtagcttggcgcgcgacggacggatcgatcatcggccgatgcatgcatgggcgcctgtgttctgagccagcatgcggccagctgcatcgtcgtcctcctcctcctctcgcgaccggctgacgatcagccggccgacggagaaggacgacgtcgtagaagagaagagggacggcggcgacgtgacggcggccgtgccgaggctggcggtgtacggcgccggccgcgtgcacgagatcgagcggttctcgcactacgttgctaagcagatagggattgaggatgtgagcgagtgcccccacctttgtgcactagcttacggttatctgaagaagactgagggttatgaacaaaacctactcgcgttcttccataacaaaataaactcggacgctcttctcgtgctgttgattgaggagctagacaaatgtatactcggctacttctccttccattggaaatttgccactgaagtaatcacacaggttctaacagcagagcagcctagaagaaagctcaaaaccatggtgttagaagccactagaaagatgaggtttgagagggtgtcaaggaagctgaaggtgacgaggctgttctccacgctggtggaggaactgaaggtcatcggggtcacctgcaacgacggccagctgcgcgacgccgacgccgacgtgatggtcccggcggctcaccgcgaccgcagcccggtcctgctcctgatgggcggtggcatgggcgccggcaagagcaccgtgctcaagcagatcatgaaggggttgttctggtccggcgcggcggcgcacgccgtggtggtggaggcggacgcgttcaaggagtcggacgtcatctaccaggccatcagctcgcgcggccaccacaacgacatgctgcagacagccgagctggtgcaccagtcgtcgatcgacgcggcggcgtcgctgctggtgacggcgctgaacgaggggcgggacgtgatcatggacggcacgctgtcgtgggagccgttcgtgctgcagacgatcgccatggcgcggtccgtgcaccggcagcggtaccggatgggcgtgggctacaaggtcgccgccgacggcaacgccaccgagcagtactgggagcccgtcgagggcgcccccgtgcccagcgggaggaggccctaccgaatcgagctcgtcggcatcatctgcgacgcctacctcgccgtcgtcagggggatcaggcgagccatcatatcggggcgagccgtgcgggtgagctcgcagctcaagtcgcacaagcggttcgccggctcgttccgcaagtactgcgacctcgtcgacagcgccagcctctacagcaccaacaccatcgccggcgcgaagttgatcgggtggaaggacgtggggagcaggctgctggtggacgtggaggagatcgggctgctggacagggtgagcaggatcaacgaggaggccaacggcgtgcacgagctgtacccggacggccacccgacggacggcgccgggtcggtgtgggaggatctggtgtcgtcgccggccagggccgcgatacagcgggagctcagggaggccatcctcgatagcgaggcctgcttcccgtcgccgtaggctgcacagcagcaagaggctatgtaccgatgcagatttgttggttcgttcgttcacgttcgctcacgacacgatcgtactatacgtgtcgtggtgacgtagtaggtaggggtgatctctttgtttttccgtacaccaactctactgtttgatgatggtatcgacgttgactagtcgaccgatgccatccgtcggcgatggacttttcgggaatcgtgacatctgtcacgtgctgatgcgctgatggggccatcttacacaggcagccctcgacgcttagggccatcttccttgaagaggttagaaacgtattaggcctgaaaaggggcccgagtacagcgctgcaagagaaaagaaggtagcagcaacagcatttcggccctgtttcgctatttgaaatgcatgattttttttattttatttttgtgaggattgaaatgcaggattttttttactttggtcaaacattgacatcatactgtatctcacacg

SEQ ID NO: 18861 - DNA, 1089 bp, Oryza sativa
  ref <308>: DATABASE ACCESSION NUMBER: AK069242
  ref <309>: DATABASE ENTRY DATE: 2001-12-06
ggcttttctttgctttcctctcctctctcgccgcccacctcgccgtcgccgccgccgcgagggccaacgccggcgaagtccgcgagccgaagcatcacacagctgcgccagcgatgtcggtggagacggagcggagctccacggagtcgtccgccgcgtcggggctcgacttcgaggacaccgccctcaccctccgcctcccgggctccctcgccgccgccgccgcacctgaccccgaccgcaagcgctcctccccctcctcctccgacgccgccgacgccgcagacaactcctcccccctcgccgccgccgccgatgctccccctgctcccaaggcgagggtggtggggtggccgccggtgaggtcgttcaggaagaacgcgctggcggccaagttcgtgaaggtggccgtggacggcgcgccgtacctgcgcaaggtggacctcgaggcctactccggctacgaccagctcctccgcgcgctccaggacaagttcttctcccacttcaccatccggaagttcgccgacgacgagaggaagctggtggacgcggtgaacgggacggagtacgtgccgacgtacgaggacaaggacggcgactggatgctcgtcggcgacgtcccctggaagatgtttgtggaaacttgccagcgccttcgtctcatgaaaagctcagaggctgtcaacttagcaccaagagccgctcaatgaggcattcccggtgcccatgaccgtgtggttggattgaaagaaagtggaagctttgccccgccgatgttcgcccacgtgtgatatgaacatgtacagttgtctcctactacttttggttccttgatgatgctgagttgagaaaaaggttgtagtttcgttactcgtctgtagtctctccatatatagataatgaagcactgaagcttgaaatatacacctacagtttgtctctttatgaataagaccatatacgcaaaaaaaccgatgttctttgctgcggctcgcgtgtcgtcaggctatatgcagttttttgtcgcaccataggcgatggacatctctggccttatactttcgtaaaaatcttatcatgttaagc

SEQ ID NO: 18862 - DNA, 2696 bp, Oryza sativa
  ref <308>: DATABASE ACCESSION NUMBER: AK069243
  ref <309>: DATABASE ENTRY DATE: 2001-12-06
ggcgagtagagacctggccctcctccccttttctctctctgttccgcgcggcgagataattcggttgcttctccccgcggccgcggcggcatctctcccggcggcggcggagctcacgtccttcgcggcgaactgcgctccaggcagcgggaccagaggggatgggggaccgcgccgcggggagcggcggcgggggagggggaggaagcggcgtgcggagggtaggggactacgtgctggtgcggcagatcgggtcgggggcgtacgcgcgggtctggctcgggaagcaccgcacgcgggcacggaggtggccttgaaggagatcgccgtggagcggcttagcagcaagctccgcgagagcctcctctccgaggtcgacatcctccggcgcatccgtcatcccaacgtcatcgccctccacgagtccatcagggatggtgggaaaatatatcttgtattagagtactgtcgaggtggtgacttacactcataccttcagcagcataaaagggtttctgaaacagttgctaagcatttcatccagcagctagcatctggtctgcagatgctgcgtgaaaacaacgtggttcatcgagatctaaaaccacagaacattcttctagttgcaaataatgaaaattccctcttgaagattgcggactttggatttgcaaagtttttagaaccttcttctctggctgaaacactttgcggttcaccgctttacatggctccagaagtcatgcaagctcagaagtatgatgcaaaggcagatttgtggagtgttggtataattctatatcaacttgttaccggatctcctccttttaccggggatagtcaaatccagttgctgagaaatatactcaatacacgagaaatacgatttccatctgattgcgacttgagccatggctgcattgacttatgcagaaagttactgcgaatcaattcagtggaacgccttaccgttgaagagtttgtgaaccatccatttctcgctgaacatgctttggagagaaccttgagccggacaccatcggacataagagatggctttccattcattaatagcagtcctacgagaccttcaagccaaagttctcaggaagattgtatgccttttcctttggatgatgagtcaactggacaggatgaaggtcctgtttctgatagtaagagtgcaataaaatcctatgggtttgccacgagtaaaaggcttgataaaacttcaggtcagagtccaacgagacattcaagtctggtctctaaatatattaggggaaataattacgcatctagtagtcaacgcctggaccatcctaggagaatcaaggaaaacaagggtgatgaagggcacaaccctaaaggtggttatccagaagattcccctatcattgattcattagagtttgtagatcaggaatatgtctttgtgcacccagagggatcctcctcttcgatgaatgactcccgacagcgcaccatgccatcaaaacttgacagttcttctctttcaccaccgaagttattaactgctgtgagtgcaccaaggccaatacatggcatggcaattaacagacagcaatctggtggaactggtagcttggacagtcactgctctccagtatctggtacttcacaaggatctgcagatctcaacgatgctatggatcaaccaccatctgattgtctgaccagggttagattattggagcagtatgcgtctaccatagcagaattggtgaaagaaaagattaaagatgccaagcacttagagggattctcgattcagctagttgttcttgcaacctggaagcaagcaatttacatctgcacttcttatgcatcttctgccacaagagagaatccttcccatgatgtcaccgcgaagggttttggctcaaatgctccccatttgcttgcaaactctcaactgttatatgatacatgcatggagatagagagtcagtttttggttcaaatggaatatgctgaagaacttgccaacactataggacagacagttgatgctacagaaatgccagatgcgatagaaatcatatttcagaccgcgcttaacctgggaagacatggtggtgttgatgagatgatggggaaatcagcatctgccatggtgctgtactcgaaggcagtatccatgctgcgctttctcctgactgaggcaccgtcactcgccctgaaccccgctctgtccctaacaagagatgatcgacgccgcctgcgcacatacattgaagccgttaacgctaggctcgtcccgttgcaataccagcggcactgaccgctcacctgtacaatattctttcatcctgtacatatattcgttggcccaaacgagggcgtgtaagatatgtcatgtctgagaacgtgctccgattagggagaagtagcgaaaaatccagtgtaacttgcccaaactgcctactgtaacgtgagctcggtgtgcttgcatggtacgcctgattatcaggcagctcaggttggcagctggaggcccgaccatggtcgtttgtggacatgtaaagcagactgctacctcgatggtttgttcattaaaatttgggcttttacactgcatatgttgtccaagtcatcgttgattttgagttgtgctgtctaacttgtccaagtcctgttaattatgaattgaatttgtgtgtgtgttttttctc

SEQ ID NO: 18863 - DNA, 1356 bp, Oryza sativa
  ref <308>: DATABASE ACCESSION NUMBER: AK069244
  ref <309>: DATABASE ENTRY DATE: 2001-12-06
gggaggagacgcgcgcgcgcaggttcagatagtttcaggcttgggaggaaggaaggagaggcagagagagaatttttgtctgagagaattcagatttcagagagataattttcgtctgaagaattgtgtatcgatcgatgtctggtggtgtgatcagcatggtggtcgcgccatggattctcgcttgcgggttcttgctctgctcatcctccttcctcggagctgaaggcgccattggtgtgaactacggcatgctggggaacaacctgccgtcgccggcgcaggtgatctccatgtacaaggccaagaacatcaactacgtccgcctcttccacccggacaccgccgtcctcgccgcgctccgcaactccggcatcggcgtcgtcctcggcacgtacaacgaggacctcgcccgcctcgcctccgacccctcgtttgccgcctcctgggtcagctcctacgtccagcccttcgccggcgccgtcagcttccgctacatcaacgccggcaacgaggtcatccccggcgaccccgccgccaacgtcctcccggccatgcgcaacctcgacgccgcgctcaaggccgccgggatcagcggcatcccggtcaccaccgccgtcgccacgtccgtgctcggcgtctcgtacccgccgtcgcagggcgcgttctcggaggcggcgtcgccgtacatggcgccgatcgtcgcctacctcgcgtccaggggcgcgccgctgctggtgaacgtgtacccctacttcgcgtacgccgcggacgcggagcgcgtgcagctcgggtacgcgctgctgtcggcgtcgcagtcggcgtcggtgaccgacggcggcgtgacatacaccaacatgttcgacgcgatcgtggacgcggcgcacgcggcggtggagaaggcgacgggcgggcaggcggtggagctggtggtgtcggagaccggctggccgtccggtggcggcggcgtgggcgccaccgtggagaacgcggcggcgtacaacaacaacctgatccgccacgtctccggcggcgccgggacgccgcggcggccggggaagccggtggagacgtacctgttcgccatgttcaacgagaaccagaagcccgagggcgtggagcagcatttcggcctcttccagcccgacatgaccgaagtctaccatgtcgacttcgcggcctccagctagattaggcccggcccatttcacatttctttctttcagctgctgctactattttattatttgtcggatacagtattttcgtagtttcggttcgatctcatgtcaccggtgctctgatttggattcattgttcatttgttgtcgatgcacattggagtatgatttattc

SEQ ID NO: 18864 - DNA, 2826 bp, Oryza sativa
  ref <308>: DATABASE ACCESSION NUMBER: AK069245
  ref <309>: DATABASE ENTRY DATE: 2001-12-06
gacggtcaagtctcctcctcttcctcatcccccctcgacaactagcccaccgccaccgccaccgccgccgagggcgatccgatatgcatttgctgctcccgtagaaggcgcgcgtcgcagcaatggaggcggaggacgacgagcgagccgaggcggaggcggaggcgcggcgggagaaggaggccggcaacgccgcctaccgcaagctctacctcgagacggccgtgcgccactacacccgcggcgccctcctcgacccccgcgacatctccttcctcaccaaccgcgccgccgcctacctcctcatgtccaagtacaaggagtgcgtgagggattgcgacgaggcggtggagaaggggcgggagctacgcgccgacaacaagctggtcgcgcgggcgctggcgaggaaggcgtcggcgctgctcaagctcgccgcctgcgccgcggactacgacccggcgatcagggcgctgcagcagtcgctggccgagcactacagcgaggagacgctcgccaagctgggcgaggcggaggaagccaggaaggagattgaggagcgggagcggcttgatcaggaagctgccgatcaccaccgagacagaggcaacgatttcttcaagcagaaaaggtaccaggaagcagcaatgcactatactgaagccatgaaaaagaacccaaaagatcccagggtttttagcaacagagcccaatgccacatctacctaggagcattgcctgaaggtcttgaagatgcagataaatgcatagcgttggatcctacttttctgaaaggctatctgcgtaaagctaaagttcagttacttatgggcaattatgaaattgctctggcaacttatgtagagggtttgaagtgtgacccaaacaacctcgaagttcttgatggcttaaggagatgtgcagcatgcattaaaagagctaatggcggtgattctagagcagaggacttgagagagatactgggagatttgcatttgaatgatgatctgtgtaataaacttcaaaaaagcatggatgaagctgcggtgttgaagaaggaagcatccgacgagcgcttaaagcggattgaatctgaacgattggccaggacattggaagatttgtatttaagccaggtccaacaaaggaaagaaacagaggaatctctttcaagggtacaacaagagtttgaacaacttaaaatacagcaagatgaggtcaccgtggaacttcagagagtcaatgagcagaatgagaatctactaggtcaactctcagactccagagagcattttgaatggcttctatctgagcatgaccaattgctacgtgaacgagataatgcagttcgagaggttgaagaactacgtcagaaaagaggacagatgctttcagttttggttacagcgatgcactgtgaattttcatcatctgaagtggaatctgcaacagaaaattttagtaattcattgaagattggagaaggtgggtttggctgcgtatacaaaggtatcctccggaacatgacagttgcaataaaggtgctgagacctgatagtttacagggacaatcacagttcgaacaagaggtttctatcctcagtagagtgagacaccctcaccttgtgactctcttaggagcttgctcagagtcttcaacactcgtatacgagttcctgccaaatggaagcctagaagattttcttatgtgttcagataagaggcaaactctgacgtggcaggctcggattcgaattattgctgagatatgttcagcactaatctttctgcataagaataaacctcacccagttgttcatggagatctcaagcctgctaacattctccttggtgttaacttagtcagtaagcttagtgactttggtatttctcgcctcctaatccagtccagcaccaataacaccaccctgtaccgcaccatgcatcctgtgggcacccctctgtacatggacccagaatttctttccactggagagttgacacctcagtctgatgtttattcatttggtattgtagtcttgcgtcttttaacaggaaagcctcctgttggtataaagaatatcgtggaggatgcaatggagaaaggtgacttgaactcagtaattgatacctcagtgggagagtggcctcatctgcacatcgagcagctggcataccttgctctcagatgcactgagttaagcaggaggtgccgccctgatctttcaggtgaggtgtgggcaatagttgaggctataagggatgctgcattatcttcaccttcatcctctagatcagcacaggatcaaaacagtccaccgtcatatttcatctgtcctatatctcaggatatcatggatgatcctcacattgcagcagatggattcacctatgaagctgaggcaatcaggagttggctctgcaatggccatgacacgtctccaatgaccaacttgctacttgaacatgaggagctcattccgaatcgcgcactgcgttctgctattcaggagtggctccagcagcacagcatgtcgctgtagccaactgccctccatgtgtgaagcaagtgagcaagtggtaccaattggcaactgtatagtatttgggtaaattcggacatccccccttctgatgcaatttcggtatgccttctttattcaggtatgtatttcgtagtagcatgtaatgtaaaggcagtgttgggtaaaacctgttaacttggatagcaaggacaaaagctctatgtcggtatgcctatcactcctaagggcatcccatgcgttcttctgcctttgaacttaatcttatccaagtttgattatgttc

SEQ ID NO: 18865 - DNA, 2268 bp, Oryza sativa
  ref <308>: DATABASE ACCESSION NUMBER: AK069246
  ref <309>: DATABASE ENTRY DATE: 2001-12-06
ggccgttcctcagtggccacctaacccaactaccttgaaggacacacactccacagtggaggaggccaaggatttgctaggctaggaccacacttgccgttcctaggtacctcattgtttttgatgatatctggagtacaaaaatgtgggagaatctgatgtcagttctacctagaaacaacaagaaaagcagagtaattactacaactcgcatgtccaatgttgcgagctcacgttctccccggtccaatggtcatatctatgaaatggaatctttaaatgatgctgactccaaagagttattttctaaaatcatttttgaccacaagggtaaatgtccaaaggcattggacgaaatagccgatgaaattttgaaaaagtgtggtggcataccgttggccataattacgttagctagtttgcttgctaaaaaaccaaaaacaaggaaagagtggaagagagtgaaaagttctattggcaatgcatgtgaactagaagggatgagacagacattatcccttagcttttatgacctgtcttatgatcttagaaactgtttcctatcatttagctccttcccagaggattatgaaattgatagagagagattggtactgagatggattgctgaaggattcatttcggggaaagaacaacaggaattaatggaggaagaaggaaacaactactttaatgagctagttaataggagtctgattcagccaattgatattcaatataatggttctgcacgagcttgtcgagtccatgatctgatgcttgagcttatagtgtccctgtcaaaagaagagaattttatcactacattgaatggaccggagtgtctacctatgccgagcaaaattcgatggttatctctccattccaacgaaaatgaagtaatgcaggtggtcacaaataatcgtcgccatgttcggtctgtgagtttcttcccgcctgttgcacagttgcctccttttgttgaattccaagctatgcgggtttttgatgtaaaaggctgtcagtttggggagcacaaaaaaatgaaaaacatggaaagtttaattcagttgaagtatctgaatttggcatataccaatgtgacagaacttccaaaagaaattggggaggttcatttcttagagactcttgatgttagaaattgtcaaatacaaagtttaccaccatcattatgccaactgcagaagttggtgcgactttttgtcagccttggagtcacattgccagataagattgggaagatgcaagcattggaggagctatcacatgttgccatcttatgcaactctttgaattttgtgaaggcactaggggagctgaccaaactgagagtgttccgagtagattgccggtattcatggcttaacgggaagaaacaagccccaaggcaatcagtcagcacgcatgaagatgttttgttgtcatctctgcaaaatttgttaaaaaagaagaatcttcgatcactagagatcgaccttacaaatggttcttccttggtgttttcattgatgaatccatactgtcctcttccccaactcgaagaacttgtcatttccaattccatttccagagttccaaggagcatgagatcgctgaaggacgttatccatttggaaatcaagcttgataggatggaagaagaagatctccatatcatcagagacatgtctcattcactgctttttctaaaaatccacttggaaataaccccagaagagaggcttatcattgactccgagggatttgagtgtctgaagcaatttgagttttgctgtgttggaatggggctgaaatttgtgcaaggggctatgccagatctcgagaagcttgatcttgatattggggttcgaaagaccatgtccaagtatggcggtttcgactttggcatcaagaatcttgaagcactcaaacatgttggtgtcaaacttgattgtcaatatgctgaaaatcgggagatccagtctgcagaggctactatcaggagtggagtccttccaagacgtataatgccacaaattcaaaggattggtgtgaacagatgaactttcttccagaaatagttgaatgctactgctttggtatttgcagggaactcattggattcgattctaggccctattgtgaaagtgtgatgagagacaaataacagatgcaacacacatcgttatttatggatgatggttatgcaactctttgttaatcatcatatatgaaaatttagctgcttttaataatgtcatgtcatct

SEQ ID NO: 18866 - DNA, 1807 bp, Oryza sativa
  ref <308>: DATABASE ACCESSION NUMBER: AK069247
  ref <309>: DATABASE ENTRY DATE: 2001-12-06
gcgtggattgatttgggtgacatggtgcaacaccatagggccaccctcctgctgcaccagcagcagaggaaaggggatgcgacggcagaggaggggcagcagctggtggccgaggaaggagccggcaagatgaaggagctccggcgccggctcgtggactacgcgtgccaccaccggaagcacggccacgacgcgctgctgcggatgctcgcggggttcgcgcttgtctcctgcctgctgctgctgctgccagggagccctttctcagccgcggtcgacgacctgctgcagatggggaggacgcgcctggacgacgagacgccgccgccgccgccgtgcgcggccgtgtccaacggcaccatctgctgcgaccgcaccgccatgcgtacggacgtgtgcatcatgcgcggggacgtccggacggaggccgcttccaattctctcttcttgctcgtgccgccgccggacaattccaccgccgccgctggccgggacgagcgcatccgcccttacacccggaagtgggagtccagcatcatgagcaccatcgacgagctccggctccgtgccgtgcccgaggggggtgcggcgccggctagctgcgacgtccggcacgacgtcccagccgtcgtgttctccaccggcgggtacaccggcaatgtgtaccacgagttcaatgacggcataatcccgctctacatcaccgcgcgccagtacaacaagaaggtggtgttcgtcatgctcgagtaccacgactggtggatgaccaagtacggccacatcgtcgagcagctctccgattacgcgcctatcgacttcaccaacgaccgccgcacccactgcttcccggaggccgtcgttgggctgcgcatccacgacgagctcgccatcgacgccgcacgaatgccgggcaaccgtaccatccaggacttccgtcggatgctcgacgacgcataccgcggccgcatacagatgatcatcgaggaggaggagaaggccgcggcggtggccttggggacgccgacccaaggcagcatcaggaagaagagcgcgctcaaggacgacaagccacgactggtgatcgtgtcacggaacgggtcgcgcgcgatcgagaacgaggccgagctggtgcgtgcagctgctggcgccgggttccgcgtcgccgtgctccagcctcgtcaggatacggagctcgccaagatgtaccgtgctctgaacgcatcggacgtcatggtgggcgtgcacggcgcggccatgacgcacttcctcttcatgcggccgggctccgtcttcatccaggtcgttccgctcggcaccgactgggccgccgagacatactacggcgagccggcgcggcggctcgggctgcggtacatgccgtacaagatcaagccggcggagagctcgctgtaccggcagtacgccaaggatgacgcggtgctcaccgacccggacaccgtgaacgccaaggggtggcaggtcaccaagaaggtttacctcgatggccagaacgtgcggctggacatggtacggttccgtcgccggctgcgcgacgcgtacgaccactgggcggagctgaggaggcgccacaacgcggacagtactgagacggaacagcggaaaccatggtaggagtaggagtagcatggtctcctaccgagttcttttgattaattctttctctttttgacacatatacatggttaattcaaatactgtatagagaaattcagggagatagttgctttacatgccaccagtttgatgggatgagtgacacctgttaatggactacagctgttaatgt

SEQ ID NO: 18867 - DNA, 2020 bp, Oryza sativa
  ref <308>: DATABASE ACCESSION NUMBER: AK069248
  ref <309>: DATABASE ENTRY DATE: 2001-12-06
ggctcccaaaaaaattcgaatcaggcggagccacctcacctcgccgcggctgtttctcacgccgccttcccccgtcgacgcgcctcgccggaaccctaccacccggatctccgcggcggcggcggagatggtgagcgcgctcgcggggctgcaggaccacctcaagctcgcgcgggactacgcgctcgagggactctacgacacctccatcatcttcttcgacggcgccatcgcccagatcaacaagcatctaactactttggatgacgctctgattcgcacaaaatggctgaactgtaagaaagctatctgtgatgaagtagaaatcgtgaaacagctggatgctcaattaaaggcgtttaaagaagctcctggggcaaggcggtcctcgtcaccccccattcgctctaataataaatcctttgttttccaaccactggatgagtatccaacatcatcaccagcgccctttgatgatcctgatgtctgggcgccaccaagagatacaccaaatcgtagaccaacacgaggtcaatctagtacaagaaaatcctcccaagatggagcttgggcccggggtccatcaaagactggaacacctagtcgtggtgcaaaacctaatggaagtaaaggaaactctggggcaagatcatccactgcctctagcactggtgggaggaaagggaagtcaagttcaagcaaggctgattcagtgagtagcgatgctgaagaaggcaagtccaagaaggggcaatatgaaggaccagatatggacttggctgccatgcttgaaagggatgtcctggattctaccccaggtgttagatgggatgatgtcgcaggtcttagtgaggccaaaagacttcttgaagaagcagttgtacttcctctctggatgcctgaatatttccagggtattcgccgaccttggaaaggggttctaatgtttggtccacctggtactggaaagactcttttagcgaaggcagtagctacagaatgtggcacaacatttttcaatgtttcttcagcaactctggcttctaaatggcggggagagagtgagcgcatggtccgctgtttatttgatcttgcaaggttctatgctccaagtacaatcttcattgatgaaattgactccctctgcacatctcgtggagcttctggtgagcatgagtcatcaaggagggtgaagtctgaacttctagttcaaatagacggtgtaaataatagttctaccactgaagatggtcaaccaaaaatagttatggttctggcagctaccaactttccatgggatattgatgaagcactgagacggaggctggagaagcgtatttatattccacttccaaattttgaaagcagaaaggcactcatcaatattaaccttaaaactgttgaggttgctaccgatgtcgacatagatgaagttgcacggaggacagaaggctatagtggtgacgaccttacaaatgtttgccgtgatgcttcaatgaatggcatgagacgaaagattgcaggcaagacccgcgatgagattaagaacatgtcaaaagatgagatctcaaaagacccagtggccatgtgtgactttgaggaagctctggccaaggttcagaagagtgtatcacccgctgatatagaaaagcacgagaagtggcaggccgagtttgggtccgcttgaaatctccattctgttcccgttcaaatttctcagatcattgtttctccttggttgcttgtgttcgcaagtatttcattcatttgtaccgctgttatgttgtttcaacggccttatgttgatcggttgtattgcctgcgccggtgttgtatcatagagacaaaccagacagtaaactaggaagtgagaggtctctgcccgtggaactgctttgttgatttagtttcagtgtcactggcactgccgaagccaaaggttgcgtcactctgtaaccatttcgaacagttgatatccagcttccatgtttcgcacgggcagttgcgacgtgcgcgtttt

SEQ ID NO: 18868 - DNA, 1094 bp, Oryza sativa
  ref <308>: DATABASE ACCESSION NUMBER: AK069249
  ref <309>: DATABASE ENTRY DATE: 2001-12-06
gaagctgagtgacgcgtcacggcccagttgacttcggcccatgacccaatgagtagccgcctccgcttcctcttctccctcgccgccgccatcgccgcagcctccctcctcgccgccgccctccgccgccgcgcgccgccctccggcctcgccgcccgcctcgtccccgcgcccatggcggcggcggcggcccgcaaccggggcttcgtgctgtggctgcacggactcggcgactccggcccggccaacgagcccatccgcaacttcttctccgcgccggagttccgcctcaccaagtgggcgttcccctccgccccgaactcccccgtctcctgcaaccatggcgctgtgatgccttcatggttcgacatccacgagctacccatgagctctggttctccacaagatgacagtggggttcttaaggctgttgaaaatgtgcacgccatgattgataaggaggtagctgatggcatccctccagagaacatatttgtttgtggattcagtcaaggaggtgctctcacattagcaagtgttttgctttatcccaagactctaggtggtggcgcagtgttcagtgggtggctgccttttggttcgtcagttactgagaggatttcacctgaagcaaggaagactccaattctgtggtcacatggaatagctgacaatgtagtattgtttgaagctggtcaagctggtccaccttttttgcaaaatgctggtttcagttgtgaatttaaggcatatccaggtcttggtcactcgatttccaaggaagagctatattctcttgagtcttggatcaagaatcatctaaaggcctctcaggagaaggaaaattaacattgctttggcctgccgtcactctgtggtacataaaatttggtgagaatatgttgacctttacggacactcatttggaagtttttatttgggattgatcaatgtgtcaacagttatttgactcgtaacggccatagccgcacatgtacaatcgctggagtttgtatgttcctggcatgaccaactgcaccttagaatttactatatagtgacaaagtattgaataaataccccgtgttccagtt

SEQ ID NO: 18869 - DNA, 1361 bp, Oryza sativa
  ref <308>: DATABASE ACCESSION NUMBER: AK069250
  ref <309>: DATABASE ENTRY DATE: 2001-12-06
ggcgatggaggccagccggccggcgcacgcgcggcatatggagagcaatgcggcacgcgccgccgccgccgccgccggcgagggagtcggagaccatgacgacgacggcgaggaggaggaggaggaggagaagtggcgggaggcgctcgccgccgcctggggccagagcagggcgaagcgggaggcgatccgggcgtgctacgccgccgtcaaggacatgatacgcgcggagaaggacggcgccgacatgcgccggctcggcgtcgccatgggcgagattaagcagcttcaccacaaagtgcaaaggccaaaggaacaagtcgcagatggtgaagctctgctggagctcgtcaattccctggccatcaccgccaaatccaagaagaaagatggacctaccccttcagagttcgtcacatcactgctgacgaagtttggtgtcagagcttctctcttggatgcttccatcgagtctttctcttgttctgatcttggcgccatggcgtctccattgttcatgacagcaactgggtgccaaacaatgaatggtgctttgaatcttgccatcgaggaacggaggaagcgtgtcgctagaagactatttgaccggtttcctagcaaacctgcagggctttatgagaccacaccagatctagatgaaaggaatgatactgacaagaacatggctgtcatgttcaaactcttgaggaagaacaaatgtgtgaagctggaaaatctcatcctaaaccggcaatctttcgcacagactgtcgagaacatatttgctctctcgtttcttgtcaaggatggaagagtggagatagatgttgatgataagggaaaccattttgtcgtgccacggaatgctccggcagctgaactgataacctcaagggaagtgatcaacagccaatatgtattccgatttggtaccaaggattggaagataatggaaggcgttgtggagcctggagatgagctaatgcctcatagacaaaacaacattggagaacactacaataatgcaaaatcatattcagcttcagaaccacagagaaaacgagatgaatttgctcagggagagggaatggatgagacactcatcaagccttgcgctgaagatgtcatcctgaagaggaagaggagatcagaagcagagagcttgaaacattggttttcttcatgcaaatggcaatgatcatgtataattttagggttagttcactggtagcaaagcagattaagcacgcttttggcatctctgcaagaaattgtttaaaaaatactaaaacacaagtaggcattaacagcttctgtttcttctattattaggacttagaagtttaatttgacaatgttgg

SEQ ID NO: 18870 - DNA, 1097 bp, Oryza sativa
  ref <308>: DATABASE ACCESSION NUMBER: AK069251
  ref <309>: DATABASE ENTRY DATE: 2001-12-06
gattgtttctcctcgccgcttccacctctctcgcgccgccgccgccgccgagcgcctggagcagcgtcagccatggccgtaggtaagaacaagcgcatctccaaggggaagaagggatccaagaagaagaccgtcgatccctttgctaagaaggactggtatgatatcaaggccccgtcggtgttcaatgtgcggaacatcggcaagaccctcgtgtccaggacacagggtacaaagattgcttctgagggcctaaagcatagagtgtttgaggtctccttagctgatctccagaacgatgaggatcaggcgtacaggaagatcagacttcgtgctgaggatgtgcaagggaagaacgtgctcaccaacttttggggcatgtcgtttactaccgataagctcagatcacttgttaagaagtggcagacactgattgaggctcatgtggatgtcaaaaccacagacggctacatgctgcgtctgttctgtatcggcttcaccaagcggcggcctaaccaggtgaagaggacttgctatgctcaagcgagtcagatcagacagattcgtcgcaagatggttgaaatcatggccaaccaggcttcaagctgtgatttgaaagagctagtttcaaagttcattcctgaagttattgggaaggaaattgagaaggcgacatccagtattttcccccttcagaatgtgtttgtccgcaaagtgaagattctaaaggccccgaaatttgacctggggaagctcatggaggtgcatggtgactatgccaaggaggacatcggtacgaagcttgataggcctgcagaagatgaggccatggccgggcaggaggtcgctgctgccgagtagagattatcacttattttgctgcccgtttatttagacaacaagtaaacagctatctagttgtggatcgtgaacatcctagcctgtgtcaatggcagatattctgaatagtttgttgggattacttgccagctgcatatttgctttctgatgagaaatgaatgtttttgagtctatgcgtttgctttgtttggtcttgatgatgaagttaagaattttgaagtaattgtttggtctgg

SEQ ID NO: 18871 - DNA, 3208 bp, Oryza sativa
  ref <308>: DATABASE ACCESSION NUMBER: AK069252
  ref <309>: DATABASE ENTRY DATE: 2001-12-06
gacgaaccgcagatccacatccaacactgttgcttgctgcactgcagtactccactgcacctctcttgctcctcaccccagccgcccatcgccgcctgcgcccgcgcgcggccacgccgccactgcctgctgctaccgcgtccgcctctccaagccgccgccgccgccagccagcaactcgcgccgatctgctgcttcttgagacggcggccgcgggcggctgctcctccgctctgtttggccggcgcgcggctccgcctcctgtgcagctgtgcttcccctccggtgttctccctcccgcggcgtgtgacggtagcggaggggcgggactgatctcccgcaatggcgggcgcggtcttcttcctcggcgttcgctgggtgcagatgcttgctctagtctaaatgagacctgcaagagctaaaatctggcagtggagtggtgattgttacagatgaggctacttgcgctggcagttgcaagcatcgtgcttgctaatttgcacctgttgggagttcatgggagggatttgcttctcagctgtggttcaaacgcgactgtggatgctggcggccggagatggatcggcgacatggcccccgggctgaattttaccttaagcagccctggaatagctgcgtcgcaggctgggagcagcaatggcaatgaaatcttcggactggtgtaccattccgcgcgtttctttagcacggcatcttggtataacttcagcgtgctgccggggaactactgcctcaggctgcatttcttcccttacacattcgggaatttcagtgggaatgattcattgtttgatgtcactgcaaatgatttcaagctggtctcgaaattcaacgtgtcagaggagattgtttggaggagcactgtgagcaattcagccatcaatgcagttgtcaaggagtattttcttttagttggttctcgtggtctgcaggttgagtttgatccaagccctgggtcatttgcctttgtgaatgcaattgaggtgatgctcactccagataacctgttcaatgacacagtaaacaaagttggcagcgctggaaatgggcagcttcctcttggtttaagcaacagaggcctagagacaatgtaccggttgaatgttggagggcatgcacttaattcttccagcgatcagtatctgcacagaccatggtacactgatgaagcattcatgttttctgcgaatgctgctcagattgtgtccaacacttcaagtgtaagttatctctcaaacaatgactcctcaatttctcccattgatgtatacgagactgcaagaatcatgagcaacaacatggttgtggacaagcggttcaatgtttcatggcgattctatgtccaccccaactttgattacttggtccgccttcatttctgtgagcttttctatgacaagcccaaccagagggtcttcaagatctacatcaacaataagacagctgctgaggactatgatgtgtatgtcagggcagggggtattaataaggcatatcatgaagactattttgacaacttgccacagcaggtagactcactctggcttcagctaggccctgactccttgaccagtgcttcaggcaccgatccacttctgaatggtttggagatattcaagctcagcaggaatggcaacctcgcttatgttcttggccatattgacatgggtaaccaaaggggtatttccaaggatagaaataggaaaattttatgggaagaagtcggaattggctcagcttcttttgtgacactgacaagtgtggttctatttgcatggtgctatgtaagaaggaaacgaaaagctgatgagaaggaggcccctcccggttggcacccactggtcctccatgaggctatgaaaagcaccacagatgcccgtgcagccggtaaatcacccttgacacgtaattcatcttccattggtcatagaatgggcagaagattcagcatttcagagattagggctgctacaaagaactttgatgaggctttgcttattggtactggtggttttggcaaggtttacaagggtgaggtcgatgagggtactacagtggcaatcaagcgtgcaaatccattatgtggccagggcttgaaagaatatgaaacagaaattgagatgctctccaagcttaggcaccggcaccttgttgcaatgattggctactgtgaagagcagaaggaaatgattctagtctacgaatacatggccaaggggacattgcgaagccatctttatggaagtgacctcccacctctgacatggaagcaccgagttgatgcctgcattggtgcagctcgtgggcttcactacctccacactggagcagaccgaggtataatccatagggatgtgaagactacaaacatcttgttggatgagaattttgttgcaaagatagcagattttggtctgtctaaaactggcccaacactggaccagacccatgttagtacagcagtcaagggaagctttgggtaccttgatcctgagtacttccggaggcagcaactcacacaaaaatctgatgtgtattcttttggagtggtgctctttgaagtcgcttgtggcagaccagttatagaccccactctaccaaaggatcaaatcaacttggcagagtgggcaatgagatggcagcgccagcgttcgctggatgcaatagtggatccacggctggacggtgacttttcatctgaatccttgaagaagtttggtgaaattgcggagaagtgccttgctgatgatgggagaagcaggccatcgatgggtgaggtcttgtggcatctggaatatgtgctgcagctccatgaagcttacaagcgtaataatgtggactgtgaatcatttggaagcagtgaactgggatttgccgatatgtcctttagcctgcctcatatcagagagggagaagaggaacatcactcaaagccatctagtataagagaagatccagacacttgagggtttctgacatctggtaacccactgaaatatcttgattgaattctagcaatgatcttgttgtaaaattgtgtgatattgttcgtgtaggttcttagctttgccggtttcttctgatttttttttgtgtcctgttcaacaagtgtagaataataggatttttgtagattgtcaaaaaaaaaaaagaagagagaaacatggaagcgtcaagtttttccttg

SEQ ID NO: 18872 - DNA, 851 bp, Oryza sativa
  ref <308>: DATABASE ACCESSION NUMBER: AK069253
  ref <309>: DATABASE ENTRY DATE: 2001-12-06
gaccggtcctcctcgcggtctccgccgtcgctgtccatcttccaccggtaatacccgccgctgcctcctccactccgcccgcatcgccgtccaatcaccgcgctgtcacgacacgattcgacctcaaccacggcgctgcctcctgcactcctgccactcagatgtcacccacgtgatccggccctcaagcccgatgtggccagctgatcttatcccctcccccatcagtgaagtctattttcaggattattagggacaaaaggatcattgattctcatgtccaaaaggtgttcgatgaaatgctgctaatagatggttcgttggacatgatttgttccttgacatgatcaatgtgttgcccaagctccagatgacacggtataatgcttctgctctggtcctgaggcctgactattgctgcctatgctgagttctaataaaaaaatataagtgttttggaagactgcaaggaccatggatgccattcgttgttggggcttatcccatagtaaaaatgtaaacaagagctttggcaagggcaggttgtattccaaagtaggtctttgtgctgcccagttgtatgtttcagcgtcatatcgctcttatctggtgatttctggcccatgacaaagaagatagaggggaggggcaaaagagaaaagcccgtggaaaatgggctggcgcctcattgagccaggttgacgcagtaccatgccttataattgataatgtacgcacttttgtgttttttttcaatcattgtctcaaatgaactagcagcttcgatacgccagttcacactattgtaaatttgtaatgcgtatcgaaggtagtgtgattcacccgaaagg

SEQ ID NO: 18873 - DNA, 2614 bp, Oryza sativa
  ref <308>: DATABASE ACCESSION NUMBER: AK069254
  ref <309>: DATABASE ENTRY DATE: 2001-12-06
tgggcaccacgaatccacacacaccatctctcgcgaaattaatccgctcccctccttttgatttcgagcctttccccccgttactcctctcctcctcttcctctttccccttcctctctctcgtgctcctctcaggcggacgccgcgagatcgggaggaggcggacgcggcgggagaggccatcggccatcgccatcgccttcaccatcaccgaccgcgcgccggcagcggcggtgctcgcgactcgcgcggtgtggatttgtggggggcaggggggattcgagtggcggcgcgtttggggttgtcgcgaggcggattcgaggggggcgctgtgggagttggtctggggggagagatctgtaagggagcggaatgcagcaggagcagcggaagaagagctctgcggaggagttttttacagagtatggtgatgcgaaccggtacaggatccaagaagtcattggtaagggaagctatggggttgtgtgctctgccattgatttgcacactagacagaaggtggcgatcaagaaggtgcacaatatttttgagcatgtctcggatgctgcgcgtattctccgtgagatcaagcttctgagactcctaaggcatccggacattgttgagatcaagcacattatgctacctccgtcaagaagggacttcaaagatatttatgttgtttttgagcttatggaatctgatctccaccaagttataaaggctaatgatgacttaacaaaagagcactacgaatttttcctttatcaattactccgggccctcagatacattcgtactgctagtgtttatcaccgtgatctgaagcccaagaacattttagcaaattctaactgcaaactgaaaatatgtgatttcggactagcacgagttgcattcaatgataccccaacaactgtcttctggacggattatgtagcaacaagatggtacagggctccagagctctgtggatccttcttctcaaagtatacaccagctattgacatttggagcattgggtgcatctttgctgaggtgttgacagggaagcctttgtttcctggtaaaaatgttgtccatcagttagacttgatgactgatcttctaggaacaccttccatggatacaatttcccgggtatgataatactgttaggtaaaagttttttgtaggtcctcctgggaggagacttcagtgacccccaacatttgtcttattgttctcttcctttccaggttcggaatgagaaagcaagacggtacttgagcagcatgagaaagaaagatccagtccccttctctcaaaagtttcctaatgcagatcctttggcactaaaactcttgcaacggttattagcctttgatccaaaggaccgtccaactgctgaagaggcattgactgatccatactttaaaggcctttccaagattgatagagaaccatcatgccagccaatcagaaaactggagtttgaatttgagcagaaaaaattgtctaaggaagatataagggagctgatattccaggagatattggaatatcatccacaattgcagaagaactacagaaatggaagagagagagcaacctttctctacccaagtgcggttgatcagtttaagaagcagttctctaatcttgaagaaagcaatggaagtggctcagcaattccaatggaaagaaaacatgcatcgcttcctaggtctactactgttcactctactccaattcctcccaaggaacaacctcttgcggcctcattgaagagcagcaggcctgtctctgatgaaccttgtaaaaacccctgggtcatgggaggattttctggaaatattcccacttcttctcaggtttcacaagtggcaaaaccagtggcaccagggagacctgttgggtcagtatttccttatgagactggaagcaccaatgatccttatggtccaaggggaccagtgatgagttcagggtatcctccccagcaacaaatctcacaagcatatggttatcatcaagtgcctgcaaggatgaactgtgttgaacaatcacaagccatggatgcttataaaatgcattcacagtcacagacgcaggcctatgcttatccgaacagcaaagtcacggctgatgttgctctggacatgagaggatccacgttccatcattcagcaggatcaaagaacggctcgttagatagaatggtaacacagactgacatatacacaagatctcttaacggtattgttgctgccgcgacttcggcaggcgttggtactaacagaaaggttggtgctgtacccatcagcacctcaaggatgtattagtagtggctaacagcctaaattgattggcatatattggatttcgttgctggattggctcctaattatttaccagccaccagtaataaacggagaagtttgcctggaagatggtcagatggatgaggacgactattagaggtgattcagtttgacctcttccacttgttgtttcacctgatcagctaggtacaattgtctttcttctctgtgcaccagacaaacaacagagatgtacccagcgacatactctttcttgctaaattacaaatactacatcacacaggtcagct

SEQ ID NO: 18874 - DNA, 725 bp, Oryza sativa
  ref <308>: DATABASE ACCESSION NUMBER: AK069255
  ref <309>: DATABASE ENTRY DATE: 2001-12-06
ggccattgcagtgcagtgcaggggtccctctcgccttaaccacccaaccaactacctccccaaacagtcgccgccgccgcgcgccgagctcgagctacctgagctgctcccatgtcgtcctcgtcctcgtcggccggcggctcccacgccggcctcgccctcgccgccaccgccatggcgctctccggcaccctcgtcctcttctccctctgccgcgccaacaagccgcctcaccacgacgacgcccctgctcgcctccgcccctgcctctcctcctccgagaagcggaagagggagaaggcgcggcgcgggagcaagaagcgggtgaggttcgccgccgacgtcgtcgacaacgacagcaatgcgtcgtcccgcccggcggcggccgagccgtcgtgcaggaacgcggcggcgacggcggcgacggcgatgccggcgaaccgggaggcgctgtaccgcggcatgctccgcggccgctccatgctcagggtcgcctgctcctactagctccagctaattaatctgccattagtcccttaatccggaacttgttgcttctgtttgctcccttgctgatcgctaatcgccgccgctaatcatcgggaagttttgtaattagcgtgcatcccgatgcacgagcgagcgagcgatcagcagcagtgcaggtgattgtagctgtacttgttgtacgtgtacattattattgttattctgggtgattagtg

SEQ ID NO: 18875 - DNA, 3430 bp, Oryza sativa
  ref <308>: DATABASE ACCESSION NUMBER: AK069256
  ref <309>: DATABASE ENTRY DATE: 2001-12-06
gtcacactgacacaccctaaactggagtgtattgggcagacaccaggccagagcaccctcatccctatcctccagacggaatcctccccagtgacgccatgtcgtcttcgtcgtcgtcgttcaagcccaacccgctgtcgctgagtgtgccggaccctgctctcgaccgctggctccgcgactccggctacctcgacatcctcgactcctcagcctcagcctccgcctccgcctccacctcctcctccccctccgcaacgaccaccaccgccgccgcctcatccacatccactctcatcaaccccacctccgccgccgccgccgtcctcgccttcgcccgtaccctcgcctcggtcctcgcgctcaaccccttcgctcggctgtctactaccgacctcgccgcgcccactccctcttggtccctcgccttcctcggtccgcccggagccgcgtcctactcctggcccccgacctcgacccaggcccgactccgcgtccaggagaacgtccgccgctacgcccgcaattacgccgcgctctccatccttgtcttcgcttgctgcctgtatcatatgcattgccaccttcctagttcgttaattgttgcgcttattgcttttatctgttcccagtctctgcgtctgagaaatatttctgctactgctggtgtgtccaggtaccggatgccaatggcgctgttgggaatgttagccatcctcatcgtgtgggagagtgtgaggtactgccgggagcgttggggactcgccacccgggcgcccggggttgggcagtttctccttcattctgcacagattggtgaggtttccattgcaaatgtgttcctgcacaataaatctttagaaagaaaaattgaggtgtaattggtaactgaactagctcatcacaaagaaactgtattagattaacagtcttgctgacgggggacacattgattcttaatatttgaataagactagcagtgaagaccttaaggttcataagaaaatcatttctacttctatattcacttttatgcaattcatagggtaaagaaaaagcatttccaagaaattgaaacatgacaatatttagtgcaggatcccttcgtattgtttacattaaaatgacaatgttgttatgggcatgttatagttcttcaattgttaaagcttaaaaaagaagtttctccatggatcccttcgtatatgcaagccttgagacagaccgacatacctaagataatattcttgtgatcatgttttggggcatcctagacctcgttttaataatgaacaacaatcctaaaagcataaagtaggtttgaaggacaaccaatcagaaaatccaagaactcctctatctcttcctcacgccatggtgccacggtgataggggtatcaccctatcgatcttgggcattctgtttctgtattcccaaaacacctaagcctgtggcaggtgctcagccaatctgtatccacctgcccacccatgtatactgacatgatcattgtccatcactagaagccagtctaaatagagcccatatatatagcaaagccattcttgcgtcaaactaggagattgcccatttgattttctatgaaaacgctgaacttctttatgattgctggtaggttactaagcagtccctaggctagttttcattggaaaattctgctttatgatagaagaatacatttattcaaatcacttgatcctgtagttaacatgttgatttctgtagttccaaatacatatttgctcacaagtttcttattaactaactgttcgacatatgtatttgctctttgaacttgtggagatatcttcacagctgacaattgcacctaaattttcagttttttttaaaaaaaatgaaacgttagttgaattctaaaacttaaacttgtggcagcattgaatctttatctattttgcatagaacttgttaaaaaaataaatcctgcagaaaggtccaataatgagcaaccatgtatttctcttctacatcagatcattaggttaaacaaataaacgttgggagtgagttgaattatcttatttgatcatcggtgcatctcatgaatttcaaaaaatcaacatcttcaagcccttttactagccctttgtttgtcttcatcgctggtagtcttactaaggttttacttgaatgtatctttggtggatgactgtatagttctattaaacatcaacattttaattcgaatagaaaggattgtggacacatccagaagcagtcagcagcagcaaagatgtaccccatccagtaaaagaatacttgatgtttgactttattcatggtttttgagatgcgactttactggtttgaccacacttttatattaaatttaattcatagtatctaataagtttattatattatggaagtacatttcaagacagatctatatatgccatgtttatgtttttcaaactacctttaaaagtcatttgatagtcacagtttgaaaagtttgacaggacattgtctaaaacgtcaagtatttctgactgtatagagtgctacaaagtgtgatgtggcattgattattgtttgtgaacttgcccataggacttctaattgtgcacaacgcaatctttaatgaccatgcctgcaaagatgtggcgccactgaaatagcactcaggtggatgtagtttggttttgcgctctggccagatttgtgcttgacaccagaattgtctagttcagtttggtggtttcgtactgggttctccatcattatctaactcgttttatcgtaaccagctactgctgtgctggtttatgtgtgcagtctgcagtttgctcttgtatatgccattgggttgagttatgcagtgatgatgttgcatgcttcttttcgaaaattgactccttcaagtctacctgatcctgggaacagaaacaggaggttgcaaccaaaacgaagctaattgattcatcagagaaaaataataaaaagaaagccataattcatgacagactgcagatgcaccagacaggtataagttataacagcccacatggtgcgaatgcaaagtagtcacctatatcagcactggttagtgggtactgttggaggctcgagactgcattttggactcgttcaagagttagtcgtggtcgaagtttgttgacgaaacggaatatgacggtagcgtcattttgatccaatttgatctgatctaatggcatgagagcaaatggttaatttttataggtgttcaactagaatataccttcgtggcaaatattagctgagctctcctaaaagtgcggcaaacgaacagagtcttgtcgtgcttggttttcatttttcattgtggcttgtgttttgttttatggttgatacaatgatactttacctttatggttgattgtgtatatacatattaattaagcc

SEQ ID NO: 18876 - DNA, 1654 bp, Oryza sativa
  ref <308>: DATABASE ACCESSION NUMBER: AK069257
  ref <309>: DATABASE ENTRY DATE: 2001-12-06
gatttcaatccttcctcttccttagcttattagcttccttccttcactagtgccagttttcctcctacctaatctaagctagccaggtcgtcatcttcttccttcagctcacgctgaccaaacaccatctgttattctgtttgtttgtttttttaaaaaaaagaaaaaaaatctagctaggcgagccgattgaaggagctgagcatgccgagcagcggcggcgccatgcctgcccttccaccaggcttccgcttccaccccaccgacgaggagctcatcgttcactacctcatgaaccaggccgcctccgtcaagtgccccgtgccaatcatcgccgaggtcaacatctacaagtgcaacccatgggaccttcctggtaaggctttgttcggcgagaacgaatggtacttcttcagcccgagggaccgcaagtaccccaacggcgctcgccccaaccgcgccgccggctcggggtactggaaggccaccggcaccgacaagtccatcctctccactccgaccagcgacaacatcggcgtcaagaaggccctcgtcttctacaagggcaagcctcccaagggcgtcaagaccgactggatcatgcacgagtaccgtctcaccggcacatcagctaacagcaccaccaccacaaagcagcgtagagcgtcatccatgaccatgaggaatccacaagaagagcaacgacttcaattcctctgaccaacacgaccaagaacccgaggaatcaaccgtcgaacagcttgaagacatccatgacaacaactcctctgaacaacctccagctccagctgacatgaacaaccaacagtcagatttccagcccatgacggcgatgagcatgagcaagtcatgctccctcaccgatctcctcaacaccatcgactgcgccgcgctctcgcagtttctcctcgacggctcatccgacgccatcgctgagcctcctgctcctcccagccccctaatatacacaacacctcatccaaattaccaaacactaaactataacattaacagcaacagcagcatgccacacgccttcgagtcacgcctagatcatcacgatggttacgttaacaattataatgttaatggcctgaggaggaagagaatgatggcgtgtagtgcaacttcctttgatgatggcagcagcagcaatgactttgtgcatgccgttgtcaagaaaccgcagctgctgccaagtgattcgaggggtagtggttttggaggaggttactgcaaccagcagctttcagagactgcgactggctttcagtttcagaacggcaatctgctgagccatccatttcctctgaacaatcatctgcagatgcagtagtaggcgtctagatcccgtttaccgatcgatctgaagagaggtgaattaatttcaacgaatgaaactacagattcagagaggaagatactgattgttccatttgtgatttattttgaggagttgcatgggcagatagacaaacagacggaattcttgatgtaaccgatgcaaggaaagattcagatttcttcctatggcattaatttgtgagtttttttttgttttcattttcatgtacaagaatgtaaattataaatggtaatatcgtgcaagctagtactcaagccaatttatatg

SEQ ID NO: 18877 - DNA, 1158 bp, Oryza sativa
  ref <308>: DATABASE ACCESSION NUMBER: AK069258
  ref <309>: DATABASE ENTRY DATE: 2001-12-06
gaatcggtcctcacttttgccctcgccgcctgagcgccagtacaaaggggaacgccgagtacgccgccgccgccgccgcgccgcccgccgccgcggccctctctgctgctgcctcgctctagggttcgtccaagggggggggggagagagagagagagaagggcggctctcagcgcgagcagcggcggggcttccccttcccgtccgagtgccgcgcgcatccagggccttcgaggtgcttgctgcgtgatggagccggaggcaatgccggcgcctgaccccaacgacgcgaggcagcggttcttgttggagctcgagttcatccagtgcctcgcaaaccctacctacatccactatctagcacagaataggtactttgaggatgaggcatttatcgggtatctcaagtatctcaaatactggcagcgtccggagtacatcaaatacataatgtatccgcactgccttttctttcttgagctcctccaaaatgcgaatttccggaatgcaatggcccatccagcaagcaaggaagttgctcataggcagcaatatttcttctggaaaaactataggaacaataggttgaagcacatcttaccccgccctcctcctgaaccaactccggcacctgcacctgcacctgcaccagcaacagtgcccccagcagcaccagtgccgtcgaccgtggttccacctgttgctgcaccatcatcatctttgccacctatgtcagcagctggtgcatctgcaatgtctcctatgcagtttgcaggaacccctggcaccaatatcccaaagaacgacatgagaaatgtcatgggtggacagggtggtagaaagagaaagatgggctagtggaactgtggaacatgctggtcaactttaacagacagacaacattgtatgcaagtgaagagtaatcttcatatttatttcctcgtaggcctttttttgcagcaatttagaagctaacagttactcctatttgtgccgctggagatgtaatttggataacaatatgtcctgtacgcttggcccttgaatgattggctcatctatgtggccttgtaattataggagtactaattttttggtcactggaagatcactgaaaacgccagagaatccacagtaaaagcctgtttcacagagccc

SEQ ID NO: 18878 - DNA, 1699 bp, Oryza sativa
  ref <308>: DATABASE ACCESSION NUMBER: AK069259
  ref <309>: DATABASE ENTRY DATE: 2001-12-06
acatcaacggacaaggctgaatattggtcttcagcaaattgaaggtacagcgacagtatctgaatctggaagcaatactcctagtattgctgaaggcctgtatgaacctcatagtcaagcagagagttggcaggatgatttggaacaagagagaagagattgggaacaattttcccatgctattactggagaggaatctgaaataaattggcatgaaaatacgtacaatggttcatctcatgagggtaccgaagttgaaggtggtcaagatgcacatattccagaatcacatgatgagttagctagtgacaatcttcctcctcaatctcatggagaacagcaggacaatagccatcttcccgaggagaatgaagagctgcatgacagtgatcttcaacaatctcgtggagagtggaatgagggcagtaatccatttattcctacagaagtacacaacgagtggcacagcgatgatcatttccaaggagtaaatgaagagtggcatgatgatgatgagtccaatgatactgcagataattggcatgatgacaactctgatcaaccaattgatcatgattctgctcttattagaagagctaatacgtttgtcccagctgatgatgataatgtgtacagtacagaactaagggaactcctaagcagaaggagtgtttctaatcttcttcatagtgcttttcgtgaaaatttggaccgacttatccggtcatatgttgaaaggcaaggtcgtgctcctctctcttgggatttggaaggagcacctcctgcgcctgactcacccgagcaaagccaggagcagcatagagatgaagaggaacaggagcttcatgataatgttgttaggcctcccttagtgattccacctccgcctatacctcctcgccagccactttggcattcggagttgcatcgtaataactggatcagacaaaacatacatcgctctgatattgaatgggaggctattaatgacttaagggctgatatggctaggcttcagcagggcatgagtcatatgcaaagaatgttggaagcttgtatggacatgcagctcgagttacagcgatctgtaaggcaggaagtttctgcagccttgaatcgcttcatcggggagcaaggtgaaagtaaagaaactatagacgatggatcaaaatggatccatgtgagaaaagggacgtgctgtatatgctgtgatactccgattgactctcttttgtacagatgtgggcacatgtgcacatgttcaaaatgcgcgaatgagttggttcgaagcggagggaaatgcccgctgtgccgtgcacccataattgaggtgatccgagcatacttcatcatgtagatacagagagaaaggaagataaagaagaagaaatgtttttttcttttctttttcctacttagagcttgtaggtgttagtggatgtatgattatattcaattttagctatgccctatgcctgtgttgtcttgtgtgtctcttgtctctgatgagttccattgttttgttagattggggccctgcttgtctgccttggtgtaatatatggttttggggtggcagaaagtgttttgtttgggaactgggattaccggaggcagctactaattcatttcacaactgatcatttgaacaaactgattgatgggatacagtaagagggaactaatgttcctgtctagt

SEQ ID NO: 18879 - DNA, 3447 bp, Oryza sativa
  ref <308>: DATABASE ACCESSION NUMBER: AK069260
  ref <309>: DATABASE ENTRY DATE: 2001-12-06
gccccgaaaatcacgccacctctcccattctctctcttgcactcacccaaaaatccccaccctcacgccaaccacccccaacgctgccaacgcgccgcgccgccgtcgccccgtcatccctccgccgtcgccccgtcatccctccgactccacttcagccgtcccctccgccgcgccggccatgcgctctttgcgcatcctctccgctccgatggctcagcggagctcggcgccgttcatcgcccactgcctacccctaccctacctgtgcagtgtgcaggtcgtgcccggaatccccgtgtcgcacccccctcccccttcccacaggcgatcaaggctcagctcgacttcgatgggatcccttgacctcggtgccgcccaggaagatcgtcgtcactcgcggcgccacacaagaagttcgtcgggcttcctgctccttccctgtcgcatgggtctcctcgccggtgatctcctcccttctcaccctcaggtaacgccttcgatcccccgctgctgtaacgccttcgatcccccgctgctgccacaccttgtcacattccagtccatgccctctcccagatcgacttgtttggatccctgaagctggggttagttctatggatatttgctactcctgttgataggtatattgatctgaatcatctggtactatcaattgtaggttatgtaccgggttggaatatattacaccttcttcattttgttcatatatgtgctctggtccatatctgttatgagtctggttacgacttataacattccttgtcctgtacttcttcttgtatacgaaagtagagcaatcaaacaataaaaagggatgagattgaagcaattcccgtgactagaaaacgtcatgaaaagctgttcaagtttagactcatttcttttctatatgaattatatagtaatgtacagatgcatgtgcaaacctgggtttgtacacgtactgaccacgggtgcagatgaattgactaagatattaagcagtatataaacaactaaatatgtatcggtatatataaggtttgagtatctaaaatatttactgcactgaacttaacagatggaatttgcttcttccacccttcatgtgattggtggtctgccgactgcttctgacgactgagttgctctattggctttcgtgattacgacttaccgtcgtgctgcgcccttcgatttgttggtctcactcgccatggtggtaagcacaggcacattgttttttcttttatctttcttcatgcgttaattattaactgaaactttgttgtgctatgagccaaggagtcaacgatatttcctttctacattacgatgcaagtaaagctagcataattttcctcccaatatatggttcaaccttgatgctaacccaatgtgtaatgttgcaaaatgcctaactctgcaacagtgcaagatatggttccaccgctggccacgctggagacgaggtcgtccctcttccccatcggccacagatggagccgacgtaaagagtaataggtaaacgggaggcagggcaaaaaaaagaagatcattctatatgcacaaaatttgaagaagatcattctatatacacaaagttttactgcttagacgttattagaaaacataacttgggaaaaaggagtaggcttggcaattatgtatttcaatagttatcagaaattttaatcgaggatatatatataaaaaagaatgaatgttcatcgaatcagagttgatggcttgacagggtcgagttaagtttaacacatccatgtatagatcattctgcttgccactttggattgatgtcgtctgcactttatatgacctttggaacggtagtctgcttcggagaccagggaatggtacccatctctctactgaaaaaatttctgtgactgtttttcattctgtttggaccatacacaacctttttagtttaagtgggaaagtaaatcaattattgtgtcaatattttggtcacctgtgtatatcttgaggtttatataaggtcacctgtttatgtcttgagatttatatagatttaggccaatgtgtacatcttcagatttggagtgaataaaactttgcaatatccatgtatatgcctctcatcaaataaagctatttgttttgtaagttactgaatactgatggcacaattttaatttttactccttggtatgtccagtggtggcagctcgatggctcacaggaaaagcaggggaagaggaagggcgcaaagagacagggaaagtggactgtgagctataattagacagtgtatgcaccttttttttccatgaattactgacttaaatggactaatagttgggtgtcacattgtatattacaatagatattatatattatttcctgtgatatatattccaaaacatgctctccatcgactaatcacgggcttgctcatatgagtcattatagttctgctattttgatctgtttgaaatctacctccatgagaattatgctagccatgggctattgtattcctccctgtaatgcagttctacaaataagaatatgagaaattgatgacatatttatgtgcagtgtcctattgtcctatagggcattcatatggagctttggaatttctgttaatggaggcagagacaaaaaggagaagactgttatatgaatttcttccttgaattttgtttctatgcagtagaatatggaaataagattcacttcaaacttttcaataatttagtacactttcctgcaggtaaacatgcattatgatagagcctaaagctggtgggacacttatttccatcgtctacatgataatttgatcatgcacatgagttgtcctcttgctatgaacaactgatagagcccaagataaccagtgatcatcttgactgatgaactaatttcaatatgtgtatgtatgcaggtggccactgatcggtgccccttggcctattgcaatggataatgttgttggaaactctacaccaaatccatttgcatgaacaggtgatgcacaccaattccccttggcctacccagtgacatgcactggaatcttagcgattatctgatccttattaattcaaatgcatcactgcgtattctataactctgtaacatcatgacaacttgggctttgatgattggggatactgtcagtaggagaagaatcaccatcaccacaaaatccactttcattgcactctggcgtggacaattgtatagacatatggctgcaagtgaagggagagatcaattgttgtactttaaaggcttcagatacaacaaatcattgccttataatctctttcggtggtgttcgcatttcaagaatcatataaatgtattttaaattttgtataaaaagatcagattgtatgaagataaccattgtgctattattaaagttgtcaattcaaatctatattcttt

SEQ ID NO: 18880 - DNA, 2032 bp, Oryza sativa
  ref <308>: DATABASE ACCESSION NUMBER: AK069261
  ref <309>: DATABASE ENTRY DATE: 2001-12-06
gacgcatgcagcttccctcgtcggggaagacgacgtacgaccccgacgtactacgcgcccacgcacgcacgacgggacggccggcctcctcacctcgctcgctcgcgccgcgccgctcgccggcaaatccaccacgccatggcgttccctgcaccctcctcctcctcccctcgccgccgcggccgcggcctcgcctacctcctcgtctccgtcctcctgctcgcgtcccgcgtgccgggcgccgccggcgcggactcggagttcgaggacggcgtctcgcccaagttccccggctgcgacaaccccttccagaaggtgaaggtgacgtactgggtggacggcgacgagaggagcagcctgaccgggatcacggcgaggttcggcgaggtgctgccggccaccggctccgacggcgacaagcggaaggccgtggtccccgccccgaagaccggctgcgccaagtcatccgcgccgcttgctagctccattgccgtggcggagcgcggggagtgcacgttcctggagaaggccaagacggcggagtccggcggcgccgccgcgctgctcctcatcaacgacgaggacgatttgcagaagatggtgtgcacccagaacgacacggtccctaacattggcatcccggtcgtgatggtatcccagtctgccggtcgcaagatcctctccggcatggacggtggggcaaaggttgacattctgatgtatgcgccggagaagccgagtttcgatggcgctatacctttcctctggctgatggccgtcggcagcgtggcctgtgcgtccgtttggtccttcgtcgtcgtcggcgacgaggataagaatgctcctacactgggtggagaagaagctgctgactctgaaatcgtggagctgcagaccaaaaccgcgctcgtgttcatcgtcaccgcgtcgcttgtcctgctgttcctgttcttcttcaaatccacctggtctgcatggctgctggttgtgctgttctgcctcagtggtctccagggattgcactatgttgcctcgactctaattgtaagaacttgtgatcggtgccgcgaagcaaaagtagctcttcctgtattagggaacgtgacagtggttacacttgtcatcctaccactagctttgatcttcgttgtcgtttgggctgtacaccagaattcaccgtttgcttgggttggtcaggatcttatgggcatctgcatgatgattcttgtattgcaagtggtccatctgccaaatatcaaagttgcaacagcgcttcttgtgagcgctttcatgtatgacattttttgggtgttcatatcacctttcatattcaagaaaagtgtcatgatcacagttgctcgtggtagcgatgagggacctagccttcccatggttctgaagatgccaaaggagtttgatacatggaatggctatgacatgatcggatttggggacattcttttcccaggactacttgttgctttcagtttcaggtatgacagagcaaatggaaaggacttgactgacggctatttcctctgcctaatgatcggttacgccttcggtttgtcatgcacatatgttggcctgtacctaatgaagagtggacagccagctctcctctacctagtcccatcaacactaggaactattgtcacgctaggtgcgaaaagaggagagctaagtcagctctggaatgctaaagtatagcttgtgaaatattgatacttgcttgcagtcttgcagcattgtactagttagagaagcgatcattgatctgtatatgagaatatctgatggttgttggtaaatatatcatgccaaccatctgcacgaactttggttagatttcttttttcagtgtacacttaccatgaatggtggttattagtgcgaagcagtatgctctggctgtaaatgtcatggctgtgatgtaaatgtgaacagaattatattctctgtgtcttgatgtgttcttagctgggtgtaatataaaaaatccactttgtttcagaaacttcagatgttgctc

SEQ ID NO: 18881 - DNA, 1062 bp, Oryza sativa
  ref <308>: DATABASE ACCESSION NUMBER: AK069262
  ref <309>: DATABASE ENTRY DATE: 2001-12-06
gagacgccacacacacccaaacccaacctcccaaaacacccacccggtttaccagagatccgcgcccgccacttgtaaacctgctgcacccatggcgcccagagcagctacggtggagaaggttgctgtggcgccacccaccgggcttggtcttggcgtcggcggaggtgtcggagccgggggtcctcactacaggggcgtccgcaagcgcccgtgggggcgttacgcagcggagatccgtgaccctgccaagaagagccgggtgtggctcggtacctacgacacggcagaggaggccgcccgcgcctacgacgccgccgctcgagagttccggggtgccaaggcaaaaacaagctttccgtttgcatcacagtcgatggtcggctgtggcggcagccccagcagcaatagcacggtagacaccggtggcggcggggttcagacgcctatgcgggccatgcctctgccgccgactctggacttggatttgttccaccgcgcggctgctgtgactgcagtcgccggcaccggcgttcgctttcctttcagaggatatcccgttgcacgtccagcaacgcatccttactttttctatgagcaggctgcagcggctgccgcagctgaggctggataccgtatgatgaagcttgcaccgccggtcaccgtggcggcggttgcacaaagtgactccgactcctcgtcggtggttgatctcgcgccgtcacctccagcggttacggcgaacaaggcggcagctttcgatctggatctgaaccggccgccgccggtagagaactagctcaggatgggttagctgacgactttgtagtttctctcttattttcttctttgatggatatttctctccgatgttttggtcctctgtgtttttgtttagtagcctgtgagagacggaagagccttgtaaatagtttttctgccgagggcgaaattcatcttgggatctgttaattagaacagatcatgccggcgatgagatggactaaaccgtggagtgtatgtattcctttatattagtatgaagaaattattcagaaagtc

SEQ ID NO: 18882 - DNA, 1004 bp, Oryza sativa
  ref <308>: DATABASE ACCESSION NUMBER: AK069263
  ref <309>: DATABASE ENTRY DATE: 2001-12-06
gtgcgtgccacagccgcccccaaaccttgtcacctccttgcgtttcctgattatttgtgtttgatgttgtgtcaacgtagcccaacgcgcaagagaaatttctgcggatcaagcatgcgtacaacacgctcatgaattcagagagccggtccaagtacgcgagcactagcagcaacacatattattcgtccaggacatacgggaagagcagcactacttcagctgatgaagaagagccattctatggctttggggatttccttagagatcttcaagcagaatttcagaactgggaagccggtctgaattcagaacagaaacctaaaagcttgtgggaagagttggcagccattggtgaagaatttgttgagtttctggagaacgaactcaagatcgatgactcaagtgatgcggaagacaatgcaaatgatccgtacacacagtctggaggcaaaaacaagcaagatgttaatacatcgacaagtagctttgatgatagcgtatctgagatagaggctgctttggagaagctgaagaaggaacttgggctcagctgagccatttgataccgatagcatagcatatcatactgctgcaactataggtctatagccatctgcaactggcttggtgttcttacgaagttatttcttatactcaaatgttcttggatgcatgatacctatagccatcgcaacctgcttggttgtctgtgtgcaggtatttgatgtacccattcttgtcttcagaaggtgatggtagctcagatattgttagtttaggtgatacagctcacaagttcagggcatccagcctctttataagatgtttgtggtgtcttgggtgtgttctgcacttgtgaaatttttgggagtaaaagatgatatcctgttacacagtgtatgttgtcatttcgtgcggccaaaatgggtttaattttgacatttcgatgatgaatcttacatgaatgaattaatatgcagtgcttgtgtaattatgctgct

SEQ ID NO: 18883 - DNA, 2077 bp, Oryza sativa
  ref <308>: DATABASE ACCESSION NUMBER: AK069264
  ref <309>: DATABASE ENTRY DATE: 2001-12-06
gctattccgaactagtcctgctcctgcggatttcccaaccaccaccaccgcctccgctctatcaaccctcgctccgatccgcgccctccctgtctcctgtggtggatccgcgatggagcagcagccgctgctcgaggtagagcaatgtgtaacatctataccggaagatcatgaggccacttgttggggatgtggactccgtctcatttttgcaagttatgcacctgtttttaagtgtggctggtgtggagcaatcacacaaagtaaccaaatttcaagaaaacctgacagtgtatgcttttctcattggaggaatttccgggacaggttctttgtgactgtgcttatcctcttcatgctcttcgtcatatgtaggttccgagtctattgtcattagctttagataaaactttccatcttgacctctccatgtttatttgtttattcatgcaatttgtgctgctgttccatatgactaaacttgtctcacaggtggtggtgtctgggcgatatatccagttgttttctcgatcagcacattttgtggcatctttcattgcatattaacaggtctactagctgtatttaccatcacaagttattgcttggcctcttttaaatctgctggtgcaccggcagacatgcggtggggcagctatcccatggttgggaaaaatgatctggaaaactataccttctgtacatactgtagtaaaccaaagcccccaagggcacatcactgccgatcttgtaaaatgtgtgtgttagacatggatcatcattgcccatttattgggaactgtgtgggagcttcaaatcaccatgcttttgtaattttccttatttctgtggtcatcagttgtagttatgctgctggtatgaccatttattcaagttatcgtatatggcctccactagattttgaaaatctagcatcaactcgccgttcaatgggttatataaagatgctaattgagattattggtaccttggcaagctctgcattcttcttgtcagcaaggggttttgttacagtataccttgcatttgctagtctatcagttaacgctggtataggtgtgctgttgttccagcaacttagttatatatatgaaggaaatacataccttaaccgtttaagttcgccgaatgtcatgcacggcgagagaggcctgcaaaatcttattcgattttttgggtgcccctactcagtttccagagtattatcgggctactcaaacactggcaagttacaggacaattcgagctcaaaacttctttagagtggtagaatgtgtatattatcatttgaagaagcatttatgggccttcttacagatataatggttctgctgctgacgctaaaacagtggattgacagtcaatagcccattagtttgcttaactgaagctacttgtgaacataacattacacaaaatagtccacacaatctggtagaggacttcattttgaagggaagttatactgtcggcattagtcttgagctggaactattctcacattgatttacaggatgcaatttcagcagatgctgaaatacaatgtggttcaatatatttattgcctacagagcacggacaatcttgaggtgctgatggttgaggccataaattgctctatccgtaattgtgagcatcgtcagtacttgttctgtgtgaaagatcctagtctgatgcttcggtgttgcaggagaaatcaacgtgaagattaaatctggcagtgatttcagtgttgtaaaatgcttggaccacatctgcttgttgttgatccattaacacggtttataggaaaaggaaccccacggctgtttttgtactatttacacactaaactagccttaaattggtagtaatcttgtaaacgtgtcatatactgttccatgtgtcctttccagttttgccagattttatgtaattcattcaactgatctttttggccaggcaactgtaacgggacacagctcacgtatttaatattgctgctgcccttgtaaccatttgacctcattgttgttccttacggagtacggcctttcatgaaatcatcaaagtttgg

SEQ ID NO: 18884 - DNA, 3149 bp, Oryza sativa
  ref <308>: DATABASE ACCESSION NUMBER: AK069265
  ref <309>: DATABASE ENTRY DATE: 2001-12-06
gttgtgtgcctacaaggctagagtaaagaccttatcgctcttgctaaacatacatacgtgcaagcacagtgcctagctaatccatcagcagaatagaagggtggagggggtgggaagaggccaggcccctccgccccctggcgtcgctcttgctgatacttttcttgttctggtacatctgcacagataaattataatgccttttcatctcttctgtctgcttatggctttttaagataaaacagagcattgatcttgcatgctctacacttcgcgcactgtttgtttttgccaataagtttgcacacatgtagctgtcatttgggtaaacaaacttgcagatagtgccaaatagtcataagaaaataattttcatgggctcttcagataatacatttttattcgaatagattttacagtatcagatattaatcatccaagcatgcaaactgtgtcttgttatgtgttagcttctttatgaccaatacattttaagagctctgaactgtagcccttaagaatagtgaaaatataggcaacacttccacaccataaattgtcatggatgcaattggagcctgcaataatttcattaagttataattgatgtttcactaaagaactgagaatggatagatggatcatgtgcagaaaatctgagttaccctagtttaggaggtgtggtttgctcagcatcattttgttggcttgggggattgagttcaagacgagcaggagtgttggcttcctcgataaccgcaaagttgtatggagttgttgaatctcgattcgcttcattttctgcccctgtctcatagagctgaggagagagattagctgtcatcatataatgaagcgtatatcctgtgaaatcatctatctgcatttatcaagtaccttcttgtacagctcagcattttcttggcgaatcaggttgacctttctgtacagttccatgttttcttggtggatgagacttccctgcaaataagccagcaatagagttagcttactagctgattcaaagatttagcaattgtacatgatgttgtagaacctttcgattcagttcgtggatttcatcaatcatgagctggtcctgaaaacaacaatattgatcttaagttaatccattatataatcaatcaggtgcccaacaaaaaaatatggttagtaggttgaccttttttgtccggatgcagcgtatgctcatttctagctgattttctagagtttgcagttccttgacacccaatccagaaagatcttgccccatcaactgcctgccatcaaccaatggatgttatagtgttgttctgatgatatacagagtgaatattgacacttaattttagctgatcaacagacagctgttaattgataataaaaataatttgtacctttctagtttaggtattgtaaattaggcctgaaggacaaaatggagtgtttgaacaataatttaccaggcagaaagcacaggtgaagaaaatgtgatattcactctcctttgtaaatttggtctgtccgcctttgatgggtgctcagttctgtttttcttttagagataaccggaaatgcataaaaatcgaatggctgaaggtatatatttcttacttttaaatgatatagaaaattcacgtgccttcttcatttcttttgtttgtgaaggttaaacaatgcattatctataggaaatttggaatcagcatatatcactttcatactctgttttttcttcttttttctaagtatcatatacccaagcactaggtgcttgtttttatgatctggtactagtttatatttactatacaatcaggtgctggaagtattattgtcgctagcagttgctggattcatgagcaagtccccacaaaaaaaaaagttcgtcatcaagggttcatgatgcatgtatttcatagtagtagatatatgatggtttatgtttttctatcttgaggaattttctgatggaacattgaaaaacttgcagggttttatggccataccgatgattttcttgcaagctgtgcagttgttgtctcaagcttgctgcctccctttgccagaactattggatatgaaaacagagtcaagaaatgcagaatccaggtttgccaaaagcagcaatataaatatgttgtgtatacccatagaaacatgctgggttatcaactcactagtttttttttaaaaaaaaggaaactcaattacattagacaagaagactatttgaactgaggaagttattgtgtatggtaaaagaagtaacaagaggcaaacaaagaaatttgttgtaaacaaataagggaagtagtattatctttccagtttgaagacagtttttttttccagataagacgatgagctaccaactctattgaatttggtactccattatcagtcctcgttttgcggggtgttaccccctattgtaaaaagcttgtttgtctaagcaaaatgcttccaagtcccaccaaagctagattaactacaaagtatctgcagagtgcacaagtcaggtaaaaaacttgtttgtctaagcaaaatgcttccaagtcccaccaagctagattaactacaaagtatctgcagagtgcacaagtcagataaaaaacttgtttgtctaaacaaaatgctcccaagtcccaccaagctagattaactacaaagtatctgcagagtgcacaagtcaggtaagtgatgattatatcatcctggtacaagctttattgcggtgaaagataagcagttagtctgaaatctgtacagatctgtcagctgttaccgaagcaaaaggttcaatgtgaacttaaagatgcagtactgatccttttaagaggatttaacacagatttaacaggtacgtgccccttgtgattctttgttagttttcttgttataatgatgtttttatcctctgaattcaagcagggtgttctgtatgcgagctgtgatgggatggttctcttcagaagcattttattttaactaaattcagaagcatttcgatggcatgaggactgttcgattgacaatttgtatgtacatttccaccgtttacgcagcttaggaattggaccataattagttgtgtacctgcaagttttgtatacgaattatcctgaagggtgttcggtggattg

SEQ ID NO: 18885 - DNA, 2162 bp, Oryza sativa
  ref <308>: DATABASE ACCESSION NUMBER: AK069266
  ref <309>: DATABASE ENTRY DATE: 2001-12-06
gatcgcagcacacgaaaagagaaccagagagagagagagagagagagagagagagagaggagtggaagtggatcggggcatcgctgcggcgtcggggctgtgcagatcggaggaggtcatgaacgactaatctccgttcatttattatggacttgcaccagttattaaagtacagattgactggcgctaacgttgtgtacgaaattcctacagagaacaacttgcaaaactctccctggcaagctaacccactgaagtacgagttcagcgattccccatacacccctctctcttcccaatttgagtgtgacaatttgtctgctcttaccaacactccagataaccagagctctgcagaaaccatttcagcccaaccaatctccccattggaagcagacagctcatatagacaggcgggtattcttctccaggagaacattcaagtgggagctgatccgttgtatgctacatcaagacataatatgcaacacgccttacgggagattgagactgttctgatggcacctgatacagatgatgcaacaactagcaccgagcatgagtttgaggaaatcaagcctgctcagcttgtgaggcagcggtcgagaacatggagtcatgaatcacggcagccgttacctggagttggtcggtcacagtttgcatctggtggataccccacagcaagctatgaatttcgtccagagaaacggcaaagggagttaagggaagaccctcagataattgtgaagcagctattaaccaggtgtgctgaggctctgagtgaggacaggacagaggagttccataagcttgttcaggaggctcgtggagtggtctcaatcaacggggaaccaatccaacgtctaggtgcttacctactggagggtttggttgctagacatggaaactctggcacaaacatctaccgtgctctgaagtgccgtgagccagagagcaaggagctcctgtcctacatgagaattctatacaatatctgcccttacttcaagtttggctatatggcagccaatggggcgattgcagaagcattgagaactgagaacaatatccacataattgattttcagattgctcaagggactcaatggatcacactgatacaagcattagctgcaaggcctggtggtcctcctcgtgtgcggatcaccgggatagatgacccagtgtcagagtatgctcgtggtgaaggtcttgacattgtggggaaaatgttgaaaagcatgtctgaagaattcaaaatacctctggagtttacgcctctgtctgtctatgccacacaagtcacgaaagagatgcttgagatcaggccaggtgaagcactgtctgtaaacttcacactccagctacaccacaccccggacgagagcgtggatgtcaacaacccacgcgatggtctgctccggatggtgaaagggctgtccccgaaggtgactactttggtagagcaggagtcacacaccaacacaacgcctttcttgatgaggtttggggagaccatggagtactactccgccatgttcgagtcgatcgacgccaacctgccgcgggacaacaaggagaggatcagcgtggagcagcactgcctcgccaaggacatcgtcaacatcatcgcctgcgaggggaaggacagggtggagaggcatgagctgcttggcaagtggaagtcgaggctgaccatggccggcttcaggccttacccgttgagctcgtacgtcaactcggtgataaggaagcttctcgcctgctactccgataaatacacattggatgagaaggacggcgcgatgcttctcggctggaggagcagaaagctgatatctgcttctgcgtggcactgacagtagtatgttgagaagaagaaatgatagagagcatatatatacataccgattccctggtccaatttacagaatgataccctttgatgtaccctcagtttgattgacagcgggtgttgccttcatttatagaccaggatcaaacattgacattagatttgtagagaagttgtatgataataattttctttgcgattcaatgtatgatgtatccatggctgccatagttaataatattcttgcatagtcatattgatcggctaatcacccgtggattagcgttgtgtctgtcttgacaat

SEQ ID NO: 18886 - DNA, 923 bp, Oryza sativa
  ref <308>: DATABASE ACCESSION NUMBER: AK069267
  ref <309>: DATABASE ENTRY DATE: 2001-12-06
gggagtgggtgtatttggtccgccttgtgctgtcgtcgtcgacctaccctaccccgtggagtggaggcgtgtggatgattcgtcctcgtcgccgtcgtcgtggcgacgtgggcaaccgacgccgcctcccggctcccacggtcccacccgcggcatgcggtggcgtgtcgtggccgcacatccatatccatgtcatcctcatcctctgccccttgttcatcccccatcatccgcccatgtccctgattgattgaaattcattggaaagggacatcctcctccatatccaccacaacctgaacctgtggtccagattggggaacctcccagccaaattcatttcttggtttattctcatctgaggtcttcagtcaagtccctaagggctattcttaataagctacaagaagaagcaagcaacagatcatcattcaacggatatttcagttatatgatggttgagttgtcaacggcaaattggctgcgattcatgttgaaataaaattctgtgctgtccaatcttcatatttatcttaccagtcgtcagtcatcagagcttaggaaaaaaaaaatcaaagacagggctttcattttcctacgactcgcctttacaaagcagacgctgtcaacatggaaacatacactacggatgaagcgcttgaattcatggggtttgggaaattccaactacttgtgcttgcatatgcaggcatgggttgggtcgtagagtccatggaaattatgctattgtcatttgttgggccactggtgcgggaggaatggaacatttctgctgaaaatgagagtctgctctcaagtgtagtgtttgctggtatgctaataggagcttctggttggggttttgtgtctgacaaatatggaagaaggatttgcttactattttcaaccctgtttgccagtgg

SEQ ID NO: 18887 - DNA, 1604 bp, Oryza sativa
  ref <308>: DATABASE ACCESSION NUMBER: AK069268
  ref <309>: DATABASE ENTRY DATE: 2001-12-06
gtttatcaccatatattaacaaaggtgcggcctctaacgaggttcaacgcttctgcacctctgattttcacatggtatcagagcctatccatccacaaaatcgcatctaatccaactcatggcgagttcgtcgaagacggcggccgggaatcctctcggcgggaacgcgatctcggagaaactctccaaatcaaaccatgcgctatggaaagcgcaggtcatggcggctgtacgaggagctcgccttgaggggcatctcaccggtgccaccaaaactcccaacgccctgatcacgacgacagcaggcgacaagggagagaaagaagtcactgttcgcaatccagaatttgatgattgggttgcaaccgatcagcaggttctaggattcctgctctccaccctagctagagacgttctggcacaggtggccacctgcggcacggctgcagcagcatggcagatgctggaggagatgtactcctccgtcacgagggcgcgcttcatcaacactcgcatcgctctctccaacaccaagaagggcactctctccatcaacgagtatgtctccaagatgaaggccctcgctgatgagatgacggctgccggcaagatcgttgatgacgatgatctcatctcctacatcatcgccggcctcgacgacacgtatgaacctgtcatctccaccatcgttggcaaggacaccatgacgctgggagaagcctactctcagctgctcagctttgagcagcgtctcgcgcttcgtcacggtggagactcttctgtcaatttggcgaaccgaggacgtggcggtggtggaggacaacaacgcggcggcaacaccggcaacggcggccgcggccgtggcggcaacaacaatggcgctaaccgcggcaggggacgcggcaacaatggcggcgcacgaccaccgggaggcgtcgacaacagacctaaatgtcaactctgttacaagaggggacacacggtaatcaactgctggtatcgctatgatgaagattttgttcccgatgaaaaatatgcaggatcggcaacatcttatgggattgatacaaattggtacgtcgacacgagtgcgacggaccatgtgactggcgaactggacaagctcacggttcgcgatcgctacaaggggcaagatcaagttcacaccgcaagcggtgcaggatctggccacgaagaaacttctgtttaggggaccatgccgggggcgactgtacgctcttccatcttcatacctcatgaacgtcctcgtcctctaaaagaagcctttggagccatcaagccatcctttgagcgatggcacagtcgcctgggtcatccagcctctccaattgtggagaaagtcattagcaaaaataatcttccttgtttagctgagtcaaataaacagtcggtttgtgatgcatgtcaacagggtaaaagtcatcaattgccctattctagatcttctagtatgtcgagtcatcctttggaacttatttattctgatgtttggggtcctgccctcacttctgttgggggcaaacaatattatgtgagctttattggtgattatagtaaatttacttggctttatttgattaagc

SEQ ID NO: 18888 - DNA, 2839 bp, Oryza sativa
  ref <308>: DATABASE ACCESSION NUMBER: AK069269
  ref <309>: DATABASE ENTRY DATE: 2001-12-06
gtctcgtgtcttcccccttcttcgccggacgcacgcctcccctcctcctcctcctcctccacatccggccatcgccgcctcccatcatcctcctcctctagccgccgcacctcccccctccccctctccttcggccgacgccgccttccctcctcctcctcctccggacgccgcgccacccctcctcctactccggctgccactcctcttttcccattggcggcggcgctcccttcggctgggcgtggccggcgagcttccgtcctcttcgctggatggggtggcacgtgtagggcgacgagcttggggggcgtatctcgcggcgttggctctccccccaccggcgtcccctccctgcaaatcgaggcgcagggcgacgtgatcccctgcggcggcgcaaatcggctgcagccggcgcggggcctatctcgctctccagatccggccagacgcagagcggtggtggtggcagcgggggtgttcgctcgccgaagccatgccgcgcgaggacggcggccggagttgagggtggtggccggagttgaagacacgaaggtgggtttagttttgtgattcactttgttgtatttaaggtgttttattttgttttgattcgatattgcatatattgattttacatgttgcaatcgatatgttttgattgaatttggttgaaacactttcgtctatgcgatgaaacatttttctctggttgatgaaacatgtgaacatttttcaatgaaacattttgcaacaaccgtatgatgtttcagctttttatattttttgttgcactttattgtattaaggtgtttcattccattttgactttgatgtttgcatgaatttgatttcttggtgttacaatgcgccagtccatattgttgaatattgcatttagttgaaacaatcttcctcaaacgctgaaacatttttctctgggagtgaaacatctgaaacattttcattgaaacatttttttctgagggatgaaacatgtgaaacattcctcgataacatggtgcaacatcgtccggcgatttgcaccagatcggacatccgatccatagcagcctccggtttatctgctatctatctgcacatgtacaataaatagaagagaagagcttcaatcgcaatcggaatcggaatcgagtccgagccttacggcgtaccggagtgaggaagagaaaggggaagtggcggcttctatctctactgcggtcttaattgattgatgcatgggcctctgttccagcccatacacccgacctgctgagatacaaaggaataagctcatttgaagtacctgggtgtggattttcttccctcgatgggacgtcccctcgttgtttgcatgtcatctaaatagttattaaaaaatttgaaaaaaattgatatatttcaaattaatctatgttaccaaattgtttttcatattttttttatgtctatttaggcgacatgcacgaaatgagaggatatcccatatattccctcgagtgatgatttcactttccggaagtaccttaacttctacagtgagaggaggaaaaagaacaaaatcgaacaaagctgcaaagtttgacagattaattaaagaatcatcattactgcgatgcgaccattagcgttgagtattacatctctctagccagcgtcgccgatcatcaccggcggtagcactggacgtgcaggaagaatcctccgggaggatggcccttgctggccatcacctcgtgtgctacaagtgctacagtaatctacatttactaatgacggattgattataatcttttgtgtatgtttttctattataaactcttctattataaaattttaatgtgtttctgtaaaaaaaaatccgtatttttttccatcgtcgtgtcggtttatttcccacacgacgcaaccgcgctcactcagccaatctacgcattcgcttacagatacacgcgcgcccagctgaccatctgccccttaggctcttggctgccgcagctggacaatggccatgcctcacctgagccaaatggtctaatgggtttttcttttttttattattctctgttttcacctactcactttgatatatcttggtataaataaactggatgagatattatacaatatgtatggtaaatcccataactttatcaagccatgcatttttcatgtgacgtttgtggtgtgtattttttttccactgaaccacttttagctactccctccgtctcaaaatataagcatttttagcatagtgccaagtcaaccatttttaattttgactattgaaaggaaaaaaataaaaaaatatcaataatgtaaaattgatgttactagatttataattaatcaaactattataatatgcaactctttttatttataacattttatttttatagatattattggtcaaaataacatctcaaagaccgtgtcgagatccaaaaaatgcttatattttgggatagatgggatggaaggagtattgtttaattttctttcactgattcacctattgcatatgtaatacttctttttaagaaaatagctggcacatatttttcttaattatttttcttttttgttttccttaatttttggtgcatcttacgtttgtcgtcggcacatcccctcttatcatcgtaatattttctctcttttctcgctctgtccataagtcttgtatcagttttcttccagagttcttgtggacaacacatgaaaagagatgtcctgtacataaaaattacaactatgcctataaaagcccaagcattatgggcaagaatatgtagtacattttgattttctatactcactgtgatgatgc

SEQ ID NO: 18889 - DNA, 2241 bp, Oryza sativa
  ref <308>: DATABASE ACCESSION NUMBER: AK069270
  ref <309>: DATABASE ENTRY DATE: 2001-12-06
gctttcttgtctactagtcttctactggagtaggttctacgagacacaaattagacaggagagatcgagtttgaaggcaggaaggcaggcgatggcgagcatggagggtctgatcggcctgatgaaccgcatccagcgagcctgcaccgccctcggagaccacggaggtggagaaggagccaacctccctaccctctgggagtctctccccaccatcgccgtcgtcggaggccagagttcgggcaagtcctccgtgctagagagcattgttggcagagatttccttccccgtggttctggaatcgtgacacgggggcattagttcttcagctgcatcagatcgacaaaggggcccacgattatgcagagttcttacacttgcccaaaacaaggttttcagattttgctcttgttcgtcaagaaattgcagatgagacagatagagtgactgggaaaactaaacaaatatcccctgtgccaatacatctcagcatctactcacccaacgtcgtgaacttaacattgattgatcttcctggattgacaaaagtcgctgtagagggacaacctgaaagtgttgttcatgatatagagaatatggttcggtcgtatgttgagaagcccaattgtatcattttggctatatctccagcaaaccaggacattgccacttctgatgccattaagctttcgaaggaggttgacccatcaggtgagaggacattcggtgtgttgacaaagttggacttgatggacaagggaacaaacgctcttgatgttcttgagggaagagcctatcgtcttcagtatccgtgggttggaattgtcaaccgctcacaagcagatattaacaggaaagttggtatgattgttgcaagagaaaaggaaagagagtattttgaaaatagtcctgattatgcacacctagccagtaagatgggttctgtgtatctagctaagcttctttctcagcatcttgaagccgttattaaagcacgcattcctagcatcacatcattaatcaacaaaactatagatgaacttgaatcggagctggataccattgggaaagaagtggctgctgatccaggggctcaactgtacactatattggagctctgtcgtgcttttgaccgtgttttcaaggaacatctggacggagggagatcaggtggtgataaaatttatggcgtgtttgatcataagctccctgccgcttttaggaagctgccttttgatcgttatctatccgtgcaaaatgtgaagaaggtggtatcagaagcagatggctatcagcctcatcttattgctcctgaacaaggttaccgtcgtcttgttgaagccggccttgcgtatttcaagggaccagctgaagctacagtcgatgcggtccatgttgttttaagggacttggtgaggaaatccataggagagacagagccactgagaagattccctaccctgcaagctgcgattgcaactgctgctaatgaagctctggaaaggtttcgggaggatggacgtagcactgcacttcggcttgttgacatggaggcatatttgacagtggaattcttccggaaactcccgcaagatccagatagtggcagcaaggttgggaataataccaatgaatccaatggctcaggctcaggctcagtgacagtggaccgctacggcgacgggcactacaggaatatcgcgtccaatgtgtcccagtacataaagatggtgggagaccaactgttacacaagatcccaaaggcggtggtgcactgtcaggtccgagaagccaagaggtctctgcttaaccatttctacgtgcacatcgggaagaaagaggcgagccagtttgggcatttactggatgaggacccagcgatgcttgagcgtaggcagcaatgctggaagaggttggagctgtacaaatcggctagggatgaaatcgactctgtcgcatggaccaggtagacacaaacatatacatggtggctagtatcttttgtcgcagctgcgtgtagtttggtttgggcagatctaacttccatttgtcaggcaggcactattttcccttggtatatagtatatactatactatcttacgaattgatggacgttatatatctgtatattttgtcagtagatcatccttcgtacatgtgcaccccgacccgtgccatgctggtttcaacagtttttcttttgttattctttctagtggttggcttctctctgttgtct

SEQ ID NO: 18890 - DNA, 1147 bp, Oryza sativa
  ref <308>: DATABASE ACCESSION NUMBER: AK069271
  ref <309>: DATABASE ENTRY DATE: 2001-12-06
gacccgcccaaacccatcctccgccgccaacgcgccgagagcaaaaaaagagaagcaccgggatgctgtacatcgtggggctcggcctcggcgacgagcgcgacatcaccgtgcgggggctcgacgccgtccgccgctgcgccaaggtctacatggaggcctacacctccctcctttccctcggcctcgacccctccgcgctctccaacctcgagaagatgtatgggaaggagatcacggtggcggaccgcgagatggtggaggagcgcgccgaccagatgctccgcgaggccgccgacgcggacgtcgccttcctcgtcgtcggcgaccccttcggcgcaactacacacactgatctggtggttcgcgccaagaacatgggggtggaagtgaaggtgatccacaatgcgtccgtcatgaatgcagttggagtttgcggattgcaactttaccgctacggggagaccatctctatacctttcttcacggagacatggaggccggacagtttctatgagaagattcagaacaatcgacggcttggactgcacacactttgcttactagatattcgtgttaaggaaccaacgcttgagtctttatgcaggggaaagaaagtgtctgaaccaccaaggttcatgtctgtaaacaccgcaataagtcagcttttggaggtggaggaactgcgtgggggatctgcatatggcgcagattcactatgcataggtgttgctcgccttggaagtgatgatcagaagatcgtcgctggacctatgaagaaactactagatgtcgatttcggcccaccccttcactgccttatcatagtgggagagacgcatcctgtggaagaagagatgatagaattccacatgatcaagtcatgatgaatgaaagtgcttttatggccttgtagctggatacatgatcccaggcttatagctcccttgaaacgatacttcgatgcttccgcccgccgtgaaaggtccaccagtagtagtttactgctccaattgttgctcatttttaagttaaactgggatcagctgttgttctttttttggcctgataccgaatactctcaaaccagtattgaaccttgtttacattgtgtgagctcatatttgaatgtgttcgtgcataaacc

SEQ ID NO: 18891 - DNA, 2560 bp, Oryza sativa
  ref <308>: DATABASE ACCESSION NUMBER: AK069272
  ref <309>: DATABASE ENTRY DATE: 2001-12-06
gagagggcaccaaaaatactcgcgcaaatccgaaaagaaaaacaaaagaaaaaggaaaaaaaaggggggaaaactcaggaagacgactcctcgccgccgacctacccgagcgaggagcaccccggcgggcggcggcgcgtggcggatcgcgcggtttccggctccgagcctccccctcccctctctctctcctgggctcgtcgtagtcgcggcgggcgcgggaggtggtctccggcggcggcggggcgcgtggtatggtccgtggcggcggcgggggctcgaccacccggtgaagtttttttttttcttctccccgatgctacggctggtggggatcggcgagaggctgttggcagtcggaacaaatagacgggcagcctatttttcccagccgagccacaggagtggctactacacagcagcgagggacaatggattgtcggcaaagcgaaagattccaactgtcttctctagaatgttctcacattacaaggtaattgtcaggaagaacaaagctggggatcacaagtgcagaaataggatttcaaggggattccgtaccttctctgggacagtcgcgaattcatcggcaacacagcacgcccaattggcatggaagcggctcagtcatacatacatgtacagcggaccccggtttccattgatcagccgagcagcctgtgctctaagcttttccttcacgaggttccatgttgtccctggggtcatggctctagcatttggcaagtttgcattgtcacggcctgtcctggcagattcaccacacctgcccacaatggaaggtattgtcacaaatgcgcgggatactcgccagtttctgtcatccatagtttggtcaatctgggagggtgtcactttgcttattagagctgtgcatttggcaatcttgttcttccctgcaactgcattgtctccatttgctgatactttcagtgttggatttagaaggagatggcttcgtcttgtgcgccgtacccttgaaatagctgggccagcatttatcaagtggggtcagtgggctgcaacacgacctgatctttttccaagtgatctctgtgttgagcttgccaagcttcatagtgcagctccagcacatggatttgcttacagcaaagctaccattgagaaggcgtttggtcgtaaactttctgaaatatttgagacttttgaggaggaacctgtagcttctggaagtattgcacaagtacatcgagctacattaagagatcaacatactgaaaagcatgttgctgttaaggtgaggcatcctggtgggtgaatcaatcaagaaagactttttactcatcaatcttctggcgaaagcttcgaatgttgtccctgggttgagctggctgaggctggatgagagtgtccgtcaatttgctgttttcatgatgtctcaagttgacctttcaagggaagctgctcatttgagtcgttttatctacaatttccgcagatggagacatgtgtctttcccaaagccattatatccactagttcatccatctgtccttgttgagacgtttgagaatggagaaagtgtttctcgttttatggatgagattgaaggaaatgctcggatgaagagagatcttgcccacattggcacatatgcattcttgaagatgcttctggaggacaattttattcatgcggatatgcatcctgggaacattcttgtccgtctaaatgagagaaaacctaagaggaaactgtttttcagacctaagccccatattgtgtttcttgatgtgggcatgactgctgaactcacccgagatgaccgtgataacttacaacagttcttcaaggcagtggccaccagggatggtcgtactgctgctaactgtactctgcaattatcaaaacagcaaagctgtccaaacccagttgcctttattgaggaattggataagacattttcgttctggggaacgcctgaaggggacattttccatcctgttgaatgcatgcatcaactgcttgacacagttcggcgccacaaagtcaacattgatgggaatatctgtactgtaatggtcacgattctggttcttgaggggtggcaacgcaagctagacccaggctttgatatcatgcacacgttgaagactctactactagacaaggatataaagcaaccagttgattttttctcataaacaagttcatgctttcaagtgccaaatctacgagcctcagaatatgcatatatacagcagagaaaggtgatgacaccatgggacagaagttcgcaaaccaagcaatctatactaatgccttatgtcatgttatgttctctctctttttttttaaacaacctctctacctgcaacttacggcattgggtttcacatttgacaaccttcagtgctaaaattttgtccagcgccttggtggagtaagccaccaaaattccttgtgctaaaatctcttatcgagaaacaaaccctgttagatgtagcaaccgaatattgataacgagcagaattacgttgcagattatacagaattttacttcctgctatgctgctgc

SEQ ID NO: 18892 - DNA, 1312 bp, Oryza sativa
  ref <308>: DATABASE ACCESSION NUMBER: AK069273
  ref <309>: DATABASE ENTRY DATE: 2001-12-06
cactcccgcttccatctaatcgcttctccaccggagctgctttagggcgacggcgagatcgattcgacgggaagccagccatgggaggggggtccatccgcgcggcggcgaaggccgccatgatcgggggctaccgctccgcctcggccgtgcgccgcgccgtcctcccggcctccccggcgccccagacagccccatcggcggcgggcgagggccgcaaggcggcgtccacctacgcggcgatcgacgactgggtcatcccggaccgcgaggtgttcggccccgtgcccacccacgaggaggccatggccgccaccctcgacctcaaggagtccttccagtttgctaagtctgctcaattggagcctctcccctctggtgaccttgatgtccctacaaaggtgggtcaggagggtcttgttcactcagaaacacctcaggatcttgttcattcagaaacacagggtcttgttgatttaggagcatcccaggatcttgttcattcggaaacatctcagggtcttgttcattcggaatcatctcagggtcttattcattcaaaaacttctgagcatgaggataaccatgaaatttcacttgtttcctctggagcccctggacgcgttgtgcaagcgttcacaatgctacaggatagccctgaagcacaggaagttgttgcctcacttgcttctgatcagaatgtttggaacgctgtaatgaggaatgaaaaggttatgaagttttacaagacctatgcgacgaagcttaacgaagatgaggtcgaaggcagtgagtcagactccgtgcagaacagcagtgagttgggcagcgctggagaagcgttcatgtgctacgtggagaaaatgaaggcactggtgtctgagatgatgacgaacctttcaagcattatgcaagatctagttgcaacctcggacgagggccagagcaaggggaagctgaagactatgatcctggactccaagaaagattttgcaaatgctccatcagccttcgtcctcttggctattgcttcgatcatggtagttttacttaagcgcgcgtaggccatttgcccagtcataatgataaaataataaggtaggattctttggtgttcaggacattcgggttcttttttttggtcagatttttttttcttctcagttcaacaagtagttgactgtacgaatgaatcctcgtaatcgtgttcacctgatacattgagagacatcgcgagagcttgaagtctttggtattgtaaagttttcactctccttataatataaagccagcttttgctggatctttcagg

SEQ ID NO: 18893 - DNA, 1666 bp, Oryza sativa
  ref <308>: DATABASE ACCESSION NUMBER: AK069274
  ref <309>: DATABASE ENTRY DATE: 2001-12-06
tttctcaatcgctctcaccgcttcgaggagagaaaacatttcttgcttgacgagctgagctgagctgagcagaggagctcccaccttctctccctctgttgcaagggatctttcggagattttgttagttcatggcggagatttgctgcgaggttgtggctggatcgtcgtcggaggggaagggcccggagtgcgacaccgggagccgagcggcgaggcggcggcggatggagatccggcggctcagggtggtcgcggagcgtggggcggaggaggagacctccgggaagaggcggaggcttgatggcggcgggggagaggcctcgacggacgaggaggacagggaggtggagcgcgctaggtacggctttacgtcggtgtgcggacgccggagggacatggaggactccgtctccgcctgcccggggttcctccccggccaccacttcttcggggtgttcgacggccacggctgctctcatgtggcgacgtcgtgcgggcagcggatgcacgagatcgtggtcgacgaggccggcgccgccgctgggtcggcggggttggacgaggaggcgcggtggaggggcgtcatggagaggagcttcgcgcggatggacgcggaggccgtggcctcgtcacgggggagcgtcgccccggcccccacctgccggtgcgagatgcagctgcccaagtgcgaccacgtcggctcaacggccgtcgtcgccgttctgggccctcgccacgtcgtcgtcgccaactgcggcgactcgcgcgccgtcctctgccgcggtggcgccgccatacccctctcatgcgaccataagccggaccggcccgacgagctcgaacggatccacgcggcgggagggcgcgtcatcttctgggacggcgcccgagtctttggcatgctcgccatgtcacgagccatcggggacagctatttgaagccgtacgtgatatgcgacccggaggtgagggtgatggagaggaaggacggcgaggacgagttcctcatcctggccagcgacggcctgtgggacgtggtgagcaacgaggttgcctgcaacgtcgtgcgcgcctgcctgcggagcagcgggcggcgcgagaggaaccggtcgagcccgacgtccaacctaagcccgaggcagagcagcagcagcggcgacgaggcgcccaacgacggtgctccttccgccgccgctggctcggagagcgacgaggagagcgccgccgaggaggacaaggcgtgcgccgaggcggccgtcctgctgaccaagctggctttggcgcggcaaacctcggacaatgtcagcgtcgtcgtcgtaaatctcaggcgccggaaattgtgacaagtggatccatcagacatactactcctctcggtttcctggccatctctaactcgaattcacctggacgaagccgtgatcaaacagaacgttccgaattatgtgatcaaacagaatgtggcatcctcaaagcatataattgcagattattatagcattatttcgttcacttcctttctttgggcgtttgtgatctcgtcagacagatcagcccgctccttatttcagcaaaaaaagctcatgtgtttccgatgtttgaagagaaacttcctcaagcgtcagagaaattgtagtataattgagtgtcccctttgctcgtg

SEQ ID NO: 18894 - DNA, 962 bp, Oryza sativa
  ref <308>: DATABASE ACCESSION NUMBER: AK069275
  ref <309>: DATABASE ENTRY DATE: 2001-12-06
gctcctcttcttccgtcgccggcgcggggagctgctcgtcgccggcgcgcggtgatggcggaggactccggcgccatcctccgccacatatcctccctcaaggacatgcttgacaaggtcaacgaagagattgaagagaatattcgaaagacaagggaaatagagtcagaaatagtgaagcattctgaaactgaaaaggagtatatcatgaaagagcctgaactaatgaaaggggtatcaattgctgagtttgaactcaatggcattatacaagtggctgctgctgaaacagactcacttaaagtgatggaaggcaatttggaattccagaaagctactctgaatggaattaggaaaagattttctaataaaatggaaaagttcatcaatgaatctaaggggttccaggctaacatgcttggagatttgaacaaggatttagttcttttacttaaggagaaaggttcgctaggggatgagagtgagaacttgaaaatgaagatcaacgcaatagaaagttcgtcacgtgattactttgctgacattcttgaggagctaaatatggaaaattcagttttggaatctgaattacagtataagatttcagaatacatggatgttatgaaggatataagcaatctgaaggctctatttagttcgatcaattcttagtaacaatattcatcggtggaggtatcctacctaatcacgaagtatatgtagaggcatagcatgtagcattctggctggagtaagaattcccaattttgttttagagcattcctgatttttctccgttcaaggaatcattatcttgtatagagcagagtgcgaataaaatcaaattggttttgctttacaaattggcccttgcacctatcaaatcaaattggtttggctttactgggccacctcttgtgtattttcttagatcacccgtggcaatgaaatgaagatcgtcc

SEQ ID NO: 18895 - DNA, 1324 bp, Oryza sativa
  ref <308>: DATABASE ACCESSION NUMBER: AK069276
  ref <309>: DATABASE ENTRY DATE: 2001-12-06
gggatgttgttgctactgttgttttggaagcgatagcttggagttgtaaggtgaggtgaggtgcagggtggtcgatcagtaggtggaaaggaggaatcgaggagatggacggcgagattggggaggacatgctcacggagattctggtgaggctgccgtacaagtcgctggcgaggttccagtgcgtggccacgtcgtggcggcgcctcatctccggcgactacctccgccggaggctgccgctcatcacctccggtgtgctgtaccaggaaggccggggcggcggcggcggcggcggcggcgaagggaggaggaggcaggcgtacacgtacgcgtgcgcgtcggggggtggtgaccacggcggcggcgtggcggaggccgacatgggattcttccccgggcacgagacgtccaccatcatcgacgggtgcaacggcatgctgctgtactacgcatcgcaaccggcggcggcgttccacgtcgtgaacccgacgacgcggcggtgggcgaggctgccgccgccgcgcgggaagacgctgctgtccgtgctggcgttcgacccctccgcgtccccgcactacagggtggtgtgcttcaccgggtggctcccccgcggcgcgtccgtcgaggtgttcgactccgagggcggcgcgtggcgcgaccacgagctcgacttcgggctcgacaccgacgccatgtcggccaccatgcactacttcgacggcgcgatccacgtgctggcctactcgggccacgtcgtccgcatcgacctcgggaccatggcgtgcgcggtgaccgcgctcccggccccggtcagctgccgggcgcgcgccgggcactgccgtggccgcctccggtacgcgtccagcgacggcacgcgcctcaagttctgggagctcaagaacgcggccacatcggagtgggcactgaagcacgagctgggggtcaatgacctcgtcgccggcgaggcgagcggagcttgccaggccgtcaccttcttgttcatggcgttccacccggacagggagatggtgtacctgtggacgccatggaagctcgtggcgttcgacatggagaagaggcgcgtcgaggaggagtgggaggtcgggccggagaaggagaaggaaggcgcgcatctcattcagatttggctgtttccgttctcgcgccatctggccaacagcttggcctgattggtctatgtggctgataggctggccggcgatgttgacaatggcatgtgggcccaatgcttgtctgcaacattgggcacaatgccgttccgttcgagtgtccaactgtacaaagaaggtacaagacaacc

SEQ ID NO: 18896 - DNA, 1141 bp, Oryza sativa
  ref <308>: DATABASE ACCESSION NUMBER: AK069277
  ref <309>: DATABASE ENTRY DATE: 2001-12-06
gggatgagcctctcagatccatcgatggcggcggactccgactggccacggcgcctcgctccgatggccaaagcgacgggctaggaagaggtgggcggtagatcatgtcgtcgttgcgtcgtcatcgttgttcttcgtcgacatcctcgtcaccctcatcgaggtccactgccgtcgccgggcctcctaccgcccggcttcctcctccggcctcgctaggggatctcgtcactggtgccctccccatcctcaggctcgtcgtcatgggactgcgccgccgcggtccccgtcgcggcacccccgactcccttcggctcctaggccgccgccacctccactgctacctcggcttcctccgaccaacactcacctaccagcggctcgatctgcggggctcccatggcgatagagggcctttgggcctgcatccgccgctgtttttccaccattggttgcccgccatgctggagcagcaagatgggatggatctgacggggaggaaggatttatttctttgatccgcatccaaagtcagccatgtggagagcgtcgtcggtgaccatgatgcgaggcggcggcgtgggtaccggtttcaggtgcccgtagtggagtccatcaccccgcatctggcggaggatctaccatggtggtgaagccatgggcgcatgccccgtcatcaccccagcatgaccacttcctccaagaatctaccatggctgcacgcaaggaggctgcccacggcttcacctccgctgccgcctggccggatgccagaatcggcgggcgtcgctgtcgaaggcaggcttcaattctcccggcgaggcttctccatcattttgtgattgtcagccttgctctcctatgttcctgctttctacttgtcgggcttgtaagcacttcatttttgtgctcgccctttcagcaccatctcaagaccggcggcgacctcgccgagagagcagtaggccgctgttcctccaatgttcaaagaatgttttcctgcatatatatattttgggttcgtttgatgtgtaaattttatatccgtacaacgattcattatcctctctcccagtttgtatttcttgtctactttcttgcgttcttttgatgtgtacaatatgattgatttgcatgattg

SEQ ID NO: 18897 - DNA, 1271 bp, Oryza sativa
  ref <308>: DATABASE ACCESSION NUMBER: AK069278
  ref <309>: DATABASE ENTRY DATE: 2001-12-06
gacttcactaggcgagaaagagattatcactgttgtttttttcgttttcttgcttgcggcaagcaaagcaaagctaagctaagccagccgaacaatggagaaggccgctggattcctctcctccctcctcggcggcggcgaggaggtgccgccagagccggcggcgacggtgaggtcgatcctgatataccccatcaagtcatgcaggggaatctccgtgccccaggccccaatcacctccactgggttccggtgggatcggcagtgggtggtggtgaactccaaggggagggcctacacgcagagggtggagcccaagctcgcgctggtggaggtggagatgccgccggaggcattcgccgaggagtggcggccgaccgccgattcctacttggttggaagagcacctggaatggacccattgaagatccctctcagtgctgaacaagccataattaatgatgtctctgtatgggagtggtctggttctgcttatgatgaaggagctgaggcggccgagtggttttccagttacttcgggaacccaagtcgtctagtgcgtttcaaagaagggtcggaaatcagaccaactaatcctgactatgctcaaggctacaaaattatgtttacagattgcttcccgtttctgatggcctcccagggttcattggatgcactaaatgaggttctgaaagaacctgtaccgatgaaccgcttcaggccaaacattttggtggatggatgccacccatactcagaggatctatggaaaaccataaaaataaacaagttaacatttcagggtgtcaagttatgcaaccgctgcaaggtgcctaccattaaccaagaaaatgggatacttggcactgaaccaacagaaactctactgacattccggtccgatgaagttctacgtccaagccacaaaaacaaacggcaggtctactttgggcaaaatttagtctgcaaggaatctctgtctgcaaagggcaaaggaaggatcatcaaggtcagcgatccggtttatgttcttgagagattcccttcttccgatgaagctccagcatgagcaaaggacatactggcagctgttcagagacctagtagtactgtagaatgctgaatttctcggcatcattgtaaattttatgctgcaacaaggcttgagaaaatgtgttttattatgtggcagaataaacagtaccatctggcactgaaaactgttgctcatacaattgatattcagtgatcatagttattcctaatatagc

SEQ ID NO: 18898 - DNA, 2380 bp, Oryza sativa
  ref <308>: DATABASE ACCESSION NUMBER: AK069279
  ref <309>: DATABASE ENTRY DATE: 2001-12-06
tgctctttcccttccccatcctcctccccattgcgctgggtaggattccaatgtgggggactagggtttagggtttggagtcaatcccagaccgcgcccatgacgtcctcgtctcgagtaagggttggcaatctagtccccctcaatgaaggaaatgcgagctcgtcaaatggatcggtgtcaagcattcctatctatctgggtgccaatgttgtagggaggaatcatttggtggtcgtcgacaagagagtcagccgcaagcatctgagcctacatgcctcggcggatggttccattgaagcggtagtggaaggaccaaatcctatcattgttcgatctgagggccagaggaggaaggtctgtgctcaagagagagtaaagattgcacatgatgatgtcctggaactcatccctggtgaatattttgtgaagtatttgaatgtgggcgataaccataaaagttccacatcaatgggttcaagtgattttaaaaaggggaagaggctctgtgaggatgatactgtagttatcaaaagaaatcgtcagattatggaagatgaggctttggcaagaagtttacagaaaagctttgcagaagaaagttcaactatttccggtttgggttgtgatcaaatgttaagttcacttgatagtgctggtttttctgagagaaataacgagagaatacactctgttgattatctgaaagatgtactttcattgacttttcggctcatgcgtgtccaaggtcttccttcatggactaatacttcctcagttaccattcaagatgtcatacagggtgaagtgcttcttgctgtactctcaaattatatggtggacatggaatggctgcttacagcatgtccaagcttaaggaaagttcgacatgtcctagttatacatggagaagatggtgcatcagtggagcttctgaagaaagtgaagccagccaattggatccttcacaagcctccacttccaatttcatttggaacacatcattcaaaggccatgctgcttgtatatcctcaagggattcgtgttgttgtgcacacagcaaatttgatacatgtcgactggaataacaaaactcaggggctatggatgcaagattttccctggaaagatgcaaaagatgtgaatagaagtgtttcctttgaaaacgatttggttgattatctgagtgcaattaagtggcctgagttcagggtaaatttaccagtggttggtgatgtcaacatcaatgcagcattctttaggaagtttgattataagagctcatcggtcaggttgattggatccgttcctggttatcatgttggccccaatattaaaaagtggggtcatatgaagcttaggagtgttcttgaagggtgcacatttgaacaacagttttgcaaggctcccatgatttatcagttctcttccttggggtcacttgatgagaaatggatgagtgagtttgcattctcactatcagctggtaaatcagataatggttcacctttgggtattggtaaaccactgattgtctggcctacagtggaggatgttaggacatcaatagagggttatgcagctggtagttgcattccaagccctcaaaagaatgttgaaaaagatttcttgaggaagtattgggccaggtggaaagcggaccatgtgggtcgttgtcgtgcgatgcctcacataaaaacttttactcgatacaatggtcaagacattgcatggtttctactaacctcggcaaatttaagcaaagctgcttggggtgcgttgcagaagaataatacacaactgatgatacgctcatatgagttaggtgtactgttcttgcccaaaactcaccaatctgtaccacaattttcatgtacggggaagaacaattcaaacctgaataacctggcccctgggaaagagatcaaaaccaaactggtcacactctgctggaaaagcgacgaagaaaaagaacaatccacggaaattatcagattgccagtgccatatcaacttcctccaaagccttacggcacagaagatgtcccatggtcttgggacaagaggtacacaaagaaggacgtgtatggttcagtctggccgcgccatggttagctaagcggtatgcggacaatatatgatcaatgaaaggctaaccctgctccgatgtcgacaacaagaaggccggtagctgatcgcctgtcagtgcccactactcaaccattagcaggaagtagtactatttcctgggagagattagatatttctattactaatttgtacgagcacaggatattttctttcttgttggtacgaatcgtgtgccttgtctgcttccgatcgtgatgtttatgcctccatcctcttttacagagtagtt

SEQ ID NO: 18899 - DNA, 1157 bp, Oryza sativa
  ref <308>: DATABASE ACCESSION NUMBER: AK069280
  ref <309>: DATABASE ENTRY DATE: 2001-12-06
gcagtggacggtttcagatattgctctatcacctgatcagcaattacttgcatattccagtttgtcgcctactgttcacatagtgaatgtgcagagttctgcaaaggaatcacaagctaatgttactgaaattcatgatggtttggagttttctaatgatgacgatgatgaatattcttttggaatattttctgtgaagttttcaaaggatggtcaagaaattgttgttggcaatagtgatagatctataaatgtttatgatcttagagcaaataaagtgtctgttcgcatccgtgctcatgcggctgatgtcaatgcagtcaccttcgctgatgaaagtggtaatctattgtactctggaagtgatgataatctctgtaaggtgtgggataggcggtgccttgctagagaaaaaccagcaggtgttttgacaggacatttagatgggattacatttattgatagccgtggtgatggacgttatttcatatccaactgcaaggaccaaacgatcaaactttgggatgtgaggaaaatgtccgcttctattaaaggccgtcaaccgagattttttgactgggattacagatggatgtcattcccgttggaagctcgacactgtaagcatccaaacgatcagtctctggccacatacagaggccattcagttctgcggacacttatccgttgctacttctccccagtgtacagcacgggtcagagatacatatacacaggatccagcgacgagtatgtctacatctatgacgtggtaactggggatatcgtcgagaagctttcgtggcatggatcgatcatcagggactgtacctggcatccttacaacctgacaatcgtcagctcttcctgggacggctacctggcaaggtgggaggcatcaggggacgaggacgacctttctgtgctcacggaaaacgaacagaggacgagtccttaccgtcagtcgtacacacggcaccttctgctgtagggaagagaagtcattttggtttcctgtaaggagttgtgatgttgctacatctgtaatcgcctgattgcaatgctcattgcaacagtgtataggactgggtgctgccaaactgcattttctgttgtagagaggccattggtcgcctgcaaagagttatatttgtgcc

SEQ ID NO: 18900 - DNA, 1415 bp, Oryza sativa
  ref <308>: DATABASE ACCESSION NUMBER: AK069281
  ref <309>: DATABASE ENTRY DATE: 2001-12-06
gtggtacagagcagagcacagcagaggagatcgagcagagacagacagacccgcaggcggaagcggaggcagggcaggcaggcagcagcaacaatcccccacctgcgcgtgtgcgtgtctgtttcggtgcttcctcctcctcctcgccatggcgctcctcctcctccgacgcggcggcggcttcgctgcggccacggtcctcgcggtcgtcgtcgtcgcgctcgtcctctcctgcggtggtggcgcggaggcggccgtgagggacctcagggtcgggtactacgccgagacgtgccccgacgccgaggccgtcgtccgcgacaccatggcccgggcacgcgcgcacgaggcccgcagcgtcgcgtccgtcatgcgcctccagttccacgactgcttcgtcaacgggtgcgacgggtcggtgctgatggacgcaacgccgacgatggcgggggagaaggaggcgctctccaacatcaactcgctccgctccttcgacgtcgtcgacgagatcaaggaggcgctggaggagcgctgccctggcgtcgtctcctgcgccgacatcatcgtcatggccgcccgcgacgccgtcgccctgacaggtgggcccttctgggacgtgaggcttgggcgcgaggacagcctgacggcgagccaggaggactcggacaacatcatgccgagcccacgcgccaacgccaccaccctcatcaagctcttcgccggctacaacctcaccgtcaccgacctcgtcgcgctctccggctcgcactccatcggcgaggcccgctgcttctccatcgtcttccgcctctacaaccagtccggctccggcggcccgaccccaacatggaccccgcctaccgcgcggggctcgactcgctctgcccccgcggcggcgacgagaacgtcaccggaggcatggacgccaccccgctcgtcttcgacaaccagtacttcaaggacctcgtccgcctccgcggcttcctcaactccgaccagacgctcttctccgacaacgccgggacccggctcgccgtgaggaaattcggcgaggaccagggcgccttcttcagggccttcgtcgaagggatgatcaagatgggggagctgcagaaccccaggaagggagagatacgacgcaactgccgtgtcgccaatgccccggcgccgccgcctgtggaggcggaggtggcggcgacgtccaaggcggtggtcctggtggacttctgacgaacgagctgctagtcccctgactccccagctgttggtgttcgagaggagctgctcagatatgagagtgttgtggctattcatatatgagtttttggtccgatggcaggtttgcacctacctgtaagcttgtgatttcagggttacccgcttattgccgattattgaatggtgataaataactg

SEQ ID NO: 18901 - DNA, 1601 bp, Oryza sativa
  ref <308>: DATABASE ACCESSION NUMBER: AK069282
  ref <309>: DATABASE ENTRY DATE: 2001-12-06
gagtgtcctcctccagtcctcctcggcctttccccccgccacaaaaccctagagcgcgaatggggcggcaggtgcgcaagcacgagggctcgcacggcaaggtggacgcgccgccgccgaagaagccgaggagcaccgagcggccattggcaccgctcgccgccgccacgacgaccgccaagccaaggcgtgacgtggtgagacccgcggcgaggaaatcctcggcttcgagcgatcgcggccccgtcgcccccggcagcgacctcgagacggaagattcagatggtcttggctgcttgacccctgacagcacgaaagctacgcttcagcaggatgattatgggaaaggggagtactctccgggtgtggttctatctaagactggtatgtttaggtttgccggttctgttgcttttgtgttaatcatatttagtttccttgctgagttttgaaaattctcctttttatgagggagattctgtggtgaagatggcagtagctgatgtacaggacctgcctgttgaagatttgagggataatgaagtgatcactgtggatagtgaaggccctggcaagcctctccagtcaattccccttgttcaagacaaggatgcaatacaacttgcgagaacttttgtcaatgagaaagtcaaagagctaatggaaggtgtctcagagccaggagtcctgcagagtcgtttgtctaaaatcacctcattccttgttcaggccacctctatagctgccggcctccatgatgaagtccctctacaaatacgtggacaaactgctgctttggtgacccaaatctcagggcttgagcagcaggtggaggagctgtccaagaagctgtgtagcactgaggatgagcttgaggtgaccaatgcaatgttgaaagagacccaggctgccatgctagaggcacaatcagaccgagcgaccgccattactgccatgaacagccttgccatgcgcatgggagcttcattcgctaggctgggcacaatactggaccccccacccaatgcggctgactctctggagaagagcattaagcagatgacagccctcgtgtctctcctcggccctgtgtctcacagccatagcttgagtctagccaggagcagcctgacggttgggattgcggcattgctgtgtcgagaaaggggcattgagggcctgcgcgagccgtcgggtatggatacccgtcagtttgtccgctcgcaggggcctgagttccactccctgatctctcaagttgtcgactccatggagcagcggttggccaagatggttgaaggcagtggatggagagattctggagctaccaaagagccaggaaaaccagcagacagtaacaaaggaacaatgcctgaaccgcattaagttagggtagtttcttttgatctcatctctagtagtactctgagatgagatgggctgatagtatctgttgtagggtgtagctcagctcactgactgccagtatagtatgtacagagctctggcagtctggtactctggttccgtcaccttgacttatcctatctatgaagtaatgcaacctctaacttgtttacatattacatctcgattctatg

SEQ ID NO: 18902 - DNA, 1733 bp, Oryza sativa
  ref <308>: DATABASE ACCESSION NUMBER: AK069283
  ref <309>: DATABASE ENTRY DATE: 2001-12-06
gtgcatccctttcctcgacactctgcactccaggcttcaattaccccctctcttctccaacctcaatctctcttagccaaactactctccatcaattcggcgcggctagtgcgagctatattctctactcatatttgcttccatcatctatcaatccctaccatcgccctctttctgttttgatcatatcaaacttggttctcactttgccatcaccatttccatagggagttgaattcaggcccctggcttagaagtagtagtatttgaggaattggtggcatgtagatttaagctcaactgaagttgtcgctgtggacatctcctcatcatctttggtgtggatatggcccgagtgattacagttcttaatcctgaaaaattgctcaattggttttccccactgatgctgatgaccttgttgcaaatcgctcaattagttttattcccaactgatgctgacgttgttgcagaccatgcgagagtgatcagaaggggtggctacaatggaatgagacgatgaccacgaagacgaagccagggatggcggagcggttactgctcccattgagcatggtactggtccagctattcaccataggtgccctcctcctcgcgaagctatcattcaatagtgggatggcacctttcgtcctcctcgcataccgcaacctcattggcaccgtcaccatgttacccttcgccttctggttcgagaggcaaatgatgaaaaaggttaactacaaggtactgggctggatatttttcaacgctttgttcggaattgttttggctatggggctacactactacggcctacgcgctaccaatgctggatacaccgtcaatttcctaaatttggtccccgtcgttaccttcatcattgcagcgatcttccgattggagaagctgaagctgaagacgcggtctggcatgataaaggtgattggcacggtgatctgtgttgtgggcaccatggtggtgagcctgtacaggggcaagctgctgcatttgtggcctacccacctgctgaagccggcgcagctgcgggcgatcggcggcagcgacgactccaccttccctacccaccacaacatgctcatcgggacgctcttcctttgcggcagttgcctcagctacgccttctggttcatcgttcaggccaaagtgaacaaggagttcccatctaagtacttctcgacgatgctcgcatgcttgatggggacaatccaggcggtggtgatcgggatcgccgtcgaccgggaccggtcggcatgggcactccactgggatctgcagctgatcaccatcatctattcgggggttttcaacacggctgccaccttctgcttgatcacgtgggcggtgtcacggcgagggccaacctacccctccatgttcaactcgcttgcgctgatcatcaccgtcgtccttgactcgatgctgcttggaagcgacatctctgtcgggagcttgctaggggcatttatgataatcattggcctctattccttcctctggggaaaagggaaggagataaaagagcagcagcagcaagttcccacgaatacagaggcagatcagagcaaaatcacttatcctaaaagtaatggtgaggtgcgaattatgttggatacatagacaatgtagattgtagagatcgctagatataacaaaggattgtatttggattactatagactagaattaagtcgcttgtttattgatgaggc

SEQ ID NO: 18903 - DNA, 2855 bp, Oryza sativa
  ref <308>: DATABASE ACCESSION NUMBER: AK069284
  ref <309>: DATABASE ENTRY DATE: 2001-12-06
ggttttccatccctcctcccctgaagaagtcgaaaccctcccaccgccggtgggcggtggcggcaagccggcaacggcggaatccaccctcctccggcggcgctggctgaagacgacagccatgcctacctacctgccttcctgcctttcccctccctttctcccctagctaggggaatgtgcgagagcagtctagactctagaggcggggggggggggggggggctttttctcctcgtccaggttctcacggcgaaattccgctcctcctttttgtgcctgcgacgagcactcccgtatcgcgaatggattggctggttttctgggttccttcagtgaaaaatctggccgtgtaggtgtcgaaggccagagattatcgaagtttttgtgttttggtcttgtgaattttgcgaaggtaaacctcatatatctctgatgggattgatgtatgtctggggaatgcttcttatatttggcatgattctcattatctaatttttttttggcatgattctgatttctgagaccttgaattgacgataactttcccagattaatgttgggatttgcagtagtattacaagacatgttaaacatattaagtactagcatgatactggtaggaattgaaggctcatggccctaacatgagcatgatatatattcacccatttcacccgtatcagtttcagctttggaatcaggatactgtggtagttttgatggtgttcttacataacttgcctgcgcatggagcatgtctcgatccttactattgtcgatttaatttttcctgttgcaacatgaactcaaagcctaggatctagaacaaaattatcatctatttctgttttgttatgaatataactgtgccattgttcttcctatgctcgactccagaatgaaaaagataagttgcattgactaaaatctcactgaatacggtgcccgaaaaaactgttcacatgacctcctgattaaagacgaaaaatatacacctaaagccaacagtttgcagaaatatttattaatgtttctcttgaatgaaaatacaataactccttaaagtcgtcctggatggatcactgatgaagataatactaccgaggtaccttctcaattttcaaatagaaatgaacttttaaacctatttccccccaatgaacaagaggttttactgcctgatattatgtcaacacctgcttaatggctaattctgctcctgttaagttgaaggtgaactaccagtgtaagtgaactgtctgcttaagaatcccaaatgggtttttccaatgcagtggggtcaagagatgactgatggtaagagtagatatgttcctgaggtttctcctgctcatcagaatagcttaatgctgtcacatccgcgttggaaaatgctagggttatccttttcttctctcatggaaaatggatggttcattagtccaattaaaggcacagtacctggcctcatgatgccactggaccacggtgcgttgatcagaatattaccacggccaatcatcacaagtttcttagttcatggctaaaacggcactgcacaagaacatattgagtttccagttctgaggatcagaggtgctaaaaagccaggtgtaaccaagaaacacaattattgttttgagcattgctttgatgcatttattatgtcacttgcacagttgcacgtgtgctcatgaaatcagacaattatcactcgaaataatgaggaaagatcgaagggacgtacctgggtttcctgggtgacctcgtctcttcttcaccacaggcatgacagtgtcacctttgcttgatccagcagcgcacgcctctagcttcggttgctgctggaggttgttcaaggattcttcctctgatgtgtgtgacattgtttggaggctcagttagtggttttagagggtgccagtaaagtgaggagggttgatgatttatgcacaacagagtggagggactacaactggacaatagggaaatggtgaattccctttcagtcaccatcaaggactgcaaccattagttttaaatctgaggaacacgacgctgattgtttcgtcagcatggaatgttctgttcattgttcctgattattttgtcaggatcactggagtttcctgagtgaagctccacatgaagagagatatcgagccttgagttgcatgcctactgtacgcccattttgttgcaaattataacagtttcatttagtgtgcgctatgagcgacaggtcgatatgatgaccatttggggatctcaaagaaaacacttcactgcagacagtaaatctgtgctactggacctttatttttctcctgctgtgagtataaatctgaacaccttgtaactatcgacacgaggatggaattcatgtcatatttcaccgcaggtggaacaatggctgtgaagagcaggcaggaggcggttttgtcggtacaaggaaggtgatggatatgacaagggggagatccgggaggagagacaaactctggccatgttctttttctaaccggcatccatggtatctccctcctctgctggcacaactgtcagacttgctcttgttttagtgcttggagcatggtggtacctgggggctttgaaggtttccacggcatgtcatccaatgcagatactgagaccggagagaggctggaaggtatgtcaaatgaaccgttcaccgatttggctacttctagttatctccggtctcagcatctgcattggatttgtccagagatgggtttttttggatttgctcactgacctctccatgaacttcatatgttagtttaagtacattaacagcttatatactcttcaagtcatcatttttcccc

SEQ ID NO: 18904 - DNA, 2590 bp, Oryza sativa
  ref <308>: DATABASE ACCESSION NUMBER: AK069285
  ref <309>: DATABASE ENTRY DATE: 2001-12-06
gacagttctcctttctcccctctctcctctccggcggcgatggcggcggcggcgaggagctccggtggaatgtccgaccagctcttcgtgtccatcaagctggagtgcccgcgactcgctgagatgggcctcgtcccgcacgtcttcggctcgcacccagtcgccggcgcgtgggacccctccaaggccctgctgatggagcagggggaggccgccttgtgggggctcagctgcatcgtcccttctcaccgcgaaacactggatttcaagtttctattgaagccaaaagacaatagctcacattgcattgttgaggaggggccagaccgatcactagtttgtggaagtaatgaggtggaaattaggaatgcattgtttaaattcaatgatgagacaggtgtggttgaatgcaagattttcgtggagacagaaattttgtccccatttgacctagctgctagttggaaggctcatcaggagcatctccagccgagggtgcgaggggcccatgatgtcattatgaatgccgattctgaatccagggccaagggtgcagatgggagacatgtgcctccacaggaggaacaaagggcgatctttgttgatagaggtgttggctcaccagaatttgcaagacccacaaatgaaacaatttcaatgagcaacatcaagtttgattctgaagcgaaggacatgccagcagctgaaggagctgttgcagcagcagctgtagctgatcaaatgtatggcccaaaggaggatcgcaagttggcaattgtgctggttgggttgccagctcgtggtaagacctttacagcggctaagcttacaaggtaccttcgatggttaggtcatgaaacaaaacacttcaatgttggaaagtaccgccgactcaagcatggcattaatcagactgctgatttcttccgtggagacaacaaagaaggtgtggaggcacgcaatgaggtggcggctctagcaatggaggatatgctatcttggatgcaggaaggtggtcaggtaggtatctttgatgccacaaacagcacaagaaaccggagaaatatgctgatgaaaatggcggaaggcaagtgtaagatcatctttttggaaacaatatgtaatgaccaaaatgttctcgagagaaatatgcgcttgaaagttcaacgaagtcctgattatgcggaacagacagattttgaagctggtgttcgagatttcaaagagagattggcctattatgaaaaggtatacgaaccagtggaagaaggctcatatgttaagatgattgatatggtcagtgggactgggggccaattgcagatcaatgatataagtggttacttgcctggccggattgttttcttcttggtgaactgtcatcttacacctcgtcccatcctgctaactagacacggtgaaagtttagataatgtcagaggacggattggtggagattcatctttgagtgaaaccggatcgctttattcaaggaaacttgccagctttatagaaaagcggctagcgtctgagagaactgcatctatatggactagcacactccagaggtcaatattaacagcgcagcctatcattggatttccaaagatacaatggcgtgcacttgatgaaataaacgctggcatctgtgatgggatgacgtatgatgaaataaagaaaattaaacctgaagaatatgaatcacgtagcaaggacaagctgaggtatcgttatcctagaggagaatcctacctcgatgtcattcaaagattagaacctgtaattattgagcttgaacggcagcgtgctccagttgttgtcatatctcaccaggctgtgctaagagcactatatgcatattttgcggataaaccactggaggaacttcctaacattgagataccacttcatacaataattgagatacaaatgggtgttgctggtgttcaagagaaaagatacaaactcatggacgcagtgaactccacagcagggatttaggacatgacgcatgaagcttaaatcctaaaagaaatctgcctaataatttttctttattctgatgaagtttgcaaactcccaatgcattactgacatccatgggaagtaaaattattggtgtgaacaattaacatggctggttcagctcaaagatggtttgactctcaaattttgaatggatattatgtattaaggttggctcctgctaactaatgcgctcagatagcactccaagtggattcgggcccttcgaattctaaatatgtttgttgaggatttgcatgtacagcttcaattatagtgaccaatgtgggttcctttgaaaaattcagtttgcttgtcaaacggccaggtgtatatgcatttatgcatctactttccgcttaatggttgctttccaaacctgtctcatatcatcaaattagcttaggcgatatattcttacggacgtattctccaggaaaaaggatatgtattcttactatgtgatcagttgcatgtgctgtgctgatgtgctctgatgaatttatgcacggtgtgttcgacaattctgtaactgttaaataaacatagttttcttaagtggagc

SEQ ID NO: 18905 - DNA, 1387 bp, Oryza sativa
  ref <308>: DATABASE ACCESSION NUMBER: AK069286
  ref <309>: DATABASE ENTRY DATE: 2001-12-06
gagtgtcgggcccgtctcgccaccaacagctcgccgcggcggcggccgagtccgggcagcgccaccaccaccagcagcaagcagcagcagctcgccgcccacccatccatggcgaacccgaggagagccatcgcgctgcaaatccacacgcagacgacgcccctcgccgccgcccccgccgccgcgccgtccccctcgctgccgtcgtcgctggtccacttcctgaagcggccggcgtcgttcccattcctgctctccctcttcgtgctcctcacctggatctcgctccgcttccaccacccgtccccttcggcttccgtcctcagggcccccgtcgtgcacgacccccaggccaacctcgtccgttaccccgccgcgctgtaccccacccccatcgccgccgacgggcgcgggtggctacttgaccccgtcgccgctgctcgagacgccggcttaccaggaggagcactggtttgtttatcactacacgtgggacagatccagccaggtggtttacgtggcaatcatcgccaccatacatgcaatgagacatttgtcatctggggtgcaaagacaaaattccggttagaaaatgctgatgtaaatgatagaggatatggggaagccatgattgccgctgatgaggtggccattgttgcaagcgcaagatcaactgcacatgccttgataaatatggatgtgcgaccaaccttcttcttgggatgtcaggacacgccaataaatcccaacagctcgaatactgactacaaggtctggaaagacatctgatgatcacgttgcttctgtccttaatggtaagccatgagaaaccataatagcatgaagccttcagaaaccatcttgtttccattggcaatgatttcaaagcagatgtgtatatagttacggcttgtgacttatgaggggacttccagttacgaagctattcttttgtttgtcatgccaaatttcttctgtagtaggttaacctttttcgtttggaggtgtaatgcattttcagggttattacttgatgatatgttcccctgttctttgaatgatgtgttgtcgataaattaattgttgatatgcaggtaaggtgtgacatgaactttttaatgatcacataccgcaagatatatctgattgcttaacgtgaattctcatatggtgaggtagtgtttggcacgcacatcagcgcatttcttgtggtgtagcatggatcactagtgtgctttcgcgtctgtctgacttgcagacatctgctttcttttggttttctatcagcgtcgtctatatttgctagtttgattcatgtccacagatttttatttttaatgacacgtgtggatgagtgtggatattcgtccacacagtattgaaaacg

SEQ ID NO: 18906 - DNA, 2355 bp, Oryza sativa
  ref <308>: DATABASE ACCESSION NUMBER: AK069287
  ref <309>: DATABASE ENTRY DATE: 2001-12-06
ggcttttctcctctcctcccctcctaccagctacctctccctcctcttcattctctctctaaaaaaaggcaaagaaaagcttgccgtgcttataaataagcttccccttctctccccgtgccggctcctcccctctcccccgatccccttcctccacctccaccccccacccgccgatcgccccccgcgagctcgtcccgtcgcggcgggcgatcgctccacccacccatccacctccaccttcccgcgcgattccccgagaggcgaggcgaggcgaggccgctatagctccgctccgctccccgaccaccacgacgcggctggcggcggatcctccactccacccacccaccccgcttccgccgatcggatcgcgtgctccccccgaggtagaggtgatgataaatcatagttagtgacttagcttgcagcagttctttcttgcagctaagacaaataataattggcgttatggcatatagaaatacggtatgcactccccaagtaattgatctagaaactgaacaagggcactctcatattcattctgaaagttttaatcgcactgggaatgattcatctgaccaaggtgcacaacatgctgtcagaggggtaggaaatgctacaaacattggtctatctgatatgcgaagttactatgatgcgggcatgaaccatccacatcaacctgttcataacttgcctccaaatttaggagttgattcaggttttgtcttcccatccagtatgtacaacccctgcatgtcgacaacatctatgaaccaatatgtttctcacactcagagcttcggattgccatcaaaccaagttgttctaggaagcatggatgaaggtagcagaaatgaaaatgctggtgaaagtgctagaggattcattaaaaggaaaaatgctgcagttgcaggaagttaccactgtgctaatggatttgcaagttcaagctcttctcatgcatctctgaatcctacacataggccatgggatccttcttttgagtcaaatgttttgcctaacactgcatcatataacccatcagagtaccatagccagaccagttggccatctatggaaggatcttccattcccagtaatggctttaatttgatgggtgctcacccagaatcagcacagcatggtaattatgcatttccaactagtcacatcagccagtgctttcaacctactagcaatacatggatttcccagtctgcaaatggtattgctgatggaataccacagtgggaatatgtcaatggaatgaataatgctccaggcagattttcccgttcaggtatgacagaaacagtgaatggaagcttccgtgaatatcagaatggcccttcaaccttatgtcgagggcctttaccctattttcatcagcatgctggcatgcatgctcataatctgcttgatcatacacaagtgcaagctccttaccaacaatgccacaataatcctgtcttacatggtgtaaatcattctggcaaccggttccatttgggtccaaggattccagttcttttctctaattctgaacgtacttttgggcctccacatcatccactcttggcaaatccagtgaaccacagaaatatacgaatcctgccacctgagcatgctacaataatggatttttcaagattgtatgaagtgtcaaatgttgtagatgagcatggagatatgcggctagatatagacagcatgacatatgaggagcttttagcattagaagagcagattggagatgtaaatactggtctggcaaaaagctacattgtagagaaattgaagactagcttatttgtgccaggatcatcctgcatgtctaataagtcttctgaatcttccatggagaatgatgcttgcataatatgccaggaagagtatcaggttaaagaatgcattggaacccttgactgtggccacaggtaccacgaagattgcataaaacaatggttgatggtaaagaatttatgccccatctgcaagacgacagctttgtcaaccggaagaagaagtggataacgaacaggaataatcttattagttatttacttccgacaaatattcagctcaattttgtatataagaaacggtagaccattctgctacctgtatttgttgctcactttgttgtgatccgggagtaactcagcttcctaaactgtacagccataacattgatcattttcttcggtgtagaatattttaaattactcagttcgcccccatctgtatcataaggcggaccgacaaaaaaactcacaatgtcatttctaggcaaacattgtatctaccatcagattaaaaatcagaacagaacatgtgctcttctgt

SEQ ID NO: 18907 - DNA, 1305 bp, Oryza sativa
  ref <308>: DATABASE ACCESSION NUMBER: AK069288
  ref <309>: DATABASE ENTRY DATE: 2001-12-06
ggcttccttccttctccgctggatcggattcagatcggcacccaccaccaccaccttccttccttcttctctctttctcagtctcagatcagaattatcagatcccgagggagggaggaagggaggccatggccaccgcctttgactccccgaccgcctcgcccgccgcctctcccttcgacgacgactccttcctccgcttcgacgccgccgcgcccgctcccgcgccagcggacgccttcccgccatcaccggagccctacgccttccgccccgacgcgccctcccccttcggtatgcccgaggccaacggctccctccacgacgaccccttcgccgcccccgacaacgacaacggacccgtgctccctccgcccaaccagatgggcgctgacgagggcttcctgctgcgcgagtggcgccgtcaaaatgcaatccttctggaggaaaaggagaagaaggaaaaggagatgaggaatcaaatcatccttgatgccaaagaattcaagaaggcatttgttgagaagcgaaagctgaacgttgagacaagcaaggatcaaaaccgagaaagggagaagctttacctggccaatcaggagaagttccatgctggcgcagacaagcagtactggaaggcgatatcagaactgatcccacatgagattgcaaacattgagaagagaggagcaaagaaagacaaggataaggagaaaaagcctgggattgttgtgatccagggcccaaagcctgggaagcccactgacatgtcacggatgcgtcagatattgctgaagctgaagcacactccccctccacatatgaagccacctccccctcccgctgcagccaccggtaaggatggtgctgcaggaaaggatggagccaaggtagctgcggcagctagcaaggacgcctctgccaatggcagtgttccagagatggagaaggccgctgctgcagcagcacctgcagcagcagcaactgaacccattgctgctgcctgagtgataacggcttggctcagctgctaatggtttcctgtaggacacagaggagaaggcagagtgtctggcacggatgtgcgccacgtatggtgtagcgttgtttttgttaagaaagtgttgtgttgtgttgggaccttgattcgttgctacatatattgttattgcattttgtagagaaaagatgagaggggatatatcctggcaataataagttaaatctgttgtattaggatgtgcgtgattgtgtgatgttgtgacggtggttgtactattttccaggttgtcggattttggtaaaccc

SEQ ID NO: 18908 - DNA, 1472 bp, Oryza sativa
  ref <308>: DATABASE ACCESSION NUMBER: AK069289
  ref <309>: DATABASE ENTRY DATE: 2001-12-06
tgggatctcgcctcgatcgcggcggtggcggtggggaggggagcgcaccgcctgcccagccatgagatggtatgcttcgctagcctgaggagggctctgcctctgctgctgcgcgccaccaccaccaccaccccccgcttccttctccccagggccctctccggcggcgttggcggcggggcggcggtggatgcgcgcgcgcttctccgtgggcacagcgggtggcgcgggctccgggtggccgccaggatgatgctcgactcctccgactccgccgccgctgcggggcagatgcagccgcagcagcgtgcggcgggggccgtcgcctgcagcgcgcaggacggtggtgccgcagggtacgccagcggcgggtgggcgagagaagatggtaaactgaaatgtggatattcaagttttagagggaagagagccaccatggaggatttctatgatgtaaagttaactgaaatcgatggacaggctgttagcctatttggtgtatttgatggtcatggaggaccacgtgctgctgagtatttgaaggaaaatttgttcgaaaatcttctgaaacaccctgagttcctgacagatacaaagcttgccataagtgaaacatatcagaaaacagatacagatttcttagaatcagaatccaatgccttcagggatgatggttcaacagcttccactgcagttttggtgggtggccatctatatgtagcaaatgttggtgattcccgtgctgttgtttcaaaagctggtaaagctatggcactgtcagaagatcacaaacctaacaggagtgatgagcggaagagaattgaaaatgcaggaggagttgtcatttaggctggtacttggagggtaggaggtgtactggcaatgtcgcgtgcatttggcaatcgtctactgaagccatttgtggtggcagagcctgaaattcaggaagaacttgtcaatgaagacttggaatgcctcgttcttgctagcgatggactttgggatgtcgtggaaaatgaggaagctgtttcccttgcgaaaacagaagacctgcctgagtcggtggctaggaaactcacggaaatagcctattctcgaggcagcgctgacaacattacatgcatcgtggtgcaatttcaccatgataaaactgaataataagatgggactagagctgatgaaaggttgaaggtttttctacttcaagctactttccagcagtccaaccacagagggggttccccaggagatgttgctcctgtagcatttgctaaggattgtttcgttgattcttttccttgtgtaggaatcattttttgttttcagaggtgttacgaacagaaaattttatttcgagtgtaacacacagttttaattggatggatactaataaatcaattgcttgtttacctaattacctgccattacgggcatggcatataattctcgatgatatatagttcttttttggc

SEQ ID NO: 18909 - DNA, 2101 bp, Oryza sativa
  ref <308>: DATABASE ACCESSION NUMBER: AK069290
  ref <309>: DATABASE ENTRY DATE: 2001-12-06
tggtcttttgcaggcttgcaggttgaggagcactagacgctgtggagtggagggaggcggagatggcggaacagtagccaccatgagctcctcccactcccatgctcatggcggcctcctccccacctcccgccgccgctagcagcagcgggcgactcgccagggtgcgcctccacgacctggcgccctacgatggcgccgcgacccccgcctacggccgcgccgtccatgccctctccgcctccctcacccgccacggcgccgccctcctcgacctccccgacgcccacgccgccatcctccgctgcgccctccaatccgctcgcgccttcttccgcgccaacgaccaacccgccttctacctctaccgcgcagggggcagcgcaagtaggacatccgatgacggcggcggcgacctggtccctgcttgcatggacgacgccttcaggtgtttcggtgaggctgcccgcgctgctctctctgcgattgctcgccatctccgacttcgtaccaatgtattcgaccacttgctcgatgatactccattgcctgttaatgaggtctcatcctcggagttgctggtggcttattccaaccaacgcctccacaccgatcatgcttcttctactgcctgtctcggctcttcagtgcctcaagttgacaggggcttccttgtgctcattgcttctgatcatccaggaattgaggtttgtgacccaaatggccaatggtacctagcagatggcatttcagggcctggtgacctgttgcttctgactggaagggcacttagccatgttactgctggtttgcgcccaacttctcgctacaggatcacaaatgagactagagcatcactcacctttaggctaatgccacatgccaatgctatactggattgctctcctattgcagcagctgggcactgcgtaccccagatgtaccaacccatatctgcaagccaatttatggatgacttgtgtgctgaagaacgtgctgtttcgaatcattcggaagcaccttctgaatctcagggcagcttcattagtgaaccatctctcagaagtgtcctatcagatccattgtctggggcttttcttgaggatgctatggttctgttatgtggacactctttcggtggcctcatgctgaagaaagtcattgaaatggcaagatgcaccatttgcaatggagaagttgatccggccaccctgtttcctaatctcgctttaagagcagtagctacagtggtgaagatggaagatgataggagactctttcataatgctgctcttcgcaaacacaggaaagaggtgaccgaacgtatggatgtgctgaagagcactggaggtagcagaggcaatggtgagctggtgttggatgctgaaaaccctacatcacccaggggtgtgcagtatccatttgtagtgggcgagagggtcctgatcatgggaaacagaaggacgcctgataaatttgttgggaaggaggcagtcatcacatcgcagtgcttgaatggctggtatcttgtgaaggcggttgatagcggggaaagcatacggctgcagtatcggtcgctgaagaaagtgtcggagctgcagcttcagtcagagatgaggttgcagccactcaccttcctgcacaacaaataccccagtagtggcagctgagttgattgactatcatcagtcttaaaacaaaaaaaaaagaaaggagaagcatatactgtagcagaatagtcatgaggcatgcatcgccatcaagcgtgttttgttgtagtaatactaataaaaaggtcagttagaaaagtgtggtgatagttaatctggtgatgatatgaaaagggtctatcctattggaaggagaaatgtcatgtgggggttattaaaaggacataaagagtttgctaggaagttccaaattcctagcggtggatgcagcgggtcagccaagccaaaccacaaaccaaactgacttttctactgcactgcaacgcaccagtagatgccagttggtaattcttgatccaagcgtgaaaatgtgtaactggaccggctgggcacttgcagaaaaagtcgataaatgtgttgtgtttgctgcg

SEQ ID NO: 18910 - DNA, 1557 bp, Oryza sativa
  ref <308>: DATABASE ACCESSION NUMBER: AK069291
  ref <309>: DATABASE ENTRY DATE: 2001-12-06
ggtcgtccgtccccagttcgtcacccttcatctccacagcgccagacaatggcgccaagacagcggctgtcattccgccgcctcgtcctcctcctcgtcgcctccaccgccctcgcgtgctcggtgctcgcgggcggcgccgtggcgagcgtggtcgagacgctcggcgtccggcgtcacttcggcagcccgaagcgcaacaccacggggcagcacggggccggccggcgccgcggcggcggctccgcccggagcggtctggcgtcgtgcaacatgttccagggaagctgggtgtacgacgactcgctgccgatgtacgacacggcgggctgccccttcgtggaggcggagttcgactgccagaagtacggccgccccgacaagctctacctcaagtaccggtggcgtcccagctcgtgcgagctcccgaggttcaacgggctggatttcctcagcaaatggagggggaagaagatactgttcgtgggggattccatcagcctgaaccagtgggagtcgctggcgtgcatgctgcacgcggccgcgccgtcctccaggaccacctacagcaggggcaccccgttctccaccgtcacgttccaggactacggggtgtcggtggcgtactaccggagcacctacctggtggacatcgtcgacgagtccatcggccgcgtgctgaagctcgactccatctccggcgacgcgtggctcggcgccgacatgctcatcttcaacacctggcactggtggacccacaccggcagagaccagccatgggactttgtgcaagatggaggccaggtgatgaaggacatggaccggctctcggccttctccaaggggatgtctacatgggccagatgggtcgattcgaacgtggacacatccaagaccagggtctacttccagggcatctctccaacccactacaacggagcggactggggggaggggtcgaggagctgcgcgcagcagacgcagccggtggcggggtcggcgtacccggcggggccggtgccggcgcagagcgcggtgaggagcgcgatcgccggcatgtcgaagccggtgttcctgctcgacatcacgctgctgtcgcagctgaggagggacgggcacccgtcggggtacagcggcggccacccgggcaacgactgcagccactggtgcctcgccggcgtgccggacgcatggaaccagatcctgtacgcctcgctccttgcatagagggaaagaattggaaggggatatatctctcaatccgattggccgttctctcataatttgttggttgattgtatggagagtatttcaattggtggttccataattggttaactgatatatatggatagtccatcagaggatactacattttccttcttgttggagaagttggggataatgccagggtagacagcgaggatcaactggatacaactccttcaaaagacaacagatggttgttcggatgtggatggaaaattggaaacaactagtagtgtagtactatttctaatccaatacgcttaataaagatataccaagcaggcaagc

SEQ ID NO: 18911 - DNA, 1740 bp, Oryza sativa
  ref <308>: DATABASE ACCESSION NUMBER: AK069292
  ref <309>: DATABASE ENTRY DATE: 2001-12-06
gagtttcccccaaatttgcgcttccctccctcttctcgaaccttccgaccgccaccgttgtcgccatcgccgccggcgccgaattccgccgcgatctcgcctgctccccccagtggtaagagattcgatcggtctcgtagtaactccggctcgctcgggcaccttaggtgcgccggttcctgctcgattcgagctaccggctgccgactttgccggcggaacgtaatcggctgcgctgtcgcagtcggcggcgtgcttaaccgctcccggaattctgcttagctatggcgatgattcgatgtgccctccttcgtgctaggaaatcttgtgctgtgattttcaggcttcaactcgtttgatgcgtctatttttggaagttattagcagtagcagtgtgttcgtgtcctgcaattgacctagcctgcgcaatctgttgcttgctgctaaatgtgtgggttttttccccctagccattaaattcaaacaactagtagacaactcgttattgccgaagtacagtttggaatcatttgggtttgactgttcgttcaataaaagaaaaaaagaagggtttcagagtgtctgctagctttaaatttttgcacggtcagattaaggaaattttaattttacttgttggttgttttatttctcaacctcccattaattgctcccagttaaggtattttcagttggaacattagttatgatttgtacaatcacagatgggatttacagatgaaatagtacaagtagatgtgttaggaaggcacttgttggctggtttatcaccggatgattataagggaataagtgaggatgagatcctctatgatgcatcatttgaggcaactgaagacaagtttgtcaagtatcagattacttggtggattctgctgtcagtattgttgatcttagcttggggagtaggactcctcatgctgctttacttggcaatttggatatatgtgtgccggaaggacttccgctcaaggaagttgtgtttgactccacatgctattgtctataaggtaactaggcctgccacttttccttgttttggtgttttgaggaatgagaagcatgttgtccttcattcagtttctgatattgttgtcgaacaaggttatctccaatcactttttggtatatattcaatcagatttgagaacattggtgtccgaaagccttctagtgatgacataaagataactggaattagtcatccacatgatttcaggaaggctgttcttgtccatcttttgaatacaagcaatctgaatctcagtagaaaagcttatgtacacgatgatcagcagagcacgagttctaaacctataactatgtcttcggttcctcctcttggagatttgatacttgagaagcttgacgaagttgaaatctctgtgaagaaaatgcaaacactgctagaagatgttgaaagatccagaatgaagacttaatatgttttggtaggtatgcaaagttttagtttgctctctactttctctgtgctgtgcatcaatgttgcccccatgtcagtgttctgttttattttcatctttttgcccttaatatctgtttcactcagagtgtttcatgaaacgccatattttcaatttgccattctcttaattattggactattaaccaaaccatccaagagggatccctttcatggattctataaatttcattgctaaactcaatgaaaataacaagttccacgtttttctggcc

SEQ ID NO: 18912 - DNA, 1112 bp, Oryza sativa
  ref <308>: DATABASE ACCESSION NUMBER: AK069293
  ref <309>: DATABASE ENTRY DATE: 2001-12-06
gttgagcaaagccatgctgtagtgggatctctctccatccattcctgcagtgccgccactgctatagctgcgagagctatagctagaaaaatatcaacgtaggaagtgggaggagaagtagatgatggatacagatcacactgagataattaaggagggagaggcagtagtggaagccatggctctactccagtctcggttcaggaggatatgcgtcttctgcgggagcagccagggcaagaagaagagctaccaggacgcagccgttgagcttggcaaggagctggtagcaaggaacattgatctagtgtatggtggaggaggtgtggggctcatgggcctggtctctcaagctgtctacaatggagggaggcatgttattggggtgattcccaagactcttatgcctagagagattacgggtgagacagtaggggaggtgaaagcagtggcagatatgcatcagaggaaggctgagatggccaggcaatctgatgcgttcatagcactgcctggtgggtatggaacacttgaagagctcctggaagtaattgcctgggctcagctcggcattcacgacaagccggttggcctgctaaatgtggacggctactacaactctctgctgtcgttcatcgataaagctgtggaggaagagttcatcagcccctctgcgcgccatatcatcgtgttagctccaacaccaaaagaacttctcgagaagctagaggcgtactcccctcggcatgacaaggtcgtgccgaagatgcagtgggagatggagaagatgagctactgcaagagctgcgagatccctggcctgaaagaaggcaacaaggcgaccatccaagcacagcgaggaagcatgctctgaaatttactgtagcactagctagctatagcttagccaatgcgtgcagcaagaagattcaaaacttcttggtgcacatgaactgcaacttttaattcatgtaactcggttcattagaaggcaattgatcactgatcatgcaattagtcgtgtacgtagccctaagaatgaaatcatcagtaagatttgtaaatcacagagctccagagcagcagactgacataaaacgatatgtgggctt

SEQ ID NO: 18913 - DNA, 2088 bp, Oryza sativa
  ref <308>: DATABASE ACCESSION NUMBER: AK069294
  ref <309>: DATABASE ENTRY DATE: 2001-12-06
gtccattcgccctctctctcctctctctctctcccccctccttcttccccctctccaaaccctcggcttcggtcgcgagcgcgagcgcgaggccgcgcgatttcgcgtctcgcggcggaggagaaccggagcgcgcgcgcgcccttcccttcgtcgcccgcttcgcgtgccccgcggcgcggggggcgtggtggtggtggtggtcgccgccgcgcgatctccaaaaaccctaaaagccctggcgcgggcgcggcggtagggtttgggcggtggtggggtggggggctgccatggcgcccatcaacagctccaacatggagcagcactcgcagaagctcctcgagccggaccttcctgtgcaagtccgactgcagcttgccatggaagttcgggacagcctggagatgactcatactccagactatcttaactttcttagatgctacttcagagcattctcggccatcctcagcaacttcaccgcaccacagggcactgagaatgcggagcacaagctgcggaatgtggtgattgagatcctcaatcggctaccccacagtgaggtgctccgaccctttgtgcaagacctgctcaagctctctcttcgtgtattgacacaggacaatgaggacaatgcacttcttgccatcaggattgtatttgatctcctccgtaactttcgccctactgtcgaggcagaggtgcagccgttccttgattttgttgttaccatataccgcaactttcccaatactgtcacccatttcttcgataatcccaatgtcagtgccaatattgctgctgccgtgcccaaccagcatttggaccccactgctgatgccccaggcacggtggcagtgccaggcggtggacaactcaatccaagtgcacggtcattcaagatagtcacagagagccctctagtagtgatgtttttgttccagttgtatgctaagcttgtgcagacaaatatcccatacttgctaccactcatggtgtctgcaatctctattaaggggccagacaaagtgccaccacacctgaagacgccctttgttgagttaaagggtgcacaagtcaagacattgtcattcctgacgtaccttctgaagagcaacgcggatcatataaagtcatatgaggaaagcatatgcaagagcattgtgaacttgcttgttacatgccccccggactctgtttccataaggaaggagctgctagttggcttgaagcaagttctcaacactgagtacaggcgtggtttatttcccttgattgacacacttcttgatgagagggttttgataggcacaggccgagtttgcatcgagacattgagacctcttgcctatacccttcttgccgagctggtgcattatgttcgtggagacctttctcttccgcagctatcgcggatcatttatttgttctctcggaatatgcatgattcttcgctaacccttgtcattcatacgacatcggctcgtttgatgttgaatctggttgagcctatatatgaaaaaggtattgatcagccaagcatggatgaagcacggattttgttggggcgtatactggatgcatttgttgggaagttcaggacattgaagcgcacaattcctcagttgcttgaagaaggcgaggaagggaaggaacaccaaaatttgagaatgaaacttgaagtcccattacagactgtgctgaatttgcaaccacccttggagtacacaaaggagattaatgattacaaaagtctgataaggacactcgtactaggaatgaagacaataatctggagcataacccatgctcattggccacgcccacagcaacaaagtcaacaatcatcaaatttatcagtacaaccattcaggggactgcgggaggatgaggtgcggaagacttcgggtgttctaaaatctggggttcactgtttggctctttttaaggaaaaggatgaggagagagacattctgcaatgtttttcccaaatgctagctataatggaagctcgggatataatggacatgttttccttttgcatgccagacctctttgattgcatgataacaaacaaccagctgttac

SEQ ID NO: 18914 - DNA, 889 bp, Oryza sativa
  ref <308>: DATABASE ACCESSION NUMBER: AK069295
  ref <309>: DATABASE ENTRY DATE: 2001-12-06
gatatatgcatttatccatccagaagctggctactaactaaactcagagagagagagagagagagagagagagagagagagagagagagagagagagagagagagagagagagagagtgtgagtgtgtgtaaatacaatgagcaggtcgagcatgaccgccgtcctcctgcaggtagtgttgatagcgatcaacgccggcagcttatgcagcaaaggactgggtgaagctcagccttgagctgccaccgcggacgccgcctgggcaggagccctccccagcggcgtaccagttctcccgtaccatctgcagaatccccaaggatcctatctacaagatctgctgcttcggcgaactcctcccgtacgccgagtccttccaggacaaccaaatgaaggccacccaagtggccaccatcatcctgctcaccaagatccaggccctcgatagggaggtgggcgcggtaagaagcggggcatcagggacaagaacatcgacgactgcacatcgttcttcggcattggctccagcaattcagagtccaccaactcggtgcttgccgcactcgaccgcctcgccgccgccggaaaaggcagacgcaagaaggaggacgtggaaacggtgctcaagtggaccaagaatttggagacccaatacaacggggccacaagcaagtgcaagttaggttatctgttcaagtactgtgacatggttcccaccgttaaggagattgacgcggcgacgaccatcaccatcgacctcctcaatgccataaagctgtgattgatcatccgatcatcagttagtgatatgtcctgaggacaaaatcatagagattattgtattgcacactatatttatttatttgtaataaagtgttgcttaaatag

SEQ ID NO: 18915 - DNA, 2067 bp, Oryza sativa
  ref <308>: DATABASE ACCESSION NUMBER: AK069296
  ref <309>: DATABASE ENTRY DATE: 2001-12-06
ggtgtccctagtggaaagttgcacgagctcacgggggtcaggcgactaggcgaggagagaagaggagaggagaggagaggagaggtttggattgggaaggatcaccagctcaccacccgtttctctctccggcattgcgaggggaaggcggcgacgggaggcgcgcgcgggtgtagacgcgtagtgatggcggcgatggacctgcgggtggccgccccggcctccgtggccgcggcggcgcggtgcggcacgagcctggcgaggccgtggcctgcccgggcggtgggaggaggaggaggaggaggaggacggggccggcgtctctccgtgcggacgtccgtcgcgaccaccgaggccgccgccgccgccgtgggcgcctcggaggacgcggcgctggaggcgcgggactcgaagacggtggtggcggtcatcctcggcggcggcgcggggacgaggctgttcccgctcaccaagcgcagggccaagcccgcggtgcccattggcggagcgtacaggctgatcgacgtgccgatgagcaactgcataaacagcggcatcaacaaggtgtacattctcacccagttcaactccgcgtcgctcaaccggcacctttcccgggcgtataacttcagcaacggcgtcgcgtttggagatggattcgtcgaggtcctagcagcaactcagacgcctggatcggagggaaagaggtggtttcagggtacagctgatgctgttcggcaatttgactggctttttgatgatgccaaagctaaagacatcgatgatgtgctgattctttctggtgatcatctctaccgcatggactacatggactttgttcagagtcatcggcaaagaggtgcagacatcagcatctgttgcttgcctattgatgatagccgggcatctgattttggtctaatgaagatagacgacacaggaagagttatcgcatttagtgaaaaaccaaaaggagatgatttaaaggcaatgcaagttgacaccactgttctaggcttaccacaggatgaagcaaaggagaagccatacatagcgtcaatgggggtttatatatttaagaaagagatacttctaaatcttttgagatggcgttttcccacagcaaatgactttggatctgaaatcattcctgcttcagcaaaagaaatcaatgtaaaggcatatcttttcaatgattactgggaagacataggaactataaaatcattctttgaagccaatctttctcttgctgaacagccaccgagattcagcttttatgatgctaataaaccaatgtacacatcacggagaaacttaccgccatctatgatcaataatagtaagatcactgattcaatcatttcccatggatgtttcttggatagctgcaggatagagcacagtgttgttggaatccgttctaggataggttccaatgtgcacctcaaggatacagtaatgcttggtgctgatttctatgagactgatctggaaagaggagaactgctggctgaaggaaaggttcctattggaatcggggagaatacaaagattcagaactgcataatagacaagaatgcgaggatagggaagaatgtaacaatttccaactctgagggtgtacaggaagcagataggacctctgaaggcttctacatccgatcaggcatcaccatcgtattaaagaactcgataattgcagatggattagtcatctgaggtggaataaagccctcccttatccaaccagaaaaagccagccatgaccatttgcggcaggaatagaataaaatcatcagagctctttgttcttagttgtgtacttagcattcaagagcttctgcatgtctgtacaaaatcattgtctcgtgaatctaccgtgtgtgttttcacactaaacacatggtcatgaagctcgaaaaaaaaaacaaaattttatgatctggggtattggttgttccatgtaatctgcaggcgaagaaaaccttacctatctacaggtgtactctctccgtcaaaaaaaaaaaaacttaatctagatgggaatttgacacaaccttgaac

SEQ ID NO: 18916 - DNA, 637 bp, Oryza sativa
  ref <308>: DATABASE ACCESSION NUMBER: AK069297
  ref <309>: DATABASE ENTRY DATE: 2001-12-06
ggctgctctcaactcaatcgcccgcgcctaccgtcgccctgcgccgatcacctggccatctcgccgccggcctcctccagtcctcctagtcctcgccggacccaatgtctgcgctcttcaacttccactccttcgtcaccgtcgtgctgctgctgatctgcacctgcaccttcctcaagatgcacttcccctccatcctcgtccgacggacaggatttcgtggtttcttttggaaggctgctaggataggtgagcgccttagcccctgggtagctattgggtgttctgtcatgggcatatctattatattttattgagatcagaatatatttttgtgctgtcctgatctgggaacaatttcacctgtagatagggaaatccgatgccttttgtggctctgtttatatccgtgtttctttctcctgtaagcatgttatgacttacgaaattcacctaaactgttttccactttccacttcagagaagaagtgtgggagctgggaatttttgagagaattatagtatgatgatttgtatttgtatttcagatgtcaggttttgtaaccctgtaattgtagcaaatgtgtgttttcatgttgtgttttaaccctaatggaatcctagttctgtttatagc

SEQ ID NO: 18917 - DNA, 1058 bp, Oryza sativa
  ref <308>: DATABASE ACCESSION NUMBER: AK069298
  ref <309>: DATABASE ENTRY DATE: 2001-12-06
gaagcacgcgacgcgagcgagccagagcaacgcaagcaagcaagcaagcagctagctagcgcagcggcaatggcgatcgtgggcgaggagtactgctccgcggaggagcgggtgctcacggtgcgcaagacctcccacttctcccccggcgacggcttcgcggcctacgaccaccgcaccggcggcctcgccttccgcgccgacacctacggccgcggccacggagggggagccgcctccgccggcgagctcgcgctcctcggccccgccggagaggcgctcatcaccgtgcgccgccgccgcccgtccctgcaccaacgctgggagggctacctcggcgcccgcgccgacggccagaagcctctcttctctgctcgccgctcctccatcctcggcggcgccgcggccggcgctgtcgtcgagctcctcgccccgctccccgcctccttctcgtctacccacgctgctgccgccgagctcctccgcgtcgatggctccttcccgcggcggtgctgccgcgtggtggcgcccaaggccgagtcaggcggggaggcggcggtggtggcagagatcaggaggaaggtggacgagggggcgcgggtggtcatgggcagggacgtgttcgtcctgcgggtgggcgccgggttcgacgcggcgttcgccatggcgatcgtcctcgtgctcgatcagatcgccggcgacgaggccgacggcaacgccggagaggaaaccaaccgcgccatgatttggtgatggaacgaaccgtgcgcttcttggtctttttgtgtatagcgctgcgttcttgctgatcgcaattttcctcttttgttttgtttgtgcgtgttggtgtgtacgcctttgctccggagaaaacggcaatgtgcaatacgtgttatgcaacttatttcgaagtttttagtttgtatacatagcaatcgccagaatggcagatgaatgtgtggattcttgaagccttttttttttttttggagtaatcaccggaggagagagattctccacctaaattttccattgaaagtgagcaaattaaaggttcg

SEQ ID NO: 18918 - DNA, 1736 bp, Oryza sativa
  ref <308>: DATABASE ACCESSION NUMBER: AK069299
  ref <309>: DATABASE ENTRY DATE: 2001-12-06
gtattcccccatcttcctcgttctctccgcctcctccccactctccatttatactcctcttctcctctccatcgccgcattgctcgccaccccgacgacgacgacgacgacggcgacggcggaggagtagagacagagagatggccgccgcgtcctccttcaccgccgccgccaagttcttggcgccggtgtccgcgagatccgccggggactacaagccgccgctcccgctcccggcctccgcctccctcaggcccgggaggaagcccgcgccccgcctccgcaccgcgctcgccgtctcctccgacgtgctccccgggaacaaggccgcccccgccgccgccgcccactccgctgtcacgcgggaagaggctttggagctgtacgaggacatggttcttggccgtattttcgaggatatgtgcgcgcaaatgtactaccgtggcaaaatgtttggttttgtccatttatacaatgggcaagaagctgtctccactggcttcatcaagctgctcaaccaagctgactgtgttgtcagcacataccgtgaccacgtccatgccctatccaagggtgtccctgcacgttctgtcatggctgagcttttcggtaaggccactggctgctgccgtggacaaggtggttctatgcacatgttctctgaaccccacaacctccttggaggttttgccttcatcggagagggcatccctgttgctactggtgctgcctttgctgctaaataccgccatgaggtgctcaagcagtctagccctgatggacttgatgtaaccctggcattctttggtgatggtacctgtaacaatggccaattctttgagtgcctgaacatggctcagctttggaagcttcctattgtgtttgttgtggagaacaatctatgggcaattgggatgtcgcatcttagggctacttcagacccagagatttataagaagggtccagcgtttggaatgcccggcgtgcatgttgatgggatggatgtcctgaaggtcagggaggtggctaaggaggccattgagagggcaaggagaggtgaaggaccgactcttgtggagtgtgagacttaccggttcagagggcattctcttgctgatccagatgagctcaggagacctgatgagaaatctcattacgccgcaagggaccccattacagccttgaagaagtacatcatcgaacagaaccttgcaactgaatccgagctgaagagcatcgagaaaaagatcgatgatgttgttgaagaggccgtggagttcgctgacgcaagcccgctccctccccggagccagcttctggaaaacgtgttctcagatcccaagggctttggaattggccctgacgggaagtaccggtgtgaggatcccttgttcacgcaaggcacggcccaagtctgagaggctcaacgagcacgcttatcagttattatgtcatgctttttcttgtctctctctagctctaccctatcctagtttttgtcgaacccatcgtcgtgttaagcgtaatgtaagcacaacctacttcttcatttgtttcattcttagacctcccatatcaatatgctcaactgctgccccagtttttgctcagtgtgttcgatttgctcttcagtagttctattggtttcagaacagctgggcctgtaatcactcactcctatgtctggacatgcaaagatacttctggtttagagtttcagctgagttacagtgatt

SEQ ID NO: 18919 - DNA, 2910 bp, Oryza sativa
  ref <308>: DATABASE ACCESSION NUMBER: AK069300
  ref <309>: DATABASE ENTRY DATE: 2001-12-06
gaaacccaaaatatttccgccccctcctcacctcccaaatcttcctttccctccttcctcctcctccttcccacccaacgatttgccctactttttttgctttcccccgccgctgctgcgattagtctccgatctcaaccaatcgaccaaccaaagccttcccctctccatcgattcagcagccgcgcgcgagcacgcaccaaaccgccacctaccgcccctccccgcgagcgaaaaccctagcgcgccctcgccctcgcatggcggaccagaacggcgccgcggccgtgagcgaagcggaggccgcccctgttcaggttgaaactggtgctgaaagtggggatgctgaaagtgagcagtaccaaccatttttctccatgtgccagccgattcgctctgttagctattcaaattcctgggatatggtttgtgcccccacaattaagagtaacgaacacaatagcaacttggattcgatggatgataaatacatgctgagtgcaccttggcctgaaaatgagcagccccagtctgagaatgacatggatttgttagatggggatacaaatatgcagtctgaacccctcagcacagagcagcctagctccaatgatgaaatagatatctgggatgggaaaactaagcaagactcatcatcccttcttgacagcaagctgtgcaactccggcagcggcgctgaaccttgcaacatggagggccaacaattttctttgtccttttcccgcaacactcaatctcaattggtgggatctggtcttggcaatatggggaacacatgcttcctaaactcaattcttcagcgtgtcacccatacagtcccactttttctcaggcttcgttccactgatcactgtgctccatgctcatatgataaagatggtttctgttcattctgtgctcttaaagaacatattgatgaatcaatccgaaggtctggatctgttataaggccagtgaggttcagagataatttaaggagtatcctttgctctcgatttttccttgcagtttaattttaccacatttgtgcacacatgctcagtaatatgacttgcatttttgacaatcattgggtgtttatgcctgaaaatttcaaggttaccccttatatgatttcataacttctatttatatgcttcctcagttctgtttcaatttcaatacatcttaatattcactgaatattgtgctgagatatatatcttctattgtatctgtctctggtacttcaaattagtggtggagttccttgacaagattacccagaattatcatcagattttagaccaggacaacaggaggatgcacatgagttcctacgttgtttgctggacaacctggataagtgcaccactgatcccaagccaaaggataagccctcatcttttgatgaagaaagtattgttaagcaggtttttggaggccgactaaaaagcaagttgacttgctgtgagtgtggacactgctcggagacatatgagcccttcttggatcttagcctggagattgatcaggctgataaccttattgatgccttggaatcttttaccaagttggagcgaattggggatgctgaggacaagctgaactgtgaacattgtaatgcaaaagtttgtaagaacaagcaacttatgcttgatagatcaccagatgtcgttgccattcatttaaagcgtttcaccagccttgatagatctgttgaaaagattgacaaacatgtggtgtacccactagaacttgatttgaagccattccattgtgatcctgacatcaataaggagctgaaatatgatctttatggcgttgttgagcattctggttcacctagctatggccattatgtttgttctgttcgttcttcaccgagcacttggcatctaatgaatgactcccatgttgatttgattagtgaggcaagcgcgctgaaccaggaagggtatattctgttttatattaggcagggcaaatttcagtggttttcaagtttgctggagcaaaaggatgacctgcatcctgaaaatacgagtggtgcatctcccgtttcagtattggagaatatagatgtggattgtccaacatcctctggtgaagcaaccaacagttctggtgataaattagagaaagatgaaactagtcaatgcaaaacatctttccttgaggagccagctaagggatgcccgattgatggtatcaacaaggctgacctaaaagatgaaatcgtgccatgcatatcatctcatcacgattgtgtggctaataggtgtcctggtagtgctgctgacattaccaatttggacagaccctcaactccttcgccaaaacgcaagcgtttcttctctgatgataatgagtttaatgtgtttgagtttgaggacttcggtgacgaagatgagacccctctgcttggaaaccttaaattcacatcaaaagctaagaaggctaaggttgaatcagcatctaaatcgacgaagggcccttgcatagataagaacgtaacacgattagtaaggagtatgccgtccactcggagaaaaggcattgtggactgcttgagccaactcaatgcagagcaggattctggaagctgtcctcggagtcaccctcttggcaaaaagaagctcggcatcccggttccaatcaaatggtagcatggtccgagtgccgaagcctttttttttccagctgtacatgttagtttagcatgcattttgttttatatccagaaccaacaaattttatctgcttgtcataacctgtatgaccggctagatggtgatagtgaggtacatttttgctgccttctgatgtggaatgcctcacctatatgtatggaacatgcactcggagtcccacttcatttgtgaaaaacagtggcaaagggaagagact

SEQ ID NO: 18920 - DNA, 4065 bp, Oryza sativa
  ref <308>: DATABASE ACCESSION NUMBER: AK069301
  ref <309>: DATABASE ENTRY DATE: 2001-12-06
ggcttcgcccccactcttcactcccctccccacccccacccatcaatttcttcgtccgtctcgtgttaagccgcccctccactggcgacaaccaaaccctaggccgccgccgccccgggaggccaccagggggaggaaaaaggaagaggaggagatcggaagtgggagagggatttatgtcccagcgaggggacaggggcgaggggcacgcgaggagacccggccggtccagcagcttcggcggcggccaccgcggaggcggaggagtcggcggcgcgggcaagggcggcgggggctcctccggccagcctcccctcgcaactaaccgcagcttcaggaagtccggcaatggccatggcgggcaccagagggctgtgagccaacccgacacgcacggcttccagcctgcacctgccccgaccgctctgcagacgccgccgctgcgcccgccggcacctcagaatgcgccggcgcatgtccctgttcccgcaccacgtcctcagcaccatgatccgtctggagcgcgagcacccaccctaccaccttccagcgagaacacggccaatgcgccaccactgaaaggtattcctcatgccgctccaagggcaccatcaaggatttcaagcacgtccacttcacaaggagcaccaaaaggtggagcatataatcttcagtttggcagtttcccaatgaatggtggaactggtggtagcacaatgcaattccctgccaggacaagctcagctcctcctaatttggatgagcaaaaacgcatgcaggccctccctgaaggtcataaggttgtaccttctgggcttgttccacaagctccaaaacatcagcagcaacagcagccgttgcagcagcagaagcaacagccgcagtcacagccaccactgcagcaaacaagaaaggatgttgttagttctaatcattcatcgaaacctatcaaccctcacattccttcccaagttaagagctctgtgcatgtctcaccatccgtgcccaatgttgcaccaccaagaccccctgttcagcagatacctgggatgcccatgtcaatgccatttcaccaccaggcacccttgcagtttggcggtcacaacccacaaattccaccacagggagttgtgcccagttcactacaaatgtctatgggattgcatggcgccaacgcaccccaggttgcacagcaaatgtacatccctaccattcagcaccatcatcaactgcaaccgccaacaatgatgcatcaagcagcaggtataccttatggtccagctgctcatcaactcactcagatgagtggtatgatgaatgtgggggtggcacctcagtttactccacaacagccaaataagtatgttacaggcccaactcggaagaccacagtcaaaattactcatccagatactcatgaagaattgaagctcgataagaggatggactcttctgggcaaaggggtttacctagtgtacaacaacaatcccagccggtcagtacttatggatctcctatgggcttctaccagcaaaattcgtataaccagtcaactatgttttaccccacaacctctggtgtcggtcaggttcccactgtatcacagggtcctaggtttgtatccacacaaacagtttcatacatcagcccatcgatgaacacaggtcctggcagtaacaaggacaacctagcagggtctacaacatctggacactcccaagtcacaggcaaaccacacccagctggtttgcacatggagaaatccggggtacaaacggtcacgataagtgcgccgcctggtaaatcagatgtgaacaagttaaaaccagctgaagatgttgtatcacatcgacaaaaggataatgaagctgtttctggggtccgtaaatcaggtgaaaatgagagcaaagcttcaccgatcacggagaagcatcccacaccagtgagccaacccttacaagctctagctgcaaatccagaaactacagcagctgcatcttttgttgtgaattctgttcctggagatgatggaaaaagcaaagaatctattcaaagaactggatcatttaaggatagcaataagaacgccactaaggacaccaggaatttatcacaagaaccacagtcagcttcatctgctgaagatttaaaggtgcatacttctgtaaaggatgtatgttgtggtgttagtctcatggaatccaagggtgtgaataaagagtctgaacagaccaatgcagcttccgcttcaccgactgaaatgttaaaagctgctgatgcttctagcattgataggagctctgcaagatcgacctctgagagcactgagaatgttcaagaagtaggaaaatctgatgttgctattggtgattctgagaaaagtggaataactaacaaagtttcaccagatcttacaaaggatgatatttcttctggttcaactgggaatgaatcacatgaagtttgcacgctagatttggcggagcaattacctgtgggagcttctaatcctgataatttagatactgcaacttctgtaactgaccagggacagcttctcaaagaacccagctcatcagtatctgatgagaatgttattatggacagatcgcatcagagtgctgaaaaaatgtcagatttggttgatgacactgttgcttctgttgccagttctgaaactttgccagaatctataattcaaaatgccaatgctaaaggtaacacaagtggtaatcaggaaacagggtctgctacatctagcaatattcttaatgtgttgccggtacctcattcagtggcatcagaggatccactgaaaccagaaagtatgttaaaggatcaatcgagtagtgcaccagcagcctctgctcgaccagtttcaagggaaaaacctagcgtggaaattaccagaacaaagtttacagctgtgaaaaagaagaaaagaagagaaatgctttcaaaagctgatgctgccgggagctcagatctttataatgcatacaagggacctgaggaaaaagtagatttcattggtgcctcagagagtcttgatagttcttcaattgctgatcatgagctaccagacgagtcctccgaaaaggaggttaatatgggtgaggacgagggaaagaaaaaggttaagcttgatgattgggaagacgctgcagaaatgtctactccaaagttggagaggtctgattccagcaatcaaacaaccgaagctaatgggaggaagagatattcacgcgattttttgctaactttagcacagagttgtactaatcttcctgttggtttccagatgattgagtacgccagcgttctgttccctaatttggccggaaagtcttatgttgttgatcacccaagtcctggaaggggagctgacaggccagcatctcgtggtgatcgccgtggtgttgtcattgaggatgatagatggggaaagtcgggccatctttttggttctggtcgtgatatgtccatggacaatggccctccaactatgaatcaccgtggtgctccaggagttatgaggaatccacgaggtgggcttattaatgtaggaccggttgcacctcaaatgtctcgaagtggctctgatgcagatagatggcagcagaagggtatattcccatctcctgttacacccatgcaagtaatgcacaaagcagagaaaaaatatgtcgttggcaaagtttctgacgaggaagaagctaagcagaggcaactgaaggcaatacttaacaaattgacgccacagaattttgaaaagctttttgaaaaagttaaagaggtgaacattgacaatgtggcaactcttactggggtcatttcacagatatttgacaaagctttgatggaaccaacattctgtgaaatgtacgctaatttttgtttccatttggctggtgcactgccagattttagtgaggataatgaaaaaattacattcaagagattgcttttgaacaaatgtcaggaggaatttgagaggggtgaaagagaagaagctgaagcagacaaaactgaggaggaaggtgagattaagcaaactaaagagg

SEQ ID NO: 18921 - DNA, 2225 bp, Oryza sativa
  ref <308>: DATABASE ACCESSION NUMBER: AK069302
  ref <309>: DATABASE ENTRY DATE: 2001-12-06
gtgaacgcaaaaaaaaaaagcgcctccacaccatcgccgccccaatccaccctcgcgcctccccacatacccaccagcgcctcctctcacgcccgtacccacgccctaaaaacgcctcgcccccgccgccacgccacgcctgccgctgccgctccgccgcccctctcacgcctgccgccgccgctccgccgccgcccttcgtgccgctcgggaggagttgcgacggggtcgagcccctcatcgccgaccacctttcttcgctcgcagccgccgtcgtagcgtgcgtcgtcgtcaccagacacctgcgatcatcattccctctgtgtcacctcgccgtccgtctgtactacacctctgccgccgggcagccgccgtcgtagcgtgcgtcgtcgtcaccagcgatcaccattccctcagtgccgcctcgccgtccatccgtactccacctctgccgctgggactcagggccgaacagatctccccggccgcggtcgctcgttcttttgctgcaaaactaaaatgatttggcctggtgaacctaaagcagttttctgatgcagtgttgctgcaatctgacactagtaggcgtgatccacggagacagtagcactacccatgcctcgtcccgtatcacagcgaacagctgcttctatccctcacaatctcattccctgaattgaaggtacggccaatttcttcactgctcccttcttaactttgctatgggatctgtagcttttagttttttcataatgattggtttcgaaagctagattctgaaaaagactgaaatgaaagagtttgttgggggcaccgcaccatcaagtacaacatcagaccctcttgctgatataacaaatacaaatggtctcggtttcactaatagacggggcaagggtagagccaagtcgttatgtgttgttcgaagaaacgacgaagagtgtcacggctctaaagaaaactgtgacaactctgaacagaacactccgatagcttcaaatgtgcatcctattgtcacgcctaatagtcagtcatttgcggatgaccgcgatgcatccttcagtacacccagcaatttgcctatgtgcacaggtgcgcatggagatgttactaaccttacccatgctgaagttgcaagaaagcgtgctagaaactggtacacatcattgacccaggagcaaaaggatgagaggaacaagaaggaccatgagagaagaaaacggaagaaggaggaaagtcaagttttaaagtctgcaaccaatagtggtgtagccccacttggcaagctttccaatgtaagtgctgctgatttaatgacatgccaattggaagtgaacgattcttctacgttgaagaacgaagtgatgcttcccatcttaatatcacacccagacgtctcccatttacaatcatcaacaatgtagctcactatggtccaaatgaagttccaatgagctgcgtaattcaaacaacccaaaacagagacgtcaagttgcgtaatgcaactcttacaccggagcagaagcaagctaaggtcgatcgacagagaacaagacgtcaagcactaaccaatgaacagagactagagatgaatgatcgccgtagggttgcaaggcaaactctgccggatgtggaaatacatgatatgaatgctcgccagcgatcaagacgacaaagtgttactcctggagaacggtctgctcatctggcacgacgtaatgaactgtatgcagctaggcgtgacaaaccatgcactcaatcgattgcattggagtgccctgaggattgtagctcgtcgttgctaaatccaacgccttcctttgaaacaaccggtgatgtgccagctacatcgagcctgcaaactgaacttgctgcagatcatcttgcacgatcgtctaactttgatgatgatatggattccttcatggatgatgacaccgacgatgaacactacatgtttgctgggctaggcgatgatgaggatgacgagatggtacaatccgatgacgatgacacgcaagcaccgagctcttcaattcctgatccgttcgactttgtgtatagcaacatcccacagagcgaaaatgttctgaaacctgagcctgactgtaaacactgtggtgccaagaggttccagtacgaaccgccgggcttctgttgtcgggatggcgagatcaagcttgtagaaaacgaaacaccacctgaaatagtttcattacgatgcc

SEQ ID NO: 18922 - DNA, 1674 bp, Oryza sativa
  ref <308>: DATABASE ACCESSION NUMBER: AK069303
  ref <309>: DATABASE ENTRY DATE: 2001-12-06
ggtgtggccgctggttgcagttgccgtcacaagttcacaagtcagaacacacctgcggctgcgtacgctgagctcgttgatagatttgggctagccccaacgttgacaacatccaccgttccggtggagttagccggacgccttaaaatagaatagccccggacgcggcaacgacgcgcagaatcttggccggtgtggtgttgcagccaggagccagagccctcaaccccgcaggcgcgcagcagcagtggcgcgcgcgcgcggggcatccgtctcaggcggctcaaggcaggtcgggcgagagggagaggagatcgacgcgcggcgtcccctcagccggaggaaaggtttttggctgtgaccgtaacagatccaggctaatccaatggatgacaacagcattcagcaatcactgctagctgataaccctaatgtgctgcagcggaagccgtcagaaggagtaaatcggtttcgacgatgcaggtcgactccttccacggatcctcttcaaggcccccctgaaaagggctcatcagttaaagccaaggagttattcaaggagatgaggccaagtttcagactagtaggacttctcctttttatctatcttctagtgggcgtcctggccttttatgctgtcatggatgagatatcaggcaagcgaacaaatagagtgcttgacgccttgtacttctgtgttgtcacaatgaccaccgtcggctatggagacctcgtcccaaacaatgacacaacaaaactgcttgcttgtgctttcgtcttcatgggtatggcagttgttgctctctttgtcagcaaagtagcagattatcttgttgagaagcaggaggtgctgttcttcaaagcattgcacacgaatctgaagggtggtgagaccaagatgcttagagcaatcgagacaaacaggataaagtacaaattttacacaaatgcactgcttctggtgctatccattatttctgggaccgtatttctgtggaaagtggagaaactgagtcttgttgattccttctactgtgtatgtgccacaatcactaccctgggttatggggataaaagcttctcatccaaactgggacgtgttttcgcggtcttttggattatcacgagcactatcatcatggcacaattcttcatgtaccttgctgagatctacaccgagcgacggcagaaaatgctggccaattgggttctcacacggaaaatgacaaagatggatcttgaggcagccgatctggatgatgatcgacaagttggtgctgcagaatttgttgtgtacaagctcaaagaactgggtaagatcaaccaagaggagatttcttcttttctggaggagtttgaaaagctcgatgtcgaccactctggcactctctccccatatgacctgaccctagcacaatctgctcagtgaaaacagatgccttttccattgatctggtgtttcaacggtttcctttgcttccgctaattatcacctatactctatctaattgcccacgggtaattcagtaagtaacaaaagaaatgagtggtccttacctcctacatctaacatagtggatcagctcctgaacatgtgtaagagacaagtatttgtgaagtaacaccgagctcacacacctgcatatatgaaattcgataagctacttttcagtc

SEQ ID NO: 18923 - DNA, 1003 bp, Oryza sativa
  ref <308>: DATABASE ACCESSION NUMBER: AK069304
  ref <309>: DATABASE ENTRY DATE: 2001-12-06
gaccgtgtgatagatcgatcgatcctagaggcggaggacgcggcggaggctgtcggcggcggccgcctcggcgttgcatgacggggcgggcggcggaggcggcaccaccttgttgccggcggcgggggacgacgacgacgacgtgatcacgaacctgggcagcggcaggctgctcggcggcggcgcgagcacgtgcagcaggtcctggacgaagttgcgggccacctcctgctccaggtcgtccagggcctccgccaccgccggcgccggcggcagcggcgttgcccgctccagcggcttcttcttctgtgttcctcccttcgtcgtctccgtcgacggcggcggcctcgacggcttcctcctcctgtccctctggcgcgtcgacggagtactagctctgccgctgcgcggcggctgctgcggcggaggcgggtacgggaaagtggcgtacttggtggcggcgggtgggagcggcaggagaggtggctggttggacggcaggagaggcagagacggcgacgagtacagcggaggcctcgcgtacgggagcgcgggtagtgatgcatggctccacgcgccacctttgtattgctggcgtggcgccatcgccggcgtcgcgccgccgccgaggtgccccggccggaatccgccgcctctcctcgggaactcgaagctcccggaagaccggcgatccagaagaacgttgtccatgatgatctctaggaggagacgaaaagtaattcgaatttctcgctcagatcgtcgatctaaggcgtttttccacaaaaggaaatatggagccttgatgggatttccaaagagagaaggaaaagatcaaggggacgatatgatcaaagctcgaaattaaattatatcgaacttgtgtctgtgtatcagtttttgcatgaaatttgcaagaagtaattaattaactagatccttgggattaaaaacaacaaggatgctagctaactatatatatgatcgatcggtttcgatcaag

SEQ ID NO: 18924 - DNA, 1835 bp, Oryza sativa
  ref <308>: DATABASE ACCESSION NUMBER: AK069305
  ref <309>: DATABASE ENTRY DATE: 2001-12-06
gtcccctcgctcccctaaaaccctaaccccccttccgccgccgcccccaaacctcaacccgccgccgccgccgacgccgccggcgagatggcgctgtacctgctcttcgagtcggcgtccggctacggcctcttccacgcctacggcatcgacgagatcgggcagagcgtggacgccgtccgcgcctccgtcgtcgacctcgaccgcttcggcaaggccgtcaagctcgccgccttcacccccttctcctccgccgtggacgccctcaaccagtgcaacgccatctccgaagggatcatgaccgacgagctgaggagcttcctggagctgaacctgcccaagcccaaggaggggaagaaggccaagtacagcctcggcgtcgtcgagcccaaggtcggctcccacatctccgaggtcaccggcatcccgtgccagagcaacgagttcgtccaggagcttctccgcggcgtccgcctccacttcgaccgcttcatcagcgagctcaagaaatcggacttggagaaggcgcagcttggcctgggtcatagctacagcagggcgaaggtgaagttcaatgtgaaccgcgttgacaacatggtgattcaggctatcttcctgttggatacacttgacaaggacatcaattctttctccatgagagtgagggaatggtttggatggcattttcctgagttggtcaaaattgtcaatgacaactacatctatgctaagcttgctgattatataaaggacaaatctgagttggcggaaaaagatatttcgaagttagctgatctgattggagatgaagataaggcaaaagaagttgtcgaagcagcaaaggcttcaatgggtcaggatctgtcagaagttgatttgatgaatgtgaagcagtttgctcaaagagtcatgaatctgtctgaatatcgtaaaaacctttatgagtatcttgttaccaagatgaatgatattgcaccgaatctaacatcattaattggtgaagttgttggagcacgccttatctctcatgctggcagtctttcaaaccttgctaagtgtcctgcctccactctccagatacttggtgctgaaaaggcacttttcagggcattgaaaactagggggaatacgccaaagtatggccttatattccactcatccttcattggccgtgcttcaaccaagaacaaaggcagaatggctagatatctggcgaacaagtgctccattgcatcacgcattgattgttattcagagtcagctaccgcagtctttgggcaaaagcttcgtgagcaagttgaggagcggttagacttctatgacaagggtgttgcacctcgtaaaaaccttgatgtgatgaaagctgcgatagacagcatggttaatgatgccacaaatgatgttgatgatggcgagaaggtcgatgcatctgccaagaaaagtaagaaaaagaagtctaaagctgaagctgacggcgaagcaatggacctggacaagccttccaatgtggctgatgaagctgagcctggaactgagaagaagaaaaagaagataagcacaagctggaggaggagccacaggagcaggagaagagcgtggcgcatgccaatggcgacgccgaggagaacggtactcccaagaagaagaagaagaagaaccgtgaagtctcggaggacgctgagcctaagacggccactgaagggaagaagaaaaagaagaagtccaagacggaggacagcgactgagtgatcggtttgcctacttgcatggctgatctttctgattagtgttgttggaagcagagttaaaaaaaacacctagattcctagttcctg

SEQ ID NO: 18925 - DNA, 1823 bp, Oryza sativa
  ref <308>: DATABASE ACCESSION NUMBER: AK069306
  ref <309>: DATABASE ENTRY DATE: 2001-12-06
ggaaagaaagaaagagaaaaaaaaaaaatccccccaaatcccaaggcctccctctcctctctctctctcgctctcccctccccgcgcgtcgctttcgccggacaccaccgccccccgccgctttcccctcctctcctctcctcgcgtcgcctccttccttccctttttgacccccccaattcccaactgggaatcccccctcggacggcggcggaagcggaagcagcagaggagagcatctggttcccctgcgctgcccgctttttggtggtggtggcggcggccggcggcggatcgctgcctcgccgtgccggtaagcattctcatgatgtaccatgcaaagaagttctctgtaccctttggaccgcagagtacacagagtaacgagcatatgagtaatattggagcttttggcgggtcaaacatgggcagccctgctaatcctgcagggagtgggaaacaacggctacgttggacctcagatctccataaccgctttgtggatgctattgctcagcttggtggacctgatagagcaacacctaaaggggttctcactgtaatgggtgttcctgggatcacaatttatcatgtgaagagccatttgcagaaatatcgccttgcaaagtacataccagaatctcctgctgaaggctcaaaagacgaaaagaaggattctagcgattccctctctaacacagattctgcaccaggaatgcaaatcaatgaagctttgaagatgcaaatggaggtccagaagcgactccatgaacaacttgaggtgcaaaggcagctgcagctgagaattgaagcacaagggaagtacttgcagatgatcatagaggagcagcaaaagctcggtggatcactcaaagcttgtgaggagcagaagctaccgcattcaccaccaagcttagatgactacccagatagcatgcagccatctccaaagaaacccaagatggacaacctgtcacctgattcggtacgggatgtgacacagtcagattttgaatcccatttgattggtccttgggatcaagaggctgcattccgagtggatgaatttaaagctgaccctggtctgaacaaatcataaagcaaaacctcactcatcggaaattcttgatccaagatgttaacctccactgcgggccgatcgcatgtgaatatatatcctcttaacaacagagcgagccttgtaaggatctttggatccacatctgattccttcaccacggccaggtgttgtcgtcactgtagtattcatcatcatcatacagctcttgtaattatcaggatgtcctaaaagccctagcaagcaattttccttcttttgaagggaaattgccctgagttgaatcatgtagccagaaagagtacacatttacacgcaatacatttgctgtgaagagggtgtgcctccctgaagttatatgtgaatgatttgtgttagattcatagttagaatttggccttctctcttctactgctaagtgctgctcagaatcaagaaaaaggagtaatgattaaaatgaagggttaggttctagcttttgttttgacgtttgacaaagtaaggtctggtttggtttacgatcaatgtaaaaccttaccaaaacatttgtatgctaaatcggggtactgacaaaattttggcgaagtcagttattggtttgctgccaacatttttctaggctgtctggttatagtttggtttgaagacaactgaagttccaagtcccaaccatatgctctgcaaaaatttagcaatgtatgagttgtcactactaaaatttagtacagcaaattaaatggtagtc

SEQ ID NO: 18926 - DNA, 1281 bp, Oryza sativa
  ref <308>: DATABASE ACCESSION NUMBER: AK069307
  ref <309>: DATABASE ENTRY DATE: 2001-12-06
gacatagagagacatgagaggtgaacaaaaccccccagaataaacacaggctttccttcgtttcaaggaagaacacacacagagatagaggtgaagagcgagagagggtaataaaccgttgtgtctcactgggggagggaatgatgtccgaaggcgaggagcacgggtcgctgctggagaagatcaacgacaagatccatgagttcaagaagggatcgtcgtcatcctcgtcctcggactccgacgacgacaagaagcaccaccacaagtccaagtccaagaagaagcggctcttcggccggacgaacccgctacatcacgtcctaggaggaggcaaagctgctgatcttgtgctgtggagggacaagcagacgtcagggagcatcctggcgggagtgaccgtgatctggttgctgttcgaggggatcggctaccacctcctcaccttcttctgccactcgctcatggtcttcctcaccgtctgcttcgtctgggccaatgccgcctccttcatcaacaggggtcctccaaagttcccagatgcaattctgtctgaagtccaatgcctgaagattgctcatattctgaggaaagaaatcaatgaggccttcttaacattacgccatgtcgcctccggaaaagacctcaaaacatatcttatgacagttgcaggcctctggttcgtttctataattgggagctgcttcagcttcttgactttgtcttacaccattttcctgatggcatacacactgccaatgctgtatgagaaatacgaagatgaagtcgatgtcgtgggcgagaaggccctaatcgagctcaagaagcaatatgcagtgcttgatcacaagcttctctcaaagatcccaatgttagctgagaagaaacagcactaaactgatgctttgaagaccaaagccccttaatttgcatgtttcatcttcagctcagcacatcaccaaagtagtctatttgggtttcctctgtcatcttatagcaatatttgggatgacatcagatagaaatggttttgattctcgagcatccgaaaaccgggtttttttttggagcactagtacggagaacactgtagacggtcacatggagtagttgcttatgttccagtaactttcagttcatatttttgagcttctgtttggtcacaagatacatatgacacacaatttactatgattattatttgcatgtattatttgaggtattctgaatgctgaagaccatactaattagcagattaattcattttggtcctttctgttg

SEQ ID NO: 18927 - DNA, 1483 bp, Oryza sativa
  ref <308>: DATABASE ACCESSION NUMBER: AK069308
  ref <309>: DATABASE ENTRY DATE: 2001-12-06
gtggcacttgtagtactttactgcacgaagaacaccatggcacaacgtgtccaagaagaagatgagcagatgatgagcaccgatgacttgatccaagctcagatcaagctctaccaccactgcttcgccttcatcaagtccacagcactttgggccgccatcgacctgcgcattgcggatgtcatccaccgcaatggcggagccgccaccttatccgacctcgcgctcaacgtcgggctgcacccgaccaagctctcccacctccggcggctcatgcgcgtgctcaccgtcactggcatattcgctgtcgaagaccgcaatggtgaggccatgtacacactcacccgagtctctcgccttctcctcaacagcgatggggagggaacgcacgccttgtcccaaatggcgcgtgtgttagccaacccactcgccgtgatctctcatttcagcattcacgagtggttcaccaccgagaaggcaaccaccatgacacccttcgaggtggcgcatggttgcacgcggtgggagatgatagcgaacgatgccaaggatggcagcgtgttcaacgccggcatggttgaggacagccgtgtcgccatggatatcatcttgaaggagagctgtggcattttccagggcatcagctctcttattgatgttggtggtggccatggcgctgcagctgcagccatagcaacggcattcccaaacatcaagtgcactgtgctggatctgcctcatattgttgctgaggctcccgccactcatagcaacatccagtttataggtggtgaccttttcaagttcattccagcagccgatgttgttctacttaagtgtcttttgcactgttggcaagatgatgattgtgtcaagattctgcgactatgcaaagaggcaatcccggcaagagatgctgggggaaaggtgataattattgaggtggttgtcgggattggatccgaggaaattgttcctaaggagatgcaacttttgtttgatgttttcatgatgtacatcgatggcatcgagcgagaggagtatgaatggaagaagattttcttagaggctggattcagtgactacaaaatcaccccggtgctaggtgcccgatcaatcatcgaggtttacccttgatgcttctgaaggtgtacatgtgcatctctccgtggaacctattctagttcagacaattgaactaaatacataacatgttggttataaacatgtttatgttagtcttttgatttcctttcgttcatgagtcagtagccttgaggcgtgtgcatgttcacactgaggccatcgttttttcgtttttctgttgtcgtatgagctacagtatgtgctctgtgggatggtacaacttatgtacgtcgtggcttgagtcttgggcatattggtagcccgtgatttccatttttattttcatcacaataagaggaagagaaaactgaaaagctgcaatgcagttcgcagcgcc

SEQ ID NO: 18928 - DNA, 1675 bp, Oryza sativa
  ref <308>: DATABASE ACCESSION NUMBER: AK069309
  ref <309>: DATABASE ENTRY DATE: 2001-12-06
gaggagccctcctggccaatcagctctcggctctccccctcttcttccttccaagcaacaaaatcctacgcggaaaaaccatccaagaaccacattcccgtcgtcaaaaacagcccgaattgtaggggaaagtagccccgagaagcgacgatcttggagggaaatctggtgtggagttcggatcgttcaatccgcggatggaaggaggaggaggaggagggcaggagttgtcgacggacaacgtgaaggggatcgtcctggcgctcctctccagcggcttcatcggcgccagcttcatcatcaagaagaagggcctccgccgcgccgccgtcgcctccggcatccgcgcaggggttggtgggtactcgtacctcctggagcctctatggtgggttggcatgatcaccatgattgtgggagaagttgccaatttcgtcgcatacgccttcgctcccgcggttcttgttactcctcttggagcactgagcataattgttagtgcagtgctggcacattttatcctgaatgagaggttacacgcgcttggtgttcttggttgtgttatgtgcatcgcgggatcagtggtgattgttattcatgctcctcaggagcaagagattacttcagttagagaaatctggaacatggcgatacagcctgctttcttgctatatgttgcttcagttatagtggtggtcttcgtgctagtgttccatttctcccctctatatgggcagtcaaatgtgttgatctacactgccatttgctctttgatgggttctctttcggtaatgagtgttaaagctcttggtacatccttaaagttgacgtttgaggggacaaatcagttggtatatccagagacttggttctttgtgcttatagtggccacttgtgtgctaacacagatgaattacttgaacaaggcacttgatacatttaatactgcaattgtatctccaatctattatgtaatgttcacaacactaacaatacttgcaagcgtcataatgttcaaggattggtctggtcaaagccttggaagcattacttctgaaatctgtggtctgattgttgtgttgtctggtaccattttgttacatgtgacgaaggattatgaaaggattccgcaatcaagaagtatatacgcaccattgtctccctccttgacagcaagattaaacggagacttactgaagcacgtcgaggatgataggaaccccgatgaagaaaaagccttgagaaggcaagagatgtactagctccagtctcctgaagctcaaaaaaggatgaacaactccgattgagctaactagtgacatcagtgattgctatggtgtgttggtctgtacataatcaggcatctgcaggaattggtccaaaggattgaaggtgactgcctgcctgtaaatctttgaggtggttttgggaggctgcaggttacttccacagatagaattgaagtttgggtgcacagattcttctcatttctcttctttttcttctatctcttctggtgacgtatccccagttttgtccacggcatttctttcttgccccttgtgtagatttgagagtgagctatggagattgtattgcaactgtgaatgctgtacattattagtattattgtgaactgccgctcctgattctaatttgttctttcttctcctgt

SEQ ID NO: 18929 - DNA, 1368 bp, Oryza sativa
  ref <308>: DATABASE ACCESSION NUMBER: AK069310
  ref <309>: DATABASE ENTRY DATE: 2001-12-06
gaggttggcggcggagggatttggcaggcggtggaggccgagcccggcgcttccggctggcggcggttggatccgctgtcctcgcggctggacctcgtcggacccttggcgacggcgacgggttctctccgcggtgcggcaccctcgccgttgcagctccatgtgaccacggagggcctcggctcagcatcctcatcgtcgcgcccccctccccctggtgccggcggtgtgggctgggcccggtgcccccagctggcggcgcctagcgatggcgggctccttcccccgttgtccccgtccccccccccacaggttgtccatgcgtgcagcgttgggtctgggacggcacacgtggagctacgagggccggcgacgtagctctaccctccagccgccgccggccggggttgtgcgtggaggggctggcttcggaagcccggacgtcctcctacgcgcgttttggctgccgacacgtccccttggttgcaacaaacctcttccccttctccctagtgccctcgatattgtgccttcttccctccccgctccaaacctgggcctattccattgttctttggtttgctggtgttattccccgttcaaaatcttcccattttcagcttgctcttgacaattggtccagatgtttgttctgggatttgtgctcctctagcaccttggctggcctctgctctgtgccctccgctgaggttgcggttgatgatctttcatcagtgaattcccccccttagccattttccttttgtctaactcctgctcatcttcacccccttccttgagaccgtccaagacctttcagcgtttctccctccttttaggcttccttcccttgaaggacgttggagtgtgttgatctaacaagcaactcgataaagtttgattgaagaaaactcattgtgggtggccttcggccacatctttcagtgccctccctcttctggggcttccttcccccagagggcgtcggcgggctttgatccaaacaacaataagatcaagttagcttcttgatgacttcatgcgggtggcctaggacttctacaacctttctttggcctttcttctattccggcatgcttgtggctgcgtgaggaaatggatgttgataagctagggtgttagctttaggttttggttttggccgggtaattttgtagatgtcgtttgtcaattgttatattttaggaggttttcctttctctgttctctcctctttgtattccccgtgtattctgttctcctatcctccagggcttctgcgtttctataggtgaagcctgccctgtgtaagctcatttggcttaatatattcaggtggggactcccccccctgccggtgatttagtc

SEQ ID NO: 18930 - DNA, 1441 bp, Oryza sativa
  ref <308>: DATABASE ACCESSION NUMBER: AK069311
  ref <309>: DATABASE ENTRY DATE: 2001-12-06
gcaaattaaagaaagcatactaagcttagtgtgtgttgaatcggcgacgaagatgtcgtcgtcggcgacggtccactaccgcgccgacggcagcgtggagacggcggcggtggagccgctgtacccgatggcgacggtggtgtacttccagtgcgtgttcgccgccatcaccctcatcctcgtcgccggctccctcctcggccgcatgagcttcctcgcctggatgatcttcgtcccgctctggctcaccttctcctacaccgtcggcgccttctccctctggggcggcggcttcctcttccactggggcgtcatcgactactgcggcggctacgtcatccacgtctccgccggcatcgccggcttcaccgccgcctactgggtggggccaagggcacagaaggacagggagaggttcccgccgaacaacatactgttcacgctgacgggggcagggttactatggatggggtgggcagggttcaacggcggtggtccgtacgccgccaactccgtcgcctccatggccgtcctcaacaccaacatctgcaccgccatgagcctcatcgtctggacatgcctcgacgtcatcttcttcaagaagccctccgtcgtcggcgccgtccagggcatgatcaccggcctcgtctgcatcacccccgctgcaggggtggtgcaggggtgggcggcgctggtgatgggggtgctcgccggcagcatcccgtggtacaccatgatgatcctccacaagcgctccaagatcctgcagcgcgtcgacgacaccctcggcgtcttccacacccacggcgtcgccggcctcctcggcggcctcctcaccggcctcttcgccgagcccaccctctgcaacctcttcctccccgtcgccgactcccggggcgccttctacggcggcgccggcggcgcccagttcggcaagcagatcgccggtggcctcttcgtcgtcgcctggaacgtcgccgtcacctccctcatctgcctcgccatcaacctcctcgtcccgctccgcatgcccgacgacaagctcgaggtcggcgacgacgccgtccacggcgaggaggcctacgcgctctggggcgacggcgagatgtacgacgtcaccaagcacggctccgacgccgccgttgcgcccgtcgtcgtatgatcgatgacattgcatgtgctgtcacctgatgaaaacctcaagaaattcatacacacagaaattaatactacgtgtttgcttctactcgttaattatgaaaatctatgttcaagttttacgtgtatttaacagcgcgcgtgtggagtttttaggtattgcactttgcagattcaggggagtccggttctgtatttttgttagtttgtaaaaatacatacgtagttttgtatccttacttgatctgaatgaacacaagtgtaatattgtattttgttaatt

SEQ ID NO: 18931 - DNA, 2224 bp, Oryza sativa
  ref <308>: DATABASE ACCESSION NUMBER: AK069312
  ref <309>: DATABASE ENTRY DATE: 2001-12-06
ggctgctactctctctccccttctcttctccggttctccctctcctcctcccacctcagccgccgcttaccggcggcgccgcctgctaatctgccggcgtgagcaccggcggagatgtgttactgctacccaacctataacgcagctctcccgcgcagtgcctctgtctctagctagggttttcctcttgggggagacgacctactatggtaaggtggggagctgaagccggcgacctggtgctgtccggaggaagctggagctcgtcgccgtcggatggacgccgatgaggccgcggggagtagcaggaggatggatctgaacctctaccttggcctcccacgcgccccgcgcccgcgccgctccgacctcggctccgacctcgccctcagcaccccgatgccctcctccccgtcctcctccgcagcctccgtcgacgcgccgccgccaccgcccgagctgtcgcatcccccgtactccccctctcacgccgacctttcccctccgctgcaggaggtctactccctgtacaaccccgacgacccgcctgcttccgagacgcacctgccgccgtatgcgccgcctccggctccggtggtctcggagctccctgacgacctcgagtttggcctccaccccccgccgccgctggtgcgtgccagcgaactgctaggttgggaggaccggccgtcttcgtcgacggcatcgtcctctttcctccctgacaccgcagcccgttactggcggcttctcgagcagactggaagcagatggctccgtgcgaggcggtttaggtcggaccttccgccactcagttctgaagcttacccagctgggcgtgatgctgccgcagtcccagtgctgcagcatgaaccgatgaatgatactgttgaacataataaggtagctgccgatggcgcggaagtaggcgcctccgaggaatcggaggagcagggcaggagcgctgccacatttgagtgtaatatatgcttcgatatggccagcgagccggtggtcacctcttgtggccatctcttctgctggccttgcttgtaccaatggctcaatgtttattccaatcacaaggaatgcccagtctgcaaaggcgaggtgactgaggcgaatattactccgatctatgggagagggaattcatgtttggatgccgagaaggctgtggaaggtgggaaacaaacaggtcctactatcccaccaagaccacatggaaatcggctcgaaagcttcaggcagcagtttcaccatttgcgaccgatctcaagaaggcttggtgaggctcatgggttattgtcatcatggaggcgccttctggaccaacagattatgaatactgcgagtaggtttgaaggtccgcctgaatcagctgtgcaggaaatggttgacactgctcacgctcagcacaccagtcgcctaagtagattggcgtcaaggatgagagcaagacggttgctgagagaagcagacaaccctaaccctcccgatggcggatccacttcccctgacagtggtttgatcagaaacaatgcatcggatccatccagaaatggtccgagctcattattaccagatggaattgactggttgcgtggacttacccttcttgggtatgaagacacggaaagatttgcatctgccatgagtgattttagaaggataactggaccaagccaatatggtgcatcggcttcatcatcgaatcctccaaatctcgagtcaacatttgacagaactcatgttgttgcagcaccttctgcagaccaagcatctaactcaagcactgctgcagtgatacagggggatgctggtatctctgagagtgcaggagaaccaagtaacgcggggtcatcaagatccctgaggaggagagggaggagcagtgccctgggttctttggatgctgatggcgggggcctccaacggaacaagaggcgaaggataaactgaacattctgtgttgtggtgttgatctaaactctgcatgccatgctcgctgattttcaactattgcatttcatttcttcgggtgatgtctcctgtgttgtagtgtaacattttttcttctcttttcattttcccccgtaggttgcactgaaatgtttatctgtttagttctcatgtagcctgtacctgtttaatttatggaaagttattgatcaagacatttttgcattcgaaaggtaatgaatggttcaactgcatttccatg

SEQ ID NO: 18932 - DNA, 1163 bp, Oryza sativa
  ref <308>: DATABASE ACCESSION NUMBER: AK069313
  ref <309>: DATABASE ENTRY DATE: 2001-12-06
aaaaagaagcgggaagtacaatactcctctctctctctctctctgtcggtcttcatcttcctcctgcttctgctcctgctcttctttaaaagcttccaatccccccttctccttgtgtgtcgtggcaaagcctcttctcttctcgtgccttctagggtttcctcttcctcgcaccgcgccgcctcgcctcttcgtccccagattcagatctactcctactcctactaccaaggttgttgccatggctcccgctgttgaagccgtggagaagaagacaggctcagcccccgtcaaggcccctgctctgaatgaaaggatactgtcatctatgtcccggagatctattgcagcacatccatggcatgatcttgagattggacctggtgcaccaactatattcaactgcgtcattgagattcctaggggcagcaaggttaaatatgaacttgacaagaaaactggactgatagtggtggaccgtgtgctctattcatcagttgtgtaccctcacaactatggattcattcctcgcacgctgtgtgaagacagtgatccgttggatgtgctggttataatgcaggagcccgttataccaggatgcttcctacgagcaaaggccattggtctcatgcctatgattgaccagggagaggcagatgacaagattattgccgtttgtgctgatgatcctgagtacaagcattacaatgatatcaaggagctcccacctcaccgcttggctgaaatcaggcgcttttttgaggactacaagaagaatgagaacaaggaggttgctgtcaatgacttcctgcctgcaagtgctgcttatgaggccataaagcactccatggatctctatgctacttacatcgtggagggcttgaggaggtagacttgtgccgcttcctggaccgagaggatggatgttgacgaaaattgtggagatattatcaccttatgagcaaatactattattttgttggtgtgtgatatacaccggtattattcacatttcaagtagtaacagcacaagtagaaactactagtagcacaacaaagagtgatattccttttatggccctcggtgccactacgatatggagtattggtgaatgatgatactttatgctgattctattgatatggttcgagcaaagatttgc

SEQ ID NO: 18933 - DNA, 2282 bp, Oryza sativa
  ref <308>: DATABASE ACCESSION NUMBER: AK069314
  ref <309>: DATABASE ENTRY DATE: 2001-12-06
ggggatttacagagcgcgcaatgttcggacgcgccaggtgctcgacctcggcccccgccgccggcgagcggcgcgctcttcccgtcgaccctctctccctccctcgcctactcgtctccgccgccaccacccccggcgccgccgccccggccgtctccaccctacacgccgccgctctcaagctgggggtcctcccctcctcgctcccggcctccaacgccctcgtctccgcctactccctctccggcctcctcccctgcgcgctccgcgccttctccctcatcccccacccttccaccggatcctacaccgccatcctctccgcgctctcccgccacggccgccgccgggaggccctctccctcttctccgccgccgcggtcgcccgccccgacgccgagctcctctcctgcgtcgtctcctgctgccgccgcgcatccgcctccctccccgctcgcgccgcgcacgcctacggggtaaagaccgcgccactgctggccttctacgcctcggccggcccggcgctcgtcgcgctgtatgcgatgtgtgggagggtgagcgcggccaagaggatctttgatcgtatggacggcgaggacgtggtgtcctggaacgcgatgattggggggttcgctggtgccgggatgaatggcgaggcgtgggattgcttccgggagatgcgcgcaagaggtgttcgagggaatgcccgtaccgcggttgctgtgctgggggcttgtgatttggagtctggaagacaggtccatgggcacatggtgagaaaccatggtgatagtggttcaaacgcaattctgtggaatgcgttgatgaacatgtattcacgtgttggatgtgtcgacaatgcagaacatgtgttcttcgagattgaacggaaggatgttgtgtcatggaatgtgatgataggtgctttcgcaaagaatgggcatggagagagggcacttgaacttgtggatgcaatgttgcgttgtgggatgcagccagattcagtgacattcacaactctgctcatggcatgctgccactgtggcttggttgatgaaggtcttgcgctttttgagcggtttgtggaaaattctgccctcatccctactatggagcagtgtgcttgtattgtggatttgctttcacgagctgggaggttcagagaggctgctggatttattgatcagatgccaatcagaccaaatgcagttgtatggggtgctttgttatctggaagtaggatgcaccatgatgtggatcatgcacagatcgcttttgagaaactggttcaattggagccagataaccctggaaattttgtgactatgtcaaatatatatgcaaaggccggaatggttgaggatgcaaagagagttaggatgatgattgacagggaggagttagtgaagccttctggacaaagtcgtgttcaagctatgtaagaagtgacagcaagtaaatacctggctgctagactgttaggcctaagtaagacctacccttttctgtaagcttgatttcttgttgcaccatccttcaagtaattgtatagctacaaaagatgcaccacctctgtggcctctgttgtttttgttcttcacaataatgtaccttttgttcgtactggtatttcttcctacgaagatggcagagactatgaccaataacctaccttctgttttgtaactgcacagaatgggttatgaatgcccagcattctttagttactgtgatttttttctctacgcttcattttaaaaagataacaacgcaatctttctatttgcatctcttctaactgggtaataaacaaattgcatgctaataaaactttcaatgtgcgcagttgcttttagtcatcatgatttgtctaccgtgcttcagagtgcagcaacactcatgcatccactaccaacagttcatttggtgtctaccattggatatggacaaggtttgttcactaagaggggatttaagggcttgttcagcacccagggtcctctgccaagttttgcagttctctctggcgtccattgtctagttgtgtgcctgttgagaaggctgcgtggcaaagatgacattgttaatgctggaatagctggttgttgcactagccttgctctgagctttccagatgcagctcatgttgattggcttttgcttgacgaggtcttaccagggagaagaagttaattatggcaaccctgaatctgcatagcattttaatgtctcactgcaacacgttgtctggatattcgtaaaataacatagcagtttccacc

SEQ ID NO: 18934 - DNA, 1125 bp, Oryza sativa
  ref <308>: DATABASE ACCESSION NUMBER: AK099089
  ref <309>: DATABASE ENTRY DATE: 2002-08-28
gacacaaagcacctcgcttacggtttttagcacccacacacactcccggccaacatctcaccacccccgagagagaaggccgcgcgccgcgcgctgctagtagtgctcgatggcgatggtccccgccgacgccgacgccgccgccaagccgccgccggacgtggagaagccggactacagctcccagaacggcgcccccaactcggccgccgccgccgccggggggggcggcggcggcgtggtggattcggtggtggcgcggtggcggcgggaggacatgctcgacaagagccccctcgcgctgcacgcggccgccgcggcgttcgccttcgtcgcgctcgtgctcgtcgcctccaaccagcacggggactggatggagttcgaccggtaccaggagtacaggtatctgctcgcgattgcggcactggcgttcgcctactcgctcgcgcaggcgctgcggcatgctctccggatgcgccgcggcgtcgaccccgtcccgacggcgtccgggcggctcctcgatttcgccagtgatcaggtagtcgcatacttgctgatgtctgctctctctgctgctacacccattacaaatcggatgagatctgcagtaatcaaccgcttcaccgacacgactgctgctgcaatcagcatggccttcttggcatttgtatccctcgccttgtcagcgatagtttctggatacaaactctccaaacaaacctacatgtgaagcatcgttctataggagtaaagcccatttcatgtgatccattcatcctggagatgcaagaacttatgatgacatgaaggcgtagtggtgattgctgttacctattggtagcttacacatgtgtacataagcttagatgcaacatgcctgaagctctgaagaccgcaatatttgtttaaaatttgtgctaccctttgactaccagaacaacatttctgcggtgatgagaaggtgagaactgcttgttctgaagatacagataagtgtacctatgtgagcatttattgtagcatcttttgtatgtgagactgttatcattttattgtagcgtctaagttcaatttgtgtactaaatttttagcgtgaggaatttatgggctagatttgtcatttct

SEQ ID NO: 18935 - DNA, 829 bp, Oryza sativa
  ref <308>: DATABASE ACCESSION NUMBER: AK069315
  ref <309>: DATABASE ENTRY DATE: 2001-12-06
ggggtgaactcgaagtcgacgtgcacaaaggcgcgctcgacttcggggagttgctccagcttctcctggagcgactccccgatgtcgtgcgcgtggctgagcggcatgtcgccggggaggacgatgtccacctccacgaagtagtgagtcccgaaggtgtaggccctcaccgtgtcgatgtgccggatctcctcgtggtggttccatatcaggtacgtcagcttcgtcaggtactccgccggcgccgacctgccgatcagcgtccccacgttctccaccaccgtccgagcccacgtcgtgatcgtgtacaccgcgatctgcatatccaccattaattctcacatggagtagctagcagagtggcaggcaggcagcaatgggggcactcaccagtatggctccgaccggatccatccaccatttgtaccggacggcgaggagcgcgctgacgaggccgaccgagttggtgatcacgtcgaagaaatggtcctgcgcgtaggctctcacgatctcgttcttgaacgaccggcagtagagcatcaggaagaacttcaccactgcgactgaggacatgctgccgatcatccacagctccttcctgtggtcgaacacttggtgctcctgtaaggccattgcatataatagattaagctagtgtcagctgataaatcacataaataatggattatgaatttgacgaagagtgttcgtgggtacatttgtgataagctgacgcccggattcaattagcacttggaagccaagtgtacccattacagatgcaaatactattatgccctgaaaataacaggttattcagttagctcct

SEQ ID NO: 18936 - DNA, 1677 bp, Oryza sativa
  ref <308>: DATABASE ACCESSION NUMBER: AK069316
  ref <309>: DATABASE ENTRY DATE: 2001-12-06
gcttcaggtggaagccacaaaacgaacgcgaactcgagcggcgaagaagaagagagagagagataaggcggcggcagcgagatggcggtgacgatccagtccgtgaaggcgaggcagatcttcgacagccgcgggaaccccacggtggaggtggacgtgggactcagcgatggcagcttcgcgaggggcgccgtgccgagcggtgcttccaccggaatatatgaggccttggagttaagagatggaggatccgactatcttggcaaaggtgtactcaaggctgtgagcaatgtaaacactattattgggccagcactcatcggaaaggatcccactgagcaagttgacattgataacttcatggttcaacagcttgatggaacctccaacaactggggctggtgcaaacaaaagcttggagcaaatgctattcttgctgtttcacttgctgtgtgcaaagcaggagccatggtgaagaagattcccctttaccagcacattgcaaatcttgctggaaacaagactctcgtgctgcctgtacccgctttcaatgtgatcaatggaggatcccatgctggaaacaaacttgccatgcaggagttcatgatcctccctactggtgcatcctctttcaaggaggccatgaagatgggagttgaggtgtaccaccacttgaagagtataatcaagaaaaagtatggccaagatgccacaaatgtgggggatgaaggtggctttgctcctaacattcaggaaaacaaagagggcctcgaactgttgaaggccgcaatagctaaggctggctacacaggcaaagtggtcataggaatggatgttgcagcttctgaattttacagtgaaaaggacaagacttacgatcttaacttcaaggaggataacaacgacggttcacacaaaatttcaggtgacagcctgaaagatgtgtacaagtcctttgtttctgagtaccctattgtgtcgatcgaagatccattcgatcaggatgactgggctacctatgccaagcttactgatgagattggacagcaagtgcagattgttggggatgaccttcttgttactaatcccacaagggttgccaaggcaattagtgaaaagacttgcaatgctcttctcttgaaggtgaatcaaataggctcagttactgagagcattgaggctgttagaatgtccaagcgtgctggatggggagtgatggcaagccataggggtggtgagacagaggataccttcattgctgacctctcagttggtctgtctacgggtcaaattaagacaggagctccctgtcggtcagagcgtctggctaaatacaaccagctgctcaggatagaagaagagctgggcgatgctgcagtttacgctggagaaaaattcagagcccctgtggagccgtactaaaccttggcaccttgcggtgatcttgtgcctatggaccatggtgccatcaatctactactgcgtttttacacgagtctacaagggcaataaaattagtacttcttgacagtcccagaaattgcttagttaccctcgctttttcgttaatggccagattgtttgcttactactgtgttgacacacttgagcaccaatatgtaagatcaataaaagagcaaatcgcttgatttttcatcataaagtatttttttcccc

SEQ ID NO: 18937 - DNA, 1210 bp, Oryza sativa
  ref <308>: DATABASE ACCESSION NUMBER: AK069317
  ref <309>: DATABASE ENTRY DATE: 2001-12-06
ggagttgggaatccgttgctgtcgtacgtctcgtctatggcgtgctgtatgtcctctccttctttcttcctttccaaataagcactcctcttcttcctcctcctcctcctccgcctcctcttctcattcccaactcatcgatccatcagtagctagctagctagctagctagctgcattgtccggcgagagagatagctgctgcagggggcggccatggggaggggcaagatcgagatcaagcggatcgagaacgcgaccaacaggcaggtgacctactcgaagcgccgcacggggatcatgaagaaggccagggagctcaccgtactctgcgacgcccaggtcgccatcatcatgttctcctccaccggcaagtaccacgagttctgcagcccttccaccgacatcaaggggatctttgaccgctaccagcaagccatcggcaccagcctttggatcgagcagtatgagaatatgcagcgcacgctgagccatctcaaggacatcaaccgcaacctgcgcaccgagatcaggcaaaggatgggagaagatctggacgggctggagttcgacgagctgcgcggtcttgagcaaaatgtcgatgccgccctcaaggaggttcgccacaggaagtatcatgtgatcaccacacagactgaaacctacaagaaaaaggtgaagcactcctacgaggcgtacgagactctgcagcaggagctggggttgcgcgaggagccggcgttcgggttcgtggacaacaccggcggcgggtgggacggcggcgccggcgccggcgcggcggcggacatgttcgccttccgcgtggtgcccagccagcccaacctgcacggcatggcctacggcggcaaccacgacctgcgcctcggttgatatatcatcgccgccgccgccgccgccgccggcggcctgctcgtcgccggccggccggccgccggacaccgtatcatcgctcgatctagataacaagccgacgaataaattgcagtgctcgtgttacttacctgcatgcgcatgcattattatcgatcaacgcaagaacttcatttcatttaccaaaccacttgatgtgtgctatgatccagcggttaaaccgtgtgttgtctcttgacattttgtaccagttactgatgatgttgtattatgtatgcgtggtgtgcaactgtgcttggataatttcacacttatttgtc

SEQ ID NO: 18938 - DNA, 3883 bp, Oryza sativa
  ref <308>: DATABASE ACCESSION NUMBER: AK069318
  ref <309>: DATABASE ENTRY DATE: 2001-12-06
gccttcctgtgtgtggttcaggtgcccaaggtgatattcagattttctgagtgctcgtgtgttgtgcgatcagtgcccactgcccagttcgatcgatccgtgttgatctttgaaagaaagatgtcgtgctgcggaggaaactgcggctgcggatccggctgccagtgcggcagcggctgcggagggtaagatccgatcaccatcttctgaatttctgttcttgatctgccatgtatgtcaactgtctagtcttggtgttggttagatgaaaattcgttggatctcggaagggatattgttcgtttgctagggttttttgtgtgctgtgatctgtagaggatttctgtttgtccatgttgttgatcttggtatgtattcatgacatgcatgttgtatgtgtcatatgtgtgcctctccttggatttgttttggataatagaacatgttatggactcaatagtctgtgaacaaatctttttttagatggtggccaaatctgatgatgatctttcttgagaggaaaaagttcatgatagaaaaatctttttttagatgatggccatgcatgacatggtctttgttgagagaaaaaaaagattcatgataggagattttgatttagctcccttccaccgttataaaacgaggagcatgcatgcagatgactgatgaggatctgatttcattttttatcccatcttcttataacagacaagaaataggctctgaatttctgattgattattttttgtcgggacggccaaagtaggctggccaatttcattaagattgggggaaacaaagttttaattacaacaatttcattaagattgggggaaacaaagttttaattacaacgacatgaaggatgtcgcgccggtctcaagcaaactcaagcccggaaagaaaaggaaaaaatggggcaaatcgggattactcgctagcctgggaaaaaatccctgctaccctccaaattgcgatttcctcgttgatgtcattcgctagccggtcaaccaacttggcgatgtgttgaaagatccttgtatttcgctctttccagataagccaacaaattagcatgaacagactatcgaaatccgtcctgtatgtgttctgaaaacgccgtcttgtcgcgatccaccaatctgcaagcggcctgacatcttccgcagtgattgcaatgttaatgttgcaccaacgtctcagcttgcgccaaagccgccgtataatcacaggacacaagcaaatgatggcagtcttcgttctcgcgttggcatagggagcaaatggcgtcatgcggccagtttctcttcgccaggttgtccgccgtgagacagcggcccttcagtgcaatccacatgaagaagcgaacacgcgacgacaccctggagtgccacagcgtgtccccgtaggaacagtcctctgtcgctatgaaaaatagatcatacgccgaggccactgagaaattaccatcagcagtcaacttccatttgatcgtgtcagccatctgctgcagtgacacgtcgcgaacttcatcccaaagttggaagaattcacccagagcttcattggacagggcaccttgtaatcggcgaatccatctgttagcaatcagggcatcagctactgtcagcttggcacggctcacatgggaaaacaacaccggccacctccaggcgaagcaacctttccctgtccaattgtctgtccaaaactgtgtgtccaccccatcaccaatgatgtgctcagcgacggatcgaaagatctcttccacatcgcttccaggacggaaagctgctaaggtccagggtctatccttctgctccaaggatttcgcaagccatttcaaccggagagcttgaccgaacaaattaagatctttgacaccaagtccccctttctcgatgggtgatcaaacctttcgccacgagactaggcaatgcccgccgctgatctcttcctgtccttttccaaagaaacccgcggcacttccgctcgatgtccttaatcgcccatcgcggtagctgcaggactgtcatgtaatgcaccggcaacgccattaggaccgacttgatcaagcacagtcgcccatcaatagacagcattttcggcttccaaccggctaccttctttgccagcctatcaaggatcggctggatctcggccttcgtcggtttcctagtggagagagggagtccgagataagtgattgggaacttttccactcggcaggagagaatggattcaacttgcacatactgctgctcgtcacattggattggagtgattgcgcttttggagaaattggttttgagacctgtggcagccccgaacaactccaggatacccttgatgactcgagcttcttcagctgtagggcggaaaaacagaaccgcatcgtcggtataaactgaaattggtggcaaattctgtcgtacgttgaggggcgagagcagtcttgccatcctgcctgggaaactgattgattatttgtacatgcagatgcaagatgtacccggggatggctgaggaggtgaccaccacccagactgtcatcatgggtgttgcaccttccaaggggtatgtgcactaatcctttccttcttcatatcctgtacttgttgttcatgggcaaaatccatgtgttatattactgaatttgttgaatagtataaggagagggaaatattgtgattattgacaccgttgtattgagtctcagggatcactatatatagaagtacatggtgtagagataagaaagaattacggatatggaagaagtccacgtaaatcaatcttatcctactctaactaccatatatatactttaatagaacagaattgagtacctccatctttctagctaccaacctcttttgtcaattatcatatgtttcctgccttttttccccttctgaatcacagagaacaaaagtacaaaacattttgttgagaggctcactgccttccattttacgtgtacgtatgacaaaattgcagcgctagctacagccaatgaaaaacgactaaaaacttcatgcacgttatgacaaaaactctctcctttatctgaagaaaacgattatgccttttactctgaaaactgcgtagcaacaatccaagatcgtttcatgtttcgctgagttctactcccttcgtttctaaatgtttgacaccattaattttttaacacatgttagattatttgtcttatttaaaaaattttgtggaatatgtaaaactatatgaatacattaaagtatatttaataataaatcaaatgataggaaaataattaataatttcttaatttttttaataagacgaatggtcaaatatatttagaaaagttaacggcgtcaaatatttagaaacggagggagtaattaattactgatctatggttggttaattctctgatggatgcagtcatgccgaagggttggaggccggcgccgccgccggagcaggagcagagaacgggtgcaagtgcggcgacaactgcacctgcaacccctgcaactgcggcaagttgaagcaagcaacctcctgatcaggaaaccaaggagatggaaggacctagtactgctaatctagtagtatgatccagttacgagtgatgagttgttgtcactgtaactttgtgtttcctctgtgagtttgtgatctaagacctgagactgaagaaatgcatcctagttaataagtgctaagaataaagatgttttgagacatctatggcgtctgtacgatgatagtccttcctctccagtcttatggtgtgtacgtaattaagaatgcaatgctgtgtgtcatgtatgctttctatctagtgaaactgaactagtgagttggtatactaattttgcttttttgcttg

SEQ ID NO: 18939 - DNA, 2293 bp, Oryza sativa
  ref <308>: DATABASE ACCESSION NUMBER: AK069319
  ref <309>: DATABASE ENTRY DATE: 2001-12-06
gacgtgaagctcatctgcctcctcctccttgccggagctagcctcgccgcgtgcaccgccggcgacggcaacgacgacgaccaccagttcgtttactcaggcttcaccggcagcaacctcaccctcgacggagccgccgtgatcacgcgcaccggccttctcgagctcaccaatggcacgctccgccagaaagcccacgccatccatccggccccgttccgcctccgcggcggctcgtcgtcgtcgtcgacggcgacggcgacggcgacggcgacggcgacggcgacacggtccttctcggcgtccttcgtgttcgccatcctatgccccgacgccgacgcctgcggccacggcatcgtcttcttcgtcgcaccggccaaccacagcttctccggcgcgttccccagccagtacatcggcctcttcaacggcagcagcgacggcgacgccgggaaccacctcgtcggcgtcgagctcgacaccgaccagaacaacgagttccgtgatatcgacggcaaccacatcggcgtcgacatcaacagcctcacctccattaactcaaccagcgccggctactacgacgacaacgacggcggcaactccggcgaccatggcttccacaacctgacgctggcgagccacggcgaggccatgcaagtgtgggtcgattacaacggcacggccaagcagatcaccgtcgccatggctcccctcaagatggccaagccttccaagccattgttgtcttctacctacgacctctccacggtgttcgtcgccgacgagccctacatggtgggcttctcgtcggcgacgggttctttcaactccagacactacgttctcggttggagcttcgccatggatggacctgctccggccatcgacatcgacaagctgcccaagctgcctcgcttcgcccccaagcacaagcccaagatggtagagataattccgccattggcgacggctacattcatcgtcgcattgggaaccgtctctgttcttctgatacggagacggatgaggtacaccgagttgcgggaagattgggaggttgagtttggaccgcatcggttctcctacaaggacttgttccgcgccacggatggattcaagagcatgaatctggttggtgtcggaggatttgggagagtatacaagggagtgcttcaatcatctaaattggagattgctgtcaagagggtatcacatgattcgaagcaaggcatgaaagagttcattgcggaggttgttagcataggtcgactacagcatcgtaatcttgttcagttacttggttattgcaggcgaaaaggtgaacttcttttggtgtatgagtatatggcgaatggaagtcttgataaacacttgtacagtgaaggtgataagcgggttttagattgggatcaaagacttcaaatcatcaaaggaattgcatctggtttgctctaccttcacgaggagtgggagaaagtgatcgtccaccgggatattaaaacaagcaatgtcctcctcgacagcgagatgaatagtcgattaggtgactttggcttggcaaggctttatgaccgtggtgcagacccactgaccactcatgtggttggtaccataggatacctagcgccagaactaggccgtagcagcaaggccactcctttgactgatatatttgcttttggcatatttattctcgaggttacttgtgggcgaagaccaatcatgcaagttccagagggcgaacaacatgtgttggttgactgggtgctcgagcattggcacaaaggatcaataactgagatagtggatacaaagctccatggaaactataatgtagatgaggtatgtctagtactaaagcttggattattatgctcacatcctctctccaatgcaaggcccaatataaggcaagtgatgaagtacctaactggagacatggcaatgccagaactggtgccaacacaccacagctttcatacacttgcactgatgcagaaccaaggattcgactcatacgtcatgtcatacccttcatcaacggcaagcatgagcgccatgtccaacaacctttcagcacaaagatgaattacagtgttaacatattgtacttatgtaaattttgcatgcttagtcacttagatactcaagtgtggcctccattttcaactttactgttttatttttttaaaaaaaaataagttactgaaaaagagttatactgtttaatgaaattcaggccaaaaagtaccgagtgaaattactgaatttcaattattgcagtggataatgc

SEQ ID NO: 18940 - DNA, 2822 bp, Oryza sativa
  ref <308>: DATABASE ACCESSION NUMBER: AK069320
  ref <309>: DATABASE ENTRY DATE: 2001-12-06
gagtagcccacaggagaaggtgaagcactcgccgtctcgctcccatctcttcacttcgaaccgcacggcggcgctgcgccgccgctggagcaccgctactgcattgcatccggccgccggaatctcaccggcgactgcaggagacggccgtggcgcggccccagtccgtgccctctcccttcggtcgatggttggactggttgcattgtcactggacacggtcgccaccaaggacgagttcgtccgcctctgcgccaccggccgcctcagggacgcgctgcggcgacccttccgcggcgtgctctggtcggacgctgcccgcctcttctcccacctcttccgggcttgccgcgccctccggccactgcgccagctccacgccttcgccgccacgtccggcgccgccaccgaccgctttacggcgaaccacctcatgctggcgtatgctgacctgggcgacctcaccgccgcccgcgaactgttcgagagaattcccaggaggaacgtcatgtcctggaacattctgttcgggggttacatcaagaatggcgacctgggtggcgcgcggaagctgttcgatgaaatgcctgagaggaatgtggcgacttggaatgccatggtagctgggctcaccaacctaggatttgatgaggagagcttgggcttcttccttgatatgaggagggaggggatgcatcctgatgagtttggcctcgggagcgtgttccggtgctgtgccgggcttagagatgttgtgactgggcggcaggtccatgcgtatgtcgtgcggtctgggctggacagagacatgtgtgttgggagctcgttggctcacatgtacatgagatgtgggtgtcttcaagaaggtgaggctgtgctccgaatgctcccttcacttagcattgtatcatgcaataccataatcgctggaaggacacagaatggagactcagagggagcgctagagtatttctgcatgatgagaagtgtcggtgtggctgctgatgtggtcactttcgtaagtgctattagttcttgctcagatttggcagctcttgctcaagggcagcaaattcatgggcaggttatgaaagctggagttgacaaagttgtgccagtaatgacttgtcttgtgcatatgtattctcgttgcgggtgcttaggtgactcagagagagttttctttggttattgtggttcagataccttccttctcagtgcaatgatctcagcttatggattccacgggcatggacagaaagcaatcgagctgttcaaacagatgatgaatggaggggcagaacctagtgatgttactttcttggccttgctatatgcttgcagccatagtggtctgaaagaggagggcatggattgctttgagcttatgactaagacttatggaatgcaaccaagtgtgaaacactacacttgtgttgtggatcttcttgggcgatcaggttgtctggacgaagcagaggccctcatcttgtcaatgcctttaactcctgatggggtcatatggaagacattgttgtctgcttgtaagacccagaagaattttgacatggcagagcggatagcaaaacgtgtcattgagttggaccctcatgactctgcctcttatgttctgctatcaaatattcgagctaccagcaggagatggggagatgtcagtgaggtaagaaaagccatgagagataacaatgtgaggaaggagcctggtgtcagctgggtggagcttaagggtcacatacaccaattctgcactggagatgaatcgcatccaagacaaaaggagatcgatgaatgtttggaagagatgatggccaagattaggcagtgtgggtattcaccggacatgagcatggtgctccatgatatggaggatgaggagaaagaagttagtttgtctcaccacagtgagaagttggcaatagcgtttgcttttctgagcttacctgaaggagttcctatccgagtgatgaagaatctacgtgtatgtgatgactgccatctagctatcaagttaatgtcccaggtaactggtcgggagattgtggtcagagatgtaagccgctttcaccattttaaagatggcagatgctcttgtcgtgattattggtgattgggaacaaagcatggtaggaatttcttttgcatcttctgaggggaacaacatcaacataccttacctggttttttgaactatctgaagcaatcagctgcagttgatgcccagcagtcataactaaggctcaacgggtgccacactctttactgccagctggcggtggtacaactaacaactcagatcggctagtatgcacacttgaatgaaccctaagatgcgaatgctcaatggtgtttggtttgtacttgtctaatggcccatgtacatacatgatggcttggttcccatgtaatgcaatgctatgggagaattcatctgttttcaccagatatctgccttattaacttctagaccagcgatgggagattgggtcttcaccagagataccacaaactaatctggaaagagcgcaactcgagaatctttgaacacaaagattgcactgcagcgcaagtttacagagccattagagatgaagtgctgatttggagggaagctggagtgtttaagcatagagagtagtgtgtgggagttttctcctgggttccttgatccccaggagtttttttttcttttttggggggcttatgccctgcgacagtacaatgtcattctgtacctggctcatttttctctcttcttaatacaattaggttggtcgattttcggccgacccagcaaagatacc

SEQ ID NO: 18941 - DNA, 1544 bp, Oryza sativa
  ref <308>: DATABASE ACCESSION NUMBER: AK069321
  ref <309>: DATABASE ENTRY DATE: 2001-12-06
gaggttcccagccggcgttgctgctctccctctctgcaaggcagcgtgtggcagccggctggagagtagcagggctcgttggccggtgggagtagagtggctgctcttctctccctcccagatctccaccccctcggctccggctcactcgcctctggccgacgaggagggccacgggcggagcgaagcgaagcggcggacgggcgagcgaggcgggtgggcggggagcaaaccaacggcgacctctttccctcccgcatgcatcccgttgtctctccgctgccctcttgcgtggatctgccaccggcgcctggatcccatcctctccgccctcccctcgcgcggatccgccattggcgttgacgggaggggtggatccggtgacctcttctcctcccgcatggatcccgtcatctccccgctccctgctcgcgcggatccgccgctagcgacaacaggaggggcggacccagcagcctctcctacggtgactacaacgattggtggacgtgggctgacccagttcccggcatctgctgcggcggcgacagcgaagttgccgaggatggcatcacgtgcgacttcctgctcaagctgctccgggcggggagcatggtgggtgccgacgcggctctgctgcaggagctggaatccagggcggtgcatacctcgcctagtcagctctcgaggccgggctgcggccgactgacttcgaggagatctcgcccgcgccgtgcttgccaacgaccgacgtccttgactcgccgtcagttccagccataaccgcctagcatggaagcacaccagataagcacatggattttgttgggctactgtgttgtaacacaagtttgccaaacatttatgtggcatcaacatctatcttggaagttgaagctgtagataaacattatcaacaacaaaagcaggatgtatcttctcgaaaacaacggaaaaagatttggatacatattggtatgagcagacagacctcaatccctgcactgcacaactgcattgctcttcgcagaaaaaggaaataataagtgagtgttgctaaagtgcttcttgcatccaatgagaaatctactatagaagatggttaatgtggtacacccaatgagcattcttcctgagaaaacaatgcatttggcacatccggtgaactatgtgctgaggaagaagtatttgacacatctggtgagcaacattcagaacaaaaaaatgacacatttgatggatgacttctagggaaaacaaggtagttgacaaacttaatggtaaacttgttggacataaacatggaatatccaaaagactgaattgtgtttagggccacttttttaccaaagtttcacttcggaagtgcttccaatctacttacttatgattgttggtagttgtatttgttcatcgccattccgcattaatgtaaatattacaatgtaattgtgccaatacgagtattgttatgtattggttaatcttaccagccacctttatggtaaattaatcgagataatagaacttggtttcctcgtgtc

SEQ ID NO: 18942 - DNA, 1490 bp, Oryza sativa
  ref <308>: DATABASE ACCESSION NUMBER: AK069322
  ref <309>: DATABASE ENTRY DATE: 2001-12-06
ggttctcctccctccaatccgccatggcggcgcccaagccactgtccccgcgcctcgccgtcccgctcgccattgctctcctcctcgccctcggcctcgtcgccgacttcctctggtcatcatcttcctcctctggcacctccggccgcggccagctcgcctccgcttccaggacggcaacggcgaagaagagcggtagggcgcgcgggaagaagccggcggcggagggctacctcaatgcgacgtacgccgacataccggcgccgcggtgggactgggaggagatgccggcggcgcccgtgccccgcctcgacggctactccgtccagatcggcgacctgctctacgtcttcgcagggtacgagaacctcgaccatgtgcattctcatgttgatgtgtacaatttcacttccaacacatggacggggaggtttgatatgcccaaggagatggcaaattcacatctaggaatagcaacagatgggaggtacatttacgcgctgaccgggcaattcggtccccagtgccgatcacctataaaccgcaacttcgttgtagacacagtgacaaaagagtggcatgaactgccccctttgccagttcctaggtatgcacccgctactcaactttggcgtggacggctccatgtgatgggtggtggaaaagaagatcgccatgaacctggattagagcactggagcttagctgtcaaggatggcaaagcattggagaatgagtggcgaactgagatagccataccccgtggtggacctcatagggcatgcattgttgctaatgataaactctttgtcattggcggtcaagagggagacttcatggcaaaaccaggctcgccgatatttaaatgtgtacggaggcatgaggttgtgtacggtgatgtgtatatgctagatgatggaaataaatggaagcaactatctccactgccaaagccaaattcccacatagagtgtgcatgggttatagttaataactctgtaataattgttggtggaactacggaaaagcatcctattaccaaaaagatgattcttgtcggtgaagttttccggttcgatttggatacactgacatggtcagtcattggccgcatgcctttccgaatcaagacggccctagctggttactgggatggttggctctatttcacttctgggcagcgagatagggggcctgataatcctgctccaaagaaagttgttggttgcacgtggagaacaaaactacacctttgatgtggaaagttttagctgttgttactgtagattataggtcagtatctgtttcccttttctaactgctaggctctccagaagctatttttgtcctgtattttgtatgatagattgacttctgattcatagtgtccttgttgtctatattgttgtgcatccacatttcctagatgaatttcttgccatgttcttctaaatggccagaatataatatattaacacaatcattttgct

SEQ ID NO: 18943 - DNA, 2063 bp, Oryza sativa
  ref <308>: DATABASE ACCESSION NUMBER: AK069323
  ref <309>: DATABASE ENTRY DATE: 2001-12-06
gcatccaaacacccatccgccgccgctggctgaactcgcgggtgatctgatcggagccggaggaggaggaggaggatgttcgtggagggcttcagggtggagagcccgcgcgtgcggtacggcgacggggagatcgagtcggagtaccgatatgacacgacggaggtggtggcgccgccgtcgccggagaaggggtgggtcgtccgccccaagtccgtcacctaccacttcaagaccaccaccaccgtccccaagctcggggtgatgctggttggatggggaggcaacaacggcaccacgctcacggctggtgtcatcgccaacagagagggaatttcatgggcgaccaaggagaaggtgcacaaggccaactactttggttccctgacacaatcatccaccatcagggttgggagctacaacggggaggagatctatgcgccttttaggagccttgtacccatggtaaacccaaacgacatcgtgttcggtgggtgggacatcagcagcatgaacctggccgacgccatgaccagggctcgggtgctggacatcgacctgcagaagcagctccggcatcacatggagtccatggtgcccctccccggcgtctacaaccctgacttcatcgccgccaaccagggctcccgcgccaacaatgtcatcaagggcaccaagaaggagcaggtcgaacaggtcaagaaggacatcagggagttcaaggagaagagcaaggtggacaaggtggtggtgctgtggacggccaacacggagcggtacagcaacgtggtggccgggatgaacgacaccatggacaacctgctggcgtcgctggacaaggacgagccggagatgtcgccgtcgacgctctacgccatcgcctgcgtcatggagggcgtccccttcatcaacggcagcccccagaacaccttcgtgcccgggctgatcgagctcgccatcaagaagaactcggtgatcggcggcgacgacttcaagagtgggcagaccaagatgaagtccgtcctcgtcgacttcctcgtcggcgccggcatcaagccgacgtcgatcgcgagctacaaccacctaggcaacaacgacggcatgaacctgtcggcgccgcagacgttccggtccaaggagatctccaagagcggcgtcgtcgacgacatggtctccagcaacgccatcctctacgagcccggcgagcaccccgaccacgtcatcgtcatcaagtatattccatacgttggggacagcaagagggccatggacgagtacacctcggagatcttcatgggagggaagaacaccatcgtgctgcacaacacctgcgaggactcgctcctcgccgcgcccatcatcctcgacctcgtcctcctcgccgagctcagcaccaggatccagttcaaagctgaagaccaggataagtaccattctttccatccagtggctaccatcctgagctacctcagcaaggctcctcttgttcccccaggcacaccagtggtgaatgcactggccaagcagagggccatgctggagaacatcctgagggcctgtgttggactggcccctgagaacaacatgatgcttgagtacaagtgatataggccttgacaggtcctcttatcaggagggatgatgaacagcaagtggtggaggaaggtgacagttttcttcaacaagaaaaagaacaaaaaaagagagaaaatgaggaacacctgaaagaaataacaagaggccaagtggggaagcaaatgaaatgatcaagtgatattcattcagaaaatgggtgtcattcacttggatcctcttaattgggggcatctattgacagtttgacactctgctccatgattttttttttcattttttgtttttttaattgagatggagacttttttcagctctgctgctagtatgctgtgagctgcatgaacattggttaatattgtgtatgatgataggtgaagcaaggaactaatcgtcttctatgcttatggatctatagtacaagttgtcagtattactgttaagtcttatatctggaacacttttgaatc

SEQ ID NO: 18944 - DNA, 3316 bp, Oryza sativa
  ref <308>: DATABASE ACCESSION NUMBER: AK069324
  ref <309>: DATABASE ENTRY DATE: 2001-12-06
gctcctgtgtgctagcggaggcggagcactacacggttaattctgcggttgctgctgctacctgcgaccttctagcaggtacacagtgctaacaagtaacaacacaatgttgcctcagcaacttcagatatatttgtgcttcatccttctgtctctgaagttcggaatatctgcatctctacctcttgaaacagatgctctcttggacataaagagtcatctggaggatccacaaaattacctaggcaattgggatgagtctcattcaccatgccaattttatggcgttacatgtgaccaaacttctggtggtgtcattggaatatcactctctaacgcctcactatcaggaactatatcgtcgtcgttttctcttctttcccaactacgtacgctggagcttggtgcaaactccatctcaggcactattcctgctgcactagctaactgcacaaatctgcaggttcttaacctgtcaacaaacagtttgacagggcaattacctgatctttcaacatttatcaatctacaagttcttgacctgtcaacaaacaatttttctggaccattcccagcatgggttggcaaattatcaggcctaactgaactaggtctaggagagaacaacttcaatgaaggtgatgttcctgaaagtattggaaagctgaagaacctgacatggctattcttggggcaatgcaaccttagaggagaattaccagtttcaatatttgatctggtctcacttgggaccctagacttctcacgcaatcagattattggtgtgtttccaatagcaatatccaacctgcgtaacctatggaagatcgagctctatcaaaacaatctgactggtgaaattcctcctgaacttgcacatttgacattgttatctgaatttgatgtgtcccagaatcagctaagtggtattctgcccaaagagatagcaaacctgaagaagctgaagatctttcatatttaccgaaacaacttctctggtgtgcttcctgaaggattaggggacttggagtttcttgagtcattttcaacctatgaaaatcaattctcaggaaagttccctgcaaaccttggccgattctcaccactcaatgcaattgacatatctgagaattatttttctggtgaatttccaaggttcctgtgccaaaacaacaaattgcagttcttgttggctttggacaacaacttctcaggtgaattccccagctcctactcttcttgcaaaacacttcagaggtttagaataagtcaaaatcagttcactgggagaattcacagtggcatatggggattgcctaatgctgtgatcatcgatgttgccaacaataaatttgttggcggcatatcctctgatataggcatttcggcttctctgaaccaactgtatgttcataataacgtcttctctggtgaacttccaatggagttggggaagctttccctgcttcagaagcttgttgctttcaacaatagattctctggccaaatccctgcacagattggaagtttgaagcagctgtcattcctgcacctggaacaaaatgctctggaaggatcgataccacctgatattggtatgtgcaacagcctagttgatctgaaccttgcagacaattctttgactggcaccattccagacacactagcatctctattcactctgaattcactcaacctatctcacaacatgatctctggtgaaatccctgaaggattgcaatatctgaagcttagttatgttgatttctcccacaacaatttatctggaccagtccctccagctctcctgatgatagctggagatgatgcattctctgaaaacgacggcctttgtattgctggagtttcagaaggttggaggcaaaatgccaccaatttaagatactgcccgtggaacgacaaccatcagaacttctcgcagagaaggctatttgtcgtgctgataatagtgacatctctggtggttctcctatctgggttggcatgcctgagatatgaaaattacaagcttgagcagttccacagcaagggagacatcgagagcggcgacgacagtgactcaaagtgggttcttgagtccttccacccccctgagcttgatcctgaggagatttgcaacttggatgtggacaatctgattggctgtggaggcactggcaaagtttataggcttgaattgagcaaagggaggggtgttgtggccgtgaagcaactatggaagcgtgatgatgcaaaggtcatgagaactgagatcaacacacttgggaaaatacgccaccggaacatcctgaaactccatgcattcttgaccggtggggaatcaaactttctggtgtatgagtatgtggtaaatggcaatctctacgatgcaatccgccgtgagttcaaggctgggcagccggagctggactgggagaagcggtaccggattgcggttggaaccgcaaagggcatcatgtatcttcaccatgattgctccccggccataatccaccgtgacataaaatccaccaatatactgctggatgaggagtatgaagcgaagcttgcggatttcggcatcgccaaattggtggaaggttcaccactcagctgcttcgctggtacccatggctacatggctcctgagcttgcttattctctcaaggtgacagagaagagtgatgtttacagctttggcattgtgctgttagagctgcttactggacgcagcccttcagaccaacagtttgacggtgaactggacattgtctcctgggtttcatcccatttggccaaccagaatcctgcagctgttcttgatccaaaggttagcagccatgcatcagaggacatgacaaaggtcttgaacattgccatcctttgcactgttcaactgccttctgaacggccaaccatgagagaagtcgtgaaaatgctcatcgacatcgactctatctcagcaaacgggaaggcaaagaacaagaatgataagaagtaagaacagatgccccgtttctttgtaagaaactgctgccagaaagatcaaaaggcacccagtagcaacagtctgggtgctgccgtgctgccaattaggaccttaattagaatgcctgactagtgaatagtaactagtaggctggtaataaactgaggttttagcagcctctgaaaagcttgcacatatgtacaagctaccctgtacaaatttcagtcatgtactctgaagtttctgtaaaaatgatatgcgaagaattatgatgtaccagtaccacactgcaatgccagtagaatatgaccataccgttaaaaatgg

SEQ ID NO: 18945 - DNA, 1824 bp, Oryza sativa
  ref <308>: DATABASE ACCESSION NUMBER: AK069325
  ref <309>: DATABASE ENTRY DATE: 2001-12-06
gagtattaaacttgccgctttcatgcactgccagcactcctaatttcggatgcttgttgtccgtcacgattaattctgctatgcttctcgtccttcttccgtatccggtcggtctctctctgctcatgggagcacaacagcgaacggaaggccatggtgtctccggtcacctcgtaagtccctcgttgcgtcgcagactaatcagcgagaattatctcctaaaattccgccgagttgctggcttgttgctgccaggaaattctccaaatcactggacctgattagcgtaggagaaatcagcttgacgagctgtagtgcaccacatatgtacctgtagtgcactattgctgtactgacaaagagtaggcagaacaacagcgccagcacggcgaaggaatagaaggagaaggagaagaaggtgaacatgaccaagacaaaaaagaggcaaagtgcacctgaccgggagaaggaaattgtgataagagtctgacgaactgacgatgaatcaatccattctgaatgctgaaatctctcagtttttcttcttcttctcaaatttagagtatcctgaaccatgagccgaggaaggggaagagtgccacgagaaggcgcgtcagcagtggcgcctggttatacctcatgctgctgctgcttcttcctcgcgacatgccgccattgctgcgtcgtggacctctcctcgcccgcaatcccagtcccagatcggaggcggcagcagccgccgccgtgtcgggctccggtggcgtcctcttcttccctgagctctcctgctccttcttctcctcatcgtcgtagaggaggtcatcccatcctccaaaaccggagccggattcggtcgattgctggtggctcctgctccgccattgccatgccccggcatcatagtagtcgccgtcgtcgtcgtcttcctctcggcgttggaaggcgggatcgtcatcgtagtcgtatccgtacgactcctcctcctcctgctgccgacgactcctggtggtgaagaaggagacgacccaggagatggcggactgggcgagcggcagcgccatggccatgaggaaagctctgggccccgtggccaccagcatggacgccagcagcagcggcagcacgtagccgtacgcacggaagagcttggaaaaccatggctcgccgaacagctcctgcgctgacccgcctggcgcgccgccgtcgtcgtatccgtatccctcctcgtcgtcctcttcctccatgtcctcgtcggaccaccaccgcctcctcccgttcgccgccgccgtcgtcctccagggtccctccgagcgatggcagcggcagcgaggcagctgcagggggggcactgggcggttggattgggaggccgttgctggtgctggagctggtcctactccgacgagccgtccccgtccaagaggaggacgaggcggcggcggcggcggcagcggcatagccattgcctagcttacgacaaggcaaggcaagacggacaagggataacgatcgagtggctgtgtggactggagtggacaagacaagcaggaggttagtaaggtcttttcgctgctctaattcatcacaacgaaatatagcaaaccttgcatcagcttgacatttttcccttccaatagtttgaaccaagaatgcagcagctgtaacagggtctacaaacaaacacaactggtgtgtctagttcacgttaaaattgaaagtttgattgaaattggaacgatgtgacgaaaatgttagaagtttatgtatgtaggaaagttttgatgtgatggaaaagttggaagtttgaagaaaacattgagaact

SEQ ID NO: 18946 - DNA, 850 bp, Oryza sativa
  ref <308>: DATABASE ACCESSION NUMBER: AK069326
  ref <309>: DATABASE ENTRY DATE: 2001-12-06
ttggcgcaagggagaggagaggaaggaggaagaggtggtggtggaggagaagagccatcagcagcagcagcagcaaggggaggaggagctcgtcggcctctcgctcgccggcggcaggcccaaagtatttccaatgtcgagccctccacctaatccttcgcaacttacaattttctatggtggatcagtatgtgtttatgactcagtgccgccagagaaggctcaagcaatcatgcttattgccgcagcagctgctgcagcggcgtctgccaccaaaagcaatgctgccattgctgttaagccccctgtgatgcctgcagccaatgctacccaagcagcagtctctcctgtgctcacaagatcgctctcattgcagagcacttctgtagcaactggacaacctcaagttgccgctgaccctagctcaatttgcaagctccaggctgatctccccattgccaggaggcactcccttcagcgcttcctagagaaacgccgtgacaggttggtgagcaaagctccatatcccacaaaatcctccgagggcatggaagcatcagggatggaagtaactgctgagggcaaggcccagtaactgtcaacttcgaatggtggaggctgacgtttggagggggaaggaaggaaaggcgtcgcgttcattgtttagatggtgtcgcaccctagaaccttactaataatcgaacctatgcccttattatcgttgtactgttccttatgtgctagtctattctgtcatgaatttgtttactcgaacagcaaactgctatgatagtagtatatcattgtacatcatgcatatcattgcctgacaatgttatcgtgttcgtct

SEQ ID NO: 18947 - DNA, 1702 bp, Oryza sativa
  ref <308>: DATABASE ACCESSION NUMBER: AK069327
  ref <309>: DATABASE ENTRY DATE: 2001-12-06
ggactggtgagtactgatcgtagtccagccttgttctcctctctctctctctctcctcactcctcgcacacttcggaattcccatcatggccggcggcgccatgaccgacaccgatggcgctcacaagaactacccggggaagatgaccatcttcgtcttcctcgcctgcctcgtcgcctcctccggcggcctcatcttcggctacgacatcggcatctccggcggcgtgacgtcgatggactcgttcctgatcaagttcttcccgtcggtgtacgccaaggagaaggagatggtggagacgaaccagtactgcaagttcgacagcgagctgctcaccctcttcacctcgtcgctctacctcgccgcgctcatcgcctcgctcttcgcttccgtcatcacccgcaagttcggccgcaggatcaccatgctcggcggcggcgtcatcttcctcgtcggcgccatcctcaacggagccgccgccgacgtcgccatgctcatcatcggccgcatcctcctcggcatcggcgtcggcttcagcaaccaggctgtgccactgtacctgtcggagatggcgccggcgaggatgcggggcatgctgaacatcagcttccagctcatgatcaccgtcggcatcctcgccgccaacctcatcaactacttcaccgacaagatcgccggagggtgggggtggcgcgtcagcctcggcctcgccgccgtcccggccgtcatcatggccggcggctccctcttcctccccgacacccccaactcgctcctctcccgcggcaaggagaacgaggcgcgcgccatgctccgccgcatccgtggcaccgacgacgtcggcccggagtacgacgacctcgtcgccgccagcgaggcgtccaaggccatcgagaacccgtggcgcacgctcctcgagcgccggtacaggccgcagctggtgatgtcggtgctgatcccgacgctgcagcagctcaccggcatcaacgtcgtcatgttctacgcgccggtcctcttcaagaccatcggattcggcggcacggcctcgctcatgtccgccgtcatcaccggcctcgtcaacatgttcgccaccttcgtctccatcgccaccgtcgaccgcctcggccgccgcaagctcctccttcagggcggcgtccaaatgatctttgcgcagttcattcttgggacgctgatcgccgtcaagttcgggacggcgggcgtggcgaacatctcgcggggttacgccatcgtggtggtgctgtgcatctgcgtgttcgtgtcggcgttcgcgtggtcgtggggacccctcgggtggctggttcccagcgagatcttcccgctggagatcaggtcggcggcgcagagcgtggtggtggtgttcaacatggccttcaccttcatcatcgcgcagatcttcctgatgatgctgtgccacctcaagttcggcctcttctacttcttcggcgccatggagctcatcatgacggggttcgtcttcttcttcctgccggagacgaaggggattcccatcgaggagatggacaggatctggggtaagcactggtactggagacggttcgtcggcgctggggccggcggcaaggtcgagattacctccacagtatgacattcgtgccgtaaacgtttatctttcaatttgttttcggattacgtaattgaatctgctggctacatcgatcc

SEQ ID NO: 18948 - DNA, 1116 bp, Oryza sativa
  ref <308>: DATABASE ACCESSION NUMBER: AK069328
  ref <309>: DATABASE ENTRY DATE: 2001-12-06
cccccccaccggcgagatggcacgcggatccgccgccgcggcgatcgccggagttgtgtgggtgcttctcctcctcgtgggggtggcgtcgggggcgcgtcttccgggcgggagcgggggtaaccgggggcgggagccgcgcgggggagcggcggcggcggcggtggccacggagacggcggtgttcgcgctgggaagcttctggaggtcggaggccgcgttcgggtgcctccccggcgtgatccgcacctccgtcggctacgccggcgggtccaaggcccgccctgagtaccgcaacctcggcgaccacgccgagtgcgtcaaggttgaatatgatccccggttgattcagtacaagaaacttctagaggtcttctgggcaagtcatgatccacgagaggtctttgggcaaggaccagatgttggcaaccaatacagatccatcatcttcacaaatggatccgtggaagctagattggctggtcttagcaaagaaaaagaacaagctaaggatcgccgcagtgtcattaccacacagatccaaccaataggtgcattttatccggctgaaccggaacatcagaaatttgagctgaagcgcaagccgtttctcctgcaactgattgggaacctgcccgaggaggagctcctgacctcaacactagctgcaaagttgaatgcatacgctgctgagctctgctccccaaatacccagaacagaataaactccaagattgatgagattgctaagaaaggatggcccatcctaagagacatttagctcggtgttcctgggttttacatattaatatatcattatccaattgtgcatgattttgccgcaaatcttgtccagatgactggttgtggtcattccttggtcgcagcaatcactaattagcgttcatgtcctcctctgctcattttgagatctctctaatagaatctgcatgtatatccaaactttcgagttgtgtgatgtgacctgaaatcctgaatttatgattggttcttacagaacaggtgccgaaattgtatattgttactctggctcttttatgtgtaaaaatatatgatgtggattcattacattcttaatcaaaaacacttattccc

SEQ ID NO: 18949 - DNA, 778 bp, Oryza sativa
  ref <308>: DATABASE ACCESSION NUMBER: AK069329
  ref <309>: DATABASE ENTRY DATE: 2001-12-06
ggccatcgccattgcccaccacctcctcctccacgccgatccgtctctcctcgtcaccgccgtgcagagatcgaaacctatcaaccatggcgaactcagcgtcggggatggccgtgggcgacgagtgcaagctcaagttccaggagctcaagtcgaagaggagcttccgcttcatcacgttcaagatcgacgagcggacgcagcaggtggtcgtggacaggctgggccagccgggcgacacctacgacgacttcaccgcctccatgcccgccagcgagtgccgctacgccgtcttcgacttcgacttcgtcaccgacgagaactgccagaagagcaagatcttcttcatctcctggtcgccggacacgtcgaaggtgaggagcaagatgctgtacgcgagctccaaggaccggttcaagagggagctggacgggatccaggtggagctgcaggcgaccgatcccagcgagatgagcatggacatcgtcaaagcgagagccctctgaattaaccaagatgttcccaagcctcccttaatcaatcgttcgcgcgtgctagctgatcaagcgatcaggcatatatatatgcatgcatgctctcatgctccagcaggaacagaacaatgcttgtttttgcatcgggttcctgcatatatgcaggctttcagtgtttgatcctacctgtcgatcagagtactgtcaattcattaattagtactcctgtaaactagatgatcttttatcttctccgatctggcccattctagacccgttattcc

SEQ ID NO: 18950 - DNA, 1868 bp, Oryza sativa
  ref <308>: DATABASE ACCESSION NUMBER: AK069330
  ref <309>: DATABASE ENTRY DATE: 2001-12-06
ggccggccgtcgcgcatccgacggccactcaccatcggcgtcgggggaggcgaaaacagcggctgcaattccgcttccaggtggagggggaggaggcccggtttgtgtgccacgccgccccactccgtccgtggtttgctacccaagaagacaagaagaaggaagtggcgaaacctcaccctccatcctccatcctctcctttcttccttcgaggaggaggagctatatatagacggggatggttcatctagcctcctcaccagttttgatttgatctgtgtgatttgagtgagtgagtgagattctttggaggagggattttggtttggtttggtttggtggtttgtgcgggattttgtggggaggagagtaatggcgaccgcagggaaggtgatcaagtgcaaagcggcggtggcatgggaggccgcgaagccgctggtgatcgaggaggtggaggtggcgccgccgcaggccatggaggtgcgcgtcaagatcctcttcacctcgctctgccacaccgacgtctacttctgggaggccaagggacagactccagtgttccctcggatcttcggccatgaagctggaggtattgtggagagtgttggagagggtgtgactgatcttgcccctggtgaccatgttctccctgtgttcactggggagtgcaaggagtgtgcccactgcaagtcagcagagagcaacatgtgtgatctgctcaggatcaacactgacaggggtgtgatgattggtgatggcaaatcacgcttttccatcaacgggaagcccatttaccatttcgtcgggacttcgaccttcagcgagtacactgtcatgcatgttggttgcgttgcgaagatcaacccggcagctccacttgataaagtttgcgttcttagctgtggtatttctactggtcttggtgctacaatcaatgtggcaaagccaccaaagggttcgacggtggcgatatttggtctaggagctgtaggccttgctgccgcagaaggtgcaaggattgcaggagcgtcaaggatcattggcattgacctgaacgccaacagatttgaagaagctaggaaatttggttgcactgaatttgtgaacccaaaggaccatgacaagccagttcagcaggtacttgctgagatgaccaatggcggagttgaccgcagcgttgaatgcactggcaacatcaacgccatgatccaagcatttgaatgtgttcatgatggctggggtgttgctgttttggtcggcgtgccacacaaggacgccgagttcaagacccacccgatgaacttcctgaacgagaggactctcaagggaaccttcttcggcaactacaagccacgcaccgatctgcccaacgtcgtcgagctctacatgaagaaggagctggaggtggagaagttcatcacacacagcgtgccgttctcggagatcaacacggcgttcgacctgatgcacaagggcgagggcatccgctgcatcatccgcatggagaactgaggtttttcaggggattatggtgttgggtaataagattgggcagcttgagcagcctgccttgggtgaatgatgatatacggttcttctgtgtatcctgggcaaatttctggctttgtcaatcagtaatagtacggtatgaattccagtgtctgtagctgcaaagagtttgttaagaatcagtgatcttttggcgtaatattatcatatatttatacgagtttcagttcgtcaccctcttcacttttcagaacttttttaagtcttatgacttcagagccaccaaacgtgctgtttttgaattccatggtggcttgaatttggtacatgttcatgtaaatgtgggatatttgtcatc

SEQ ID NO: 18951 - DNA, 1284 bp, Oryza sativa
  ref <308>: DATABASE ACCESSION NUMBER: AK069331
  ref <309>: DATABASE ENTRY DATE: 2001-12-06
ggtcgtcgtcgtctcccccactcgatcgatccatccatcgatcgatcggtcccccccatcgcgcgcgacgcattccgccgccgtctcgccgtgtccacgtgatgggggccggggctaggggataggcggatagccagcagccaccaccaccagtagttgccgtgtggggataggtgtggctatagggctagtggtcgtcgctgatagcgaggtgggtagggttaattttggttggaggtagagagagagagagagggagggagggaggaggaggaggaggaggaggaggaggaagaacaggaggaagatggggcggggcaaggtgcagctgaagcggatcgagaacaagatcaaccggcaggtgaccttctccaagcgcaggtcggggctgctcaagaaggcgaatgagatctccgtgctctgcgacgccgaggtcgcgctcatcatcttctccaccaagggcaagctctacgagtacgccaccgactcatgtatggacaaaatccttgaacgttatgagcgctactcctatgcagaaaaggtccttatttcagctgaatctgacactcagggcaactggtgccacgaatataggaaactgaaggctaaggttgagacaatacagaaatgtcaaaagcacctcatgggagaggatcttgaatctttgaatctcaaagagctgcagcagctggagcagcagctggaaaattcgttgaaacatatcagatccagaaagagccaactaatgctcgagtccattaacgagcttcaacggaaggaaaagtcactgcaggaggagaataaggtccttggaacagatccgctccattactcctccccgccgtcgtcctctcctccggctactccccctcccgccgccggccgaatcacccaagatggattggcaggggcagaagctcgcggagatgctgatgcagctgctgctggtggcgtcggcggtggcggcgttcgtggtgggctacgccatggcggacttccagctcatgctgctcgtctacgccggcggggtcgtcctcaccgcgctcgtcaccgtcccgaactggcccttcttcaaccgccacccgctcaagtggctcgacgccgccgaggccgaccgccacccgcgcccgcaggtcagcgccaccccttccaccgtgggtaagaagaaggccggcaagaacaagtagtagccttcaggttcagggtagcagatgttcttgattgatcggttaatctgtggacacttgttcttatgatgatattataattgctcaacttttgatt

SEQ ID NO: 18952 - DNA, 1375 bp, Oryza sativa
  ref <308>: DATABASE ACCESSION NUMBER: AK069332
  ref <309>: DATABASE ENTRY DATE: 2001-12-06
ggcacggattagaggaagattagtagtattagtagtcgggattaggcagtaatggcggcgacgagcgccaggagcgtggcgtggcaatggttggccgtggcggcggcggtggcggcggcgtctctgatcggcggcacgccggcggaggcgaggggggagggaaggagtccatcggtttctacgagctgcgtcggggcgagttctccgtcgtcgtcaccaactggggcgccaccatcctcaccgtcaacctccccgacaagaacgggcacattgatgacgtcgttcttggctacaaagatattggatcttacgtgaatgacacgacctacttcggggcgctggtggggcgggtggcgaaccggatcgccggcgggaggttcacggtgaaggggcatgcgttccacacgtacaagaacgacggcaagaacacgctccacggcggccaccgcgggttcaaccaggtgttctggtcggtccgggagagggccaccggccacttcccctacatcaccttctactaccggagctacgacggcgagcagggcttcccgggcgccctcgacgtgctcgtcacctacaagatcgacggcgactactccttcagcgtcaccatgtacgcccgccccgtcgacgacggcaagcccacgccggtcaacctcgcccagcacacctactgggacctccgcggccacggcaacggcaccatcctcgaccactccgtccagatcttcgcgtcggcggtcacccccgtcggcgccggcctcatccccacgggagccgtctcgcccgtctccggcacgccgttcgacttccgcgcccccgcgccgcccggcgcgcgcatcgccgacgtccccggcggcgggtacgacatcaactacgtgctcgacggcgaggccgacgggcagggcgtgcgcaaggcggcggtggtgagcgagcccacctcggggcgcgtgctggagctgtggtccgaccagcccgggctgcagttctacacgggcaacttcctcaagggcgacgagggcaagggcggcgcgcgctacgtgaagcacggcggactctgcctcgagacgcaggactacccggacgccgtccacaacgccaagttccccaccgagatctaccgcaagggccaggagtacaagcactacatgctctacaagttctctctcgccaagaagtagattattaagacgttcgtcgtaatcaaatcaagaattcaagataattattagcctacatggtttttgtgagcgattatgtatcttagattatgctagtagtacacttaggtgatcggtatgaagcttacgtgattttagatgatgattaacgtgccaaataattcgcaaaagagagcagcacatgtgcactgtgt

SEQ ID NO: 18953 - DNA, 1691 bp, Oryza sativa
  ref <308>: DATABASE ACCESSION NUMBER: AK069333
  ref <309>: DATABASE ENTRY DATE: 2001-12-06
aaaaaaaactcttcttccccctcccgccccggccaggtgtttgacgaaatggcctcctccgccatggagctctccctcctcaacccggcggcaatgcgcggcctctccgccgccaagccccgcgtcgtgtcttccaggcgcatcgtgcggttccgcgtggcgtcgtcagccgcggcgccgcccgcggcgaagcccgggacgcccaagaagcgcgggaagacggagatccaggagacgctgctgacgccgcggttctacaccacggacttcgacgagatggagcggctgttcaacgccgagatcaacaagcagctcaaccaggaggagttcgacgcgctgctgcaggagttcaagacggactataaccagacccacttcgtccgcaacccggagttcaaggccgccgccgacaagatggaggggcctctcaggcagatcttcgtcgagttcctcgagcgctcctgcaccgcggagttctccgggttcctcctctacaaggagctcggccgcaggctcaagaaaacaaacccagtggtggctgagatcttctcgctcatgtccagggatgaggcccggcacgctgggttcttgaacaaggggctgtctgatttcaacttggcactggacctcgggttcttgaccaaggctaggaagtacaccttcttcaagcccaagttcatcttctacgcgacctacctgtcggagaagattgggtactggaggtacatcaccatcttcaggcacctcaaggcgaacccggagtaccaggtgtaccccatcttcaagtactttgagaactggtgccaggatgagaaccgtcacggtgatttcttctccgcgctgctcaaggcgcagccgcagttcctcaacgactggaaggccaagctctggtcacggttcttctgcctctcggtgtatgtgaccatgtacctaaatgattgccaacgtactacattctatgaagggattggtctggacaccaaagaattcgacatgcatgtgataattgagaccaaccgcacaacagcaaggattttccccgctgttcttgacgtcgagaaccctgaattcaagaggaagttagacaggatggtggagatcaacaaaaagatcattgccataggcgagtctgacgatatccccctggtgaagaacctgaagaggattcctcacgttgccgctctggtgtctgagatcattgctgcgtacctcatgcccccaatcgagtctggctctgttgatttcgctgaattcgagccccagcttgtctactgattctgtaggaagaccatctccagcttttttttccttcaaaaaggaatgctgatattttctgcctgaggggcttcgaacggtgagatgatgggtggttagcagaatctgcacctcgtgtgttcctttgtaaagtattgagacttcaacaatgtaccatttggcaaaggttttgttatgatctccatttaagtggcagtgaactgcatcacagtgggggttacagttttccaacagaagggtaattatatgatgttttggggttgttgatacttcatacttaagttccttagcatcctaagtatctcttagctgtgctctgcattatggcataatgtttggtcttggtgaaggtgaatagtgacgccaactactgaaaacctggacaatgcaagtgttggaagatgttgtaaatgtcg

SEQ ID NO: 18954 - DNA, 779 bp, Oryza sativa
  ref <308>: DATABASE ACCESSION NUMBER: AK069334
  ref <309>: DATABASE ENTRY DATE: 2001-12-06
gacgtcaccccctccttctccgcgtgcgcccatccatcccaactccccaaccaagcagcggcgagccagcgatggcgacacccactgcccaaaccgcggcgctcctcgccgccgccgccgcgctcttcctcctcgcgtcggcggccctcccggtcgtccgctccgacgccggcggcgacggcgacgtcaccgcgtacgacgagctccggcaccgcgggttcccgctgggcttgctgccggcgaacgtgcgcgggtacacgctggactccgggtcgggggacttcgccgtggacctcgcctccagctgccggatcgtgctccccgcggggagctacctcgcctccttcagcgaccgcctcacgggccggctcgacgaccgccgcatctccggcctcagcggcatccgcgtcagggccttcttccggtggtggtccatcaccgggatccgcgccgacggcgacgagctcgtcttcgaggtcggctccgtctccgccaagttccccgcccgccacttcaacgccagcctcgagtgccccgccaaagccgactcttagtacaaaggtcctggtgtctattccttgatatggcatcatgaagcggcttaggcttcaggctttcagtgttctctgtttcttcgcacctgtctgtaattattcgtgtataaggctgaaatgctgaattgttcagccagtcgccccacgcaaacaaagtggaacagaacaatgcgtactgtagctcttgtatctataccttctatatagttggtataattggtaccc

SEQ ID NO: 18955 - DNA, 1776 bp, Oryza sativa
  ref <308>: DATABASE ACCESSION NUMBER: AK069335
  ref <309>: DATABASE ENTRY DATE: 2001-12-06
ggcggtctagaaaaagccgccgcgatctccgaccgtgtcgtgcgctcctgtccccctcctctccgacgagccgcctcgcccatggcgtcgcctccgtccgctccctcctcctccgccgccgcggccgcgcgtgccgctccccatcgcccgcgcttgcggtcgcggcgatctctccggccgccgccgcagccgcagccgcgggtgcttccctcttccgtcgcctgccgatcctccgctctccgggacttccaattcagaaatatctccacgagacccacaagcaggcgcgatgtccttccagttgcctctgcatttgatgaggatctgggtgatttctcgctggtgcacgctgatggggatgaccctttagaggttgttgtatattcaagtgagagcgactggagcgatgaggaggtcgtgttaaatccaacgagtgatgttgagttacctctaaagagcaagagccgctttgagggtgtagagggtgcgatgacagttgctgcccataggtttgccacgattgagaaagggcatagggacagcagttgctgataacatgaagattcatcatttccggaggagagggaagcttatgtctccattctatagaaagccaacaccagcaatgggaggattgttctttgtacctattggcatttttgttgcaagaagacaggttggttcctcaactggagtgaatggagcagctattataaccctcatatttgcaatggttggatttcttgatgatatttcaaatcttgtcatggactgcaatcgtaaaataccgcattggatgagattatttgttcagattgttgctgggatttacttatctatctggttaagttctacaaatatttcaacaccatataacacgaaattccttgttcctcttcctcctcctcttggccttgcattcataggaaaaatctatctcgttttggctgcaatatgttctctttccatgggcactggagttacattggttgatcatcttgatggcttggctggtggcgtcgctgctttagcacttgctggattgtctgttgcttccctcccaatttgttcagaaatgagtgtttttggagcatcaatgtcaggcgcttgcactggctttcttttccataacagatatagggcctcaattgttatgggacgtgttggctcttttgcactgggaggagcaattgctacaattgcagcctgcagtggaatgttcattccgatgttcatcgcatgcagcatttttcttcttgagctgctcttggtaatatttcaggtcccttttcagatggctaagaagcacttccttgggacaaatagatatcccttgcgtattcttccctcgtattactttcttaagtcgtggggtatcaaggaaccttatattgtggctggcgcatacattatatcatgcctattgacggcatttgcaggatatcttggtcttgtttcagcgtaagtggaagcttaggttacttactattctttcattctttttctgtcgctcctaccttattcttttcagaaagtttgaacctatagcattcttttagaatggtagttaccaagtgtatgattcatacaacaaacatagaaaatgtagatattggacctagtaggattcctaacaattgtgggaattgggtattatagcatgatatcgtgagctacgttttctgccttgcataaagaattgtatccttttgtgacctaaattattgtagttacaaaagatattagactatcaaggaaaatagcttatgattctcg

SEQ ID NO: 18956 - DNA, 2712 bp, Oryza sativa
  misc_feature (1426)..(1426): "n"=any one base of a, t, c, or g
  ref <308>: DATABASE ACCESSION NUMBER: AK069336
  ref <309>: DATABASE ENTRY DATE: 2001-12-06
gagattatactacaaccctccaatctataaacacagaagttgaagagagagaaagaagcaatagaggagagagaagagaagaggtcaagaagagaagcaagaggagagaggagaatcgctgcctctgccactggaaagcagcagcagcaggggagaggcagcaggcagcagcagaggagaagcaagaagcaagaaagagagagaaagcgttgggacttttcattggatcctccgcttttgggaggagcagcaaaggtctcgtctttcctctcttcttctcttccttgttgccggcgaggaggaagaagaaagaggaggagatgttcccgcctgggctgatccaccaccggccggacggcggcgaggcggggcgtgcggcggggggagggcccagcctggtgctgaccgccgatcccaagccccgcctccggtggacggccgacctccacgagcgcttcgtcgacgccgtcgcccagctcggcggccccgagaaagcaacacctaaaactatcttgaggacaatgggtgtgaaggggctcactcttttccacttgaagagtcatcttcagaaatatagactggggaaacaatctggaaaagaggcatcggagcaatctaaagatggtaagttacacaaagcaatctactgacctcactgttaatttcgattaatattccaacttccaagtcttgctgcaacaattccaatttgttcacattgtggaagttcattctgaagtcatgcaactatcctaccattgatctgtggacatgttaaatacggctctgctcatgaactggtgtcttatgaagttggttgatcatcgattgcaatttgatcaatattgatgtattgcaaggaatcactatgtagctaacttcttgaaaagattggagattgcttgaagttatatgatttggagatggtagcttgggtttactggtgttaagtttggatgcatcttgggaggaatcaattggtagcaacttcttaaaagaccagggattgctggaaatcgtatggattggagatggcagctatgttaacagtgttatgaatttcctttaagcttaccataaatctctgttctggggcaccagtctgtagggacatgaaggaatagagtggacctgatgtgggaaataatgggaggattcgtagttgagtggtctgcaggcaaccaaggactgaatggtgagagggaatctgtatgtggaggagtattttacgtcagtggacaagcttttctttttcagggactagctatatttttgacttcacatttttcaccataaaatagtcaattgttttttacattgtaaattacatatatttacactgtattacacaaatttacactgtagtttcaaaacttacattgtaaattccaatatttacaccataatttttatataggatttaacnaaggggttggttagtagaagcaaaccagaaatcgactgataggtaaacacccatgtacctgcaaaactagcactaacaggtgcgctgtgtacaaataccaaagactccatgcataaaaaactgactgaaatctatcaatatttgtgtcgccacaaatatagcgattccatatgggtatatgcaaattcgtagtggcacacatgctgatccagaagctataggtcctgtccagtagggagaatttgtgggttgtacttttgccttgtgtagaaaaagttcagtcttgagttaaatttagccccagtaataattgcatattgctaagtaggagtactaacatgaataatcacatcaaggttcatcagtgggaaatggaagagaaattatacacaaaatgttggcaatattaagcgtagtgttggtacatgtatcgttgaattgcagtttattgtaattgtttcaaatggaaacgtttgtagattgaatttgctcatctagtcaaattctggactttgttatgcagatatgtctttttgacttgaaaaccacacttttaagagttcttttgaccttttactaacctctgacctctgctatggtttgcagcatcctatcttctagatgcccaaggtggaatgagtgtgtcgcatagagtttctactcaagatgttaaagaaaatcaagaggtcaaggaagcattgcgagctcagatggaaatgcaacgaagactgcatgaacaagtggaggtccagaagcatgtgcagatcagaatggaagcctaccagaagtacatcgacactttactagagaaggcatgcaagatcgtctccgagcagcttgcctcaagcggcttcagcatctcggacaatgatctcccggagctctctggtggtgtcatgtgcggctccgctgacacattgagctcctccatcttccaccagctctctgtcagcccaatcaacctgcatagtcctgagggcaagccgacgccctcgggcatcgaaggccaaatgatcctccagaagtcacctgagcttaagcgcaagtcttgctgagccgtgtcgttcgacgcaatctggatgtgcaaacaccagttttcttgtcatgggggtagtcatgtcgaatttcggaattcgaatttcggtaagaaggggggatgctctgccaatcttgtagaggccatcttgttctctggctaatgcatgccaacattgtcaagtagcaaggttttctctcttatgttatcaatccaatcagcatatcttatataaaatgcctaatgtgct

SEQ ID NO: 18957 - DNA, 1887 bp, Oryza sativa
  ref <308>: DATABASE ACCESSION NUMBER: AK069337
  ref <309>: DATABASE ENTRY DATE: 2001-12-06
atggggccaggggtgtcagcagcacggcggcggaggagcggagcaaggagggagggagccacctgatccacaggagcgccgcggccaagccgcccccgatgtgtggctctcccggcgcaccccgatttcctcgcccccacctcggtcctcgacgcgacaacgaccagtagcaccgccgcttctccgccgctcgctccgactccgagccttaaacccttctgccccccacttccgcgacctccggaactccaccagcagcagtcacgcacgtctctctctctcgccccgcgtcctccacatggcggcgtccaccacctgccctgctcgctccatggcgtccgtctcccgagccctccgcccgcggccgcacgccgctatcgcctccgccgccgtccgcacggctgctcgtctcgggggcggattggggatcgtttgttcgatgccaagctatggtaggaaggagaaggaagaatggggattgaccattgcgtccgcaccggcgaccactgctgctccggctctgagaagctgtcaactattgtgcaaggctgaagctaacatatccagtaatctgccagagagcattcctagtgaagcaaaccagtacgagaaaatagttgagctgcttaccactcttttccctgtctgggtcatattaggtaccattattggcatctacaagccatcgatggttacctggttggagactgatcttttcactgtgggcctaggattcctaatgctatcaatgggactaacattgaccttcgaagatttcaggagatgcatgaggaatccatggactgtgggtgtgggatttcttgcgcagtatttgatcaaacctatgctgggatttgctattgccatgaccttgaagttatctgctcctcttgcaactggtcttattttagtgtcatgttgccctggtggacaagcatcaaatgttgctacttatatatccaaaggaaatgtcgcactttcagttcttatgacaacttgttcgactattggtgctatagtgatgacaccactccttactaaactcctagctggtcaactggttcctgtcgatgctgcaggattggccatcagtacttttcaggttgttttactgccaactattgtcggagtcttggcgcatgagtattttcctaagtttactgagcgcattatatccataacaccattgattggggttctcctcaccactttgctttgtgctagtcctatcggacaagtctcagaggtattgaaagctcaaggtggtcaacttataattcccgttgctctgctgcatgttgctgcctttgcacttgggtattggttatcaaaagtttcctcttttggggaatcaacttctaggactatctctattgaatgcgggatgcagagttctgcacttggatttttacttgcccaaaagcacttcacgaatccactcgtagctgttccatctgctgtcagtgttgtatgcatggcgcttggagggagtgctcttgcagttttttggaggaacagagggcttccagcaaatgacaaagacgatttcaaggaatgaaacaccaacaccctccagtttctagtcattacctagtgttgttttttagttcagtggagttatcacagcatttttcttgttacccatattttagcaagttgattatcagtaggacttgcctacttggtaggtctgttgtattgcactcttatcttccaaataagctgcaggtgcttctctgcaaagcactcaatttatagtccgttgccaagtgaatgcattgtaatattatgcgcggtgagtaaatagatttccaagaattgctattccaatctattgaaaggtcaataagctttgtatgtattcttgctgaatgcagtttttccttt

SEQ ID NO: 18958 - DNA, 1687 bp, Oryza sativa
  ref <308>: DATABASE ACCESSION NUMBER: AK069338
  ref <309>: DATABASE ENTRY DATE: 2001-12-06
ggtcgccgcttcgggctttcgtctccaccgccttgatgccgccccgggagcaggagtagcggctcatcgccaactacccttctccgtcggagcgtgcgtcgtcgtcaccggcgatccccacccacctcctcactgcgccgcctcgccgtccgccccttctccaccttgccctcaacccgccacagatccctctccctcccttcctcgtccccggccttcctcgccgcaaacactgccccctcttctccgctttccttcctcctctccacctcagccgccggccacgatctcagccgtggtgagcctctttctgattcatctctctctctgtctctcccgtcggaactacttttgtctggatgttgcttgcgttcgttcgttcgttaaccctagcttctcttctagatctggaagaggctcttcttttaatttcagagccttaaccttaatacaagtaacagtttgggggttcaactgaacccccatgtcccaagttggatccgcccctgctcccatggtgacatcccatgaagatgctaagaaggcgtatgctgatttcgagaagaaggtcaagaggaccatctatattgatcatctttcccctcaagtcacgagctcagtacttaaagcagcccttgcccaatgtgcaaatgttgtcgatgtggagttcattgttaattacacaatcccgtatgacattccttctgctgcattggtggaattggatgacgaaatacaagctaaggctgcactagacttgatgaatgatttccctttcataattggcgggatgccaaggcctgtaagagctacatgtgcaaagcccgacatgtttcgggaacgccctccttgccctgacatcaagaaagagttccggtgggtaaaacaagaagatggaacagagtatgaaggaatgaagaaattgaggatcctagcaaaaaggcaagaagcagaaaatatggcactcataaagaatcaattggaagaggagaaggagctggcaaagcagcagcaggaattactcgatggaaattacaagaagtacgacatgctggagaatgtcgtacagaacggaaacatgaagagcctagctcagcattatggagtcagcctggccgatgagttttgacaattcaatccatgagctgctcgctcactaataagtccggtctagttcccggtgcagcaacatgcctaataacctttctctctctctctctctctctctctttctctctctctctaggcctttagggcagtgataaatcatgtcaatgtgtgagatgaaataataattgaatgactggtttgaggcacgcattaggcgtgatcaaaggcatatcctctgtgtaaagatagttgcctgcctgctataatttatctggaggggttattgacaacagcactggtttcttccttgtgattctctgacgtcctgcgagatggttaccataatttcagagactcgtggatgtactgataagttacttcgaggagaaggtatctgttgtaggcctgactgaagttagctgtagagtgtatggaactggaagtcttaaaattttgggcttgtttttcggtttctagtgctaaagatgatacttacaattatgggtcttgtattgatcagttgaaaactcaagattatacgtatcaataatcagttgaaaactcaagattgtactgc

SEQ ID NO: 18959 - DNA, 1083 bp, Oryza sativa
  ref <308>: DATABASE ACCESSION NUMBER: AK069339
  ref <309>: DATABASE ENTRY DATE: 2001-12-06
gtttgtctcctccgctccttgcctccttgcgccgccgccaagacgagtcgcggctgaacaggggagggccgggcggcgatctccatcgcagcggaggggaggggatcctggagtgaaataaaaggatgaggctggttggattgactggtgggattgcgtctggaaagagcaccatctccaacctgttcaaggctagcggcattcctgttgttgatgccgacattgttgctcggaatgtggtacagaaaggcactggaggttggaagaagattgtagaagcttttggaaatgatgttctgttagaaaatggagaaattgaccgagctcgcttaggacagattgtcttttctgacccggaaaaacgccaagttctaaaccgtctcctggctccacatatttcatctgggatattttgggagatactaaaactgtggataaaaggatgcaaggttatcgtcctcgacattcctctgttgtttgagacaaagatggaccaatggacgcaccctgttattgttgtgtgggtgaatgaagcaacccagattgagaggctaatgtcaagagatgggtgctctgaagaacaagctcggaataggatcaatgcgcagcttgcgttggactggaagaagtcacaagcagacattgtgatcgacaattctggcacgctggatgaaaccaaagaaaagtttcaggaagtgttgaggaacgtctctgaacccctgacatggaaggagcggttgaggtctcgggatggtcttttctccgttgtggtatgtacagcagtgggggttctgcttgcccagaagaatctgctatgatctttatctttatgtgcttaggtcagggaggattgaaatgtcaatccaaccttgctaggtatagtcaagattacagtccttcatatgttttgttttttctgttagttaaagatctgcactggtgtcttgcaacagttgatgaaacttggaatgtacactgcataattgaggttacattctaatcctttctgtcgctagggatttcttgaggagtggatggatatagttgtgggctgtgactcttggatgcaggcctcacttgagc

SEQ ID NO: 18960 - DNA, 1219 bp, Oryza sativa
  ref <308>: DATABASE ACCESSION NUMBER: AK069340
  ref <309>: DATABASE ENTRY DATE: 2001-12-06
gccgggagaaggagaagggagatgatgagcttgcagattccggcgagatccggagggctccgccgcctcctcctcctcggaggggcggatgggatcaggaggccctactccacgggcgaccgccggcgccgggtgatccgcgaggcgcggcaggaggaggaggacgaggccttcctccgcaccctcaacttcagcgccgacccggagaacaaccccccgccaccgccgccgccgccgcctcgacgacccggaggtgcccccgacgactcctccccacacgccgcgttccccaccgacatcctccgacgcgccgccgggaaacagccgttgccgccgccgcagcaacccatcggggaatcgctgatggagaagcttaagctgggcgacgcagccgccacctccgccgcgggaaacagcggcgagcggccgcagcctgagcgcgagccgacgaagccgccgccgcctgagcacgaggcggcgcagccggaggacgtggacgagatcttcaggaagatgaaggagactgggctgattccgaacgccgtcgccatgctcgacggcctgtgcaagagcgggctggtgcaggaggccatgaagctgttcggtcttatgcgagagaagggttccatccctgaggttgtcgtctacaccgcggttgtcgaggctttctgcaaggcacgcaagcttgacgatgctgtgaggattttcaagaagatgcaggggaatggggttattccgaacgccttcagctactggttgctaatacaggggctgtgcaagggtgggaggctggatgatgcagttgccttctgcgtggagatgtttgaggctgggcattcgccgaatgccatgacctttgtgggcttggttgatgaggtatgcaaggctaagggggtagaggaggctgagaagctcgtgaggagtttccaggacaggaactttgccattgatgagaagtccatcagggagcacttggacaagaaaggtccattctcgccggtcatttgggaggtgatctttggaaagaagaaatcaggccgaccattttgagctttgccaaaagtagtatgtgcacattctcaccattttgtgtagctatcgccagtgatgcttttttgagagttagtgtgcttctctggttacattaaaatgtttagcatgatgttctatgtaacaatcactactatgcaatccccaagtctgtcatcttttttacacc

SEQ ID NO: 18961 - DNA, 2313 bp, Oryza sativa
  ref <308>: DATABASE ACCESSION NUMBER: AK069341
  ref <309>: DATABASE ENTRY DATE: 2001-12-06
gacgagcagagcaggaagcaacttgaaactgcaagctttcctcttctttcttctttctcaacaaacccaaacccagttgcagctggcaggcagctgcgctcttctttttctcctcattgttttcctcgcgtggtctcccgattcgtgcgccgtgtgcatcgccattagtagtcgctgtcacgatcgaggatcaccacctctctccagctccaaatccacctccccccccccccccaccaccaccaccaccaccacgcggtcgccgcgccgagctgtcctcccccacgccgagatttgattcttccttcttcttgttcttgcgccaccgcggattcttgtaccagctgacactaccggggcggtggctgtgctccttggattgttggattggttggtttgggaaagggttgatctcgtttgcggagtaacaaatttgcaagcctacaactgctagggagaatttgactaaaaatggggtcgtgttgcagcagagctacgtctccagattctggtcgaggaggagcaaacggttatggctattctcaccagacaaaacctgctcagacaactcctagctataaccatcctcagccgccgccgccagctgaggtgaggtacacaccatcagcaatgaaccctccggtagtcccacctgtggttgccccaccgaagcccaccccagacacaattcttggaaagccgtatgacgatgtgcgctcggtttactaccttggaaaggaactcggaaggggacagtttggggtgacatacctgtgcacggagatcgctagtggtaagcagtatgcttgcaaatccatctctaagcgcaagcttgtgagcaaggccgacaaggaggacattcgccgggagattcagatcatgcagcacctatctggacaacaaaacattgtcgagttccggggagcatatgaggacaagagcaatgtccatgttgtcatggagctctgcgctggtggggagctgtttgatcggatcattgccaaggggcactactcagagcgtgcggctgctaccatctgcagggcagtggtgaatgttgtcaacatttgccattttatgggagtgatgcatcgtgatttaaaaccggagaacttcttacttgcaaccaaagaagagaatgcaatgctcaaagccactgattttggtctctcagttttcattgaagaaggaaaaatgtatagagacattgttggaagtgcttattatgttgctcctgaagtccttcggcggaattatggtaaagagattgatgtatggagtgcaggcgttattttgtacattcttctcagtggtgttcctccattttgggctgaaactgaaaagggaatatttgatgctattcttcaaggggagattgactttgagagtcaaccatggccatcaatatccgagagtgctaaagaccttgttagaaagatgttgacacaagatccaaagaaaagaattacttcggcccaagttctccaacatccctggctcagagatggagaagcatctgacaaacctattgacagcgctgttctttctaggatgaagcaattcagagcaatgaacaagctgaaaaagatggctctgaaggttattgcttcaaaccttaatgaggaggagatcaagggcctgaagcaaatgttcacaaacatggacacagacaacagcgggaccatcacatatgaagaactcaaagcaggattagccaaacttggatcaaagctttcagaagctgaagtaaagcagttgatggaagctgctgatgtagacggcaatggatccatcgactatgttgaatttatcactgccacaatgcatagacacaagctcgaaagagatgagcatttgtttaaggcattccagtattttgacaaagacaacagtggcttcatcacaagagatgaactggaatccgctttaatcgagcatgaaatgggcgatacaagtaccataaaggatattatatcagaagtcgacacggataatgatgggaggattaactacgaggaattttgcgctatgatgagaggaggggggatgcagcagcctatgaggctcaaatagtctgtttccttgtagaaaatgatgtacaattacattagtaaactgttttcgccttcttttttttgttccatggatggtagtcgacggataaaaggtttaccctggacgcagcttttgcattgttgagatgattgtgtatattttcttgccttgcccgtgtatggtgtagtgatttgaatgtcctcccttttgtaagttgtttctgcaagtacacacaataaaagagcatttttgcacctc

SEQ ID NO: 18962 - DNA, 2543 bp, Oryza sativa
  ref <308>: DATABASE ACCESSION NUMBER: AK069342
  ref <309>: DATABASE ENTRY DATE: 2001-12-06
ggaagtctgacctgacctccgcagcgcggaacacaaaagcaccaccaccaccaccctctccctgcacgtcacgaagcccgaggcgaaccaaagcccctcctcctcctcctcctcctctctgtaaccccaccaagaaagcgaagcggagcccggagagtggggagagtgtgtgcgtgtgtgtgtgtgattctccaatgccgcagggcggcgcggcggcggcgtgagaagctgaggcgggtgtgagccgcgcgcgcgcgttgttggctctcggctctgcaagaagggtcaggagggttgggaggggacgcattgcaatggcggagtcggcggcggcggcggcgggggacgggaaggtggagaaggcggcgaacggcggcgtgaacgggtgcgatgcggcgggggaggggaagaagagggcggaccaggcggtggcgttccacgagctgttcacgttcgccgacaagtgggacctggtgctcatggcggcggggagccttggcgcgctcgcccacggcgccgccatgccgctcttcttcctcctgttcggtgacctcatcaacggcttcggcaagaaccagaccgacctccgcaccatgaccgacgaggtctccaagtatgccctctacttcgtctacctcggactggtggtgtgcgcctcctcatacgcagagatcgcgtgctggatgtacaccggggagcggcaggtgatcgcgctgaggaaggcgtacctggacgccgtgctgcgccaggacgtggggttcttcgacacggacgcgcgcacgggggacatcgtgttcggggtctccaccgacacgctgctcgtgcaggacgccatcggcgagaaggtcggcaacttcatccactacatcgccaccttcctcgccgggctggtggtcgggttcgtcgcggcgtggcggctcgcgctgctcagcgtggccgtcatcccggccatcgccttcgccggcggcctgtacgcctacacgctcaccgggctcacctccaagagccgggagtcctatgccaatgccggcgtcgtggcagagcaggcaattgctcaagttagaacagtttactcatttgctggagagagcaaagcactcaattcctactctgaagcaattcagaataccctgaagcttgggtacaaagctgggatggcaaaaggtttgggtattgggtgtacatatggtatagcatgcatgtcatgggcattggtattctggtacgctggtgtcttcatcaggaatgggcagactgacggtggcaaagcctttacagctatcttctctgctattgttggtggcatgagtcttggccaggcattctcaaatcttggagccttcagcaaagggaagattgctggttacaaactgttggaggtcattcgccagaaaccctctatagttcatgatcataaggatgggaagttgctggcagaggtccatggaaacatagaattcaaagatgttacttttagttatccgtcaaggcctgatgtcatgatctttcgggatttctcccttttcttccctgctgcgaaaactgttgcggttgttggaggaagtgggtcgggcaagagtactgttgtggctttgatagaaaggttttatgatcctaatgaaggccaggttttgcttgacaatgttgatattaagacacttcagttgaggtggctgagagatcagattggtcttgtaaaccaagaacctgctctttttgcaacaactatacatgagaacatattgtatggaaagcctgatgctacaatggctgaagtcgaggctgcagcaactgcatccaatgctcatagttttatatctactcttccgaatggctacaacacgatggtaggggaacgaggaatacagctgtctggtggtcagaaacagcgtattgcaatagctcgtgctatgctgaagaaccctaagatactgctccttgatgaagctacaagtgctctagatgcaggctcagaaaacattgtccaagaagctctagaccggctgatgactggaagaacaacggtagttgttgcccaccgtctctccactataagaaatgttaacatgatcgcagtcatccagcagggccaagttgttgagactggcacacatgatgaacttctagcaaaagggagcgctggagcggctgatgaaggggcggaccaccgtgctggtggcgcaccgcctgtcgacgatccgaggcgtggaccgcatcgccgtcgtgcaggatggccggatcgtcgagcacggcagccactctgatctcgtgtccaggccggagggggcgtactcgcggttgctgcagctgcaacaccacgcctgacgatgattagtatgacataagtcttttgctcttgtgattggaatggttacttgtttcacttcttcttcttcttcttcttcttcttgtggcttggtggttaagttgatgtagataactagggcaaacttctatggtcgttgtgctatctacctaagtttaaactggaacggtgtaagatgtgtcttcctcctgaaacgtatgatgcaaaattgagatgc

SEQ ID NO: 18963 - DNA, 3634 bp, Oryza sativa
  ref <308>: DATABASE ACCESSION NUMBER: AK069343
  ref <309>: DATABASE ENTRY DATE: 2001-12-06
ggcaagcctcactctcctcctccccgcttcggattccaccgtcgcggagctcggcgcgggcggagatggagggcgacgccgccggagccggtggcggcgaccggtcgagcatcgtgatcggcctcatcgagaaccgagccaaggaggttggtgttgctgcttttgatttgagatcagcctcactgcatctttctcagtatattgagaccagttgctcatatcacaatacgaagacacttctgcatttctatgatcctatggttgcaatagtgcccccaaacaaaacagcagcagacggtatggttggagtttcagagctggttggtaaacatttgccaacaaataaaaagataacaatggcacgtggctgctttgatgacacaaagggtgctgttatggtaaaaaatctttcagctagagacccatctgcactcggtttagatacttattgcaagcaatactatctttgtcttgctgctgcctctgcaacaattaagtggattgaatcagaaagaggtgtaattatcactaatcactcattatcagttacattcaatgggtcatttgaccacatgaacattgactcaactagtgtacaaacattggaaattattgacccttttcatactgaactgtggggaactagcaacaaaaagaaaagtctctttcagatgttgaagactacaaagactacaggagggactagactactgagagccaacttgttgcaaccgttaaaagacattcaaacaatcaatactcgtctggattgcttggtaaggagattaatcttttttgttattctcaattcttaaattggaatgtctgtttgatcaaattggtcatacggtaatcctgacatttgaaacttccaaagttgcacatattaagttctggatcttctagtaggctaggttctggatcttctgtgggaatgaactaacttcatggagtatgaaccctgctttatgcatgtggaaatcttagtgcatatagtcttaaatcgttactcgaagggtttaccacaatcatgtttgtaccatttattgttcatttcctgttggagcactttgcaatataatggagaattttactgcaaccatgattgtacaccacaggccatatgtgaaagtatttccatgagaaggggaagcaatagttcttgtaatattgatatgcaacgctcctttgcaagaatgaaagtcaactggaatctgggatataacaagtattcagttactaatattatcatcgaaaatgatcagtaatatatccaataaatgcatgtttattaattttatatcttaaattttaggatgagctaatgagtaatgaggaattattctttggcttgacacaaggtcttcgtaagtttccaaaagaatcagataaagttctttgccacttctgcttcaaacccaaaaaggatactgatgaagtgctaaagcctgccaatggtagaaagagccaagggctgatttctgacattattgttctaaaaacagctctggatgccataccattcctctccaaggtagtgttatagatgtgtttgtcctagtattcaatttagcaatttattcattctgatttttcattttgttttgtttttgaagatgcatgttattttgttcatttaagggtaaatgtcctttattctagaaacatacccatctaccttttcacgcatgtgatgtgtagctcatcacaggttctaaggggtgcaaaaagtttccttcttcgcaacatttatcagactatatgtgaaaacccaaagtatgcaagcatgagaaagaggtactgttttctgacctttttcctcccatttcaaaggagaagttgaatgaagactgaaaacagcatgctaacttcaggcttagtcttcccatcctgcttttgtttgtacatttgtttttagtttttagtaatattgcgagtatattagcattatgtgactgtaaatatgttcgtccacatttattaaataacaagtatatccatctacattctaaaagtaaccattcacctttgatttggttgcatgttttcttttatgatcctagaattggggatgtcattgatgaagatgttgttcattcaagggctccttttgtaacctgcactcaacaatgttttgctattaaggctggaattgatggactgcttgatgttgctcgtagatctttctgtgataccagcgaagccatacataaccttgccaacaagtacagggaggattttaagcttccaaatttgaagataccatataacaacagactaggattttattttattgtaccccagaaggacattactgaaaggctccctaataaatttatccaggtagttagacatgggaagaatgtccactgctcaagcttggagcttgcttcgctaaatgccaggaataagtctgctgctgctgagtgcttcttgcgcacggaactttgtttggaagggcttattaatgagatcagagaagacattggtatattaacgttgcttgccgaagtattatgcctgttggacatgcttgtaaattcttttgcgtttacaatatctactaagcccgttgatcgttacacgagacctgaattcactgatgatggtccgatggcaattaatgctggaaggcatcctattcttgagagcttgcataatgattttgttcctaacaatctctttctgtctgaagcatctaatatggttcttgtcatggggccaaacatgagtgggaagagcacatatcttcaacagatttgtctaatagtcattcttgcacaaattggctgttatgttccagctcaatttgcatcactaagagtggttgatcgcgtattcacacggattggcactggggacaatgttgaaaataactcaagcacattcatgacagaaatgaaagagacagctttcattatgcagaatgtttcttcgaagtactatgggtctaccatgctgcaatagattggattgctgtttctcttgtttccttgtaatgaccatgtgcacatttgcacacattacaggagcctgattgttgtggatgagcttggaagagctacgtcttcctctgatgggttggcaattgcatggagctgctgtgaatatctattatctaccaaagcctacacggtgtttgccacgcacatggagagcttgtcagaacttgcaaccatctatccaaacgtgaagatcctccattttgaagtcgacctgagaaacgaccgcctcgatttcaagttccggttgaaggatggtgtccggaaagtaccacactatggtcttttgctggcaaaggtggctggtctcccttcttcagtgatcgacactgcagcaagcatcacttcacggatcacagaacaggaaatggtgaggaaggacgacaactgcgagcagtaccggtcgctccagatggcgtaccaggtcacgcaacggctcatctgcttgaagcaatccaaccaaggcgatgactacatccgggaagcgttgcagaatctcaaggacggctatgctgcaggccgcttgacatgagaagaaaaatatatgtaaaaaggagtttttgtttctctctcctacagctggcagcatgtatggattatggtcgtatggatgtagccatgtagggcacccc

SEQ ID NO: 18964 - DNA, 2254 bp, Oryza sativa
  ref <308>: DATABASE ACCESSION NUMBER: AK069344
  ref <309>: DATABASE ENTRY DATE: 2001-12-06
ggtcgcagaggaggagagagagagaaggagatcaagaagcacggcaatggcgaggaggctcgccgccgcgctgtgtctcgcggtggccgcggtgagcgtggccgtggcgacggcgaggttcgtggtggagaagaacagcgtgaaggtgctgtcgccgcggtcgctgcgggggcggcacgaggcggcgatcgccaactacggcgtgccggactacggcggcacgctcaccggcgtggtggtgtacccggcggacgcgaggctggccgacgggtgcaggccgttcggcgaggcggcggcgaaggcgctcaggtcgcggtcgcgccgccccgtcgtgctcctcgtcgaccgcggcggctgctacttcgcgctcaagacgtggcacgcgcagctcgccggcgcggcggccgtgctggtggcggacggcgtcgacgagccgctgctcacgatggacagccccgaggaggagacccccgacatggcgttcctcgccaacatcaccgtcccgtcggcgctcgtcaccaagcagttcggcgacgccctccgcgccgccgcctccgccgccgacgacgaggtggtggtgcggctggactggcgcgagtcgatgccgcaccccgacgagcgcgtcgagtacgagctctggacgaacagcaacgacgagtgcgggccgcggtgcgacgagcaggcggcgttcgtcggcgcgttccgcggccacgcgcagctgctggagaagcgcggctacgcgctgttcacgccgcactacatcacctggttctgccccgacgcgttcctggagacgacgcagtgcaaggcgcagtgcgtcaaccgcggccgctactgcgcccccgaccccgacggcgacctcgccgccggctactccggccgcgacgtcgtgctcgagaacctcaggcagctctgcgtccaccgcgtcgccaacgcgcgcaacgcctcctggctctggtgggactacgtcgccgactaccacctccgctgctccatgaagggcgaccactacacccgccgctgcgccgacgacgtcgccaagtcgctcggtttgccgatggatttgatcgacgagtgcatgggggatcccgacgccgacgtcgagaacgacgtgctcaagacggagcagattgttcaggttggacttggcaccagaggggatgtgacgatcttgccgacgctggtgatcaacaatgtgcagtaccggggcaaattggagagcacttcggttctcaaggcgatttgtgctggattcaaggagtccactgagcctgatgtctgcctgacaccagaaatggagactgacgagtgcctgaacaacaatggcggctgctggcgagacgagaagaccaacatcactgcctgcaaggacactttcaggggaagaatttgccagtgccctgtagttgatggtgttcagtaccaaggagacggctacacccactgcaaagcggtcggaccagggcggtgcgcgatgaacaacggtggctgctggaaggggacgagagacggcaagacgttctctgcttgctcggattcagacttgagtgggtgcaagtgcccacctgggttcaagggcgacgggctccattgcgaagacgtcgacgagtgcagcgagaagctggcgtgctcctgccctcactgctcctgcaagaacacatggggttcgttcgactgcagctgccatggcaacaacctgatgtacatcaaagctgaagatacctgcattgcgaagaacatgtcggcgtttgggtggctggtgacgacgctggtgctgtcctgcctcgccggcgccggcgtcgccggatacgtgttctacaagtacaggctcaggaggtacatggattcagaggtgatggcgatcatgtcgcagtacatgcctctcgagggccagaacggcgagaggctgccgctgagagaggaggcccaggttgagcatgcttagctaggcagttgcagaggttgaacattttggcaatgtccattcgttttgagacgccaagacacatgacagcgacgaatgccgcgatgtacatggcgaagttcagacatcatacttgatgacaggggttcttgcagtttctgcttggtgcttttgtagagaactgaaccagataggttcagagtttctggtagaagaacgggataagtctatgtcaagccggtgcaccgcaaagtgcagactagacaagtatagctgctgtaatgcagatttgttagaatatattgtgaataatagatcaacaatcttcct

SEQ ID NO: 18965 - DNA, 1248 bp, Oryza sativa
  ref <308>: DATABASE ACCESSION NUMBER: AK069345
  ref <309>: DATABASE ENTRY DATE: 2001-12-06
gactctctaggcaggcaacggcagcacaggcacagcagcagcgtggtggtgagagtgagaagcatgtgacccctcttaaaaacacttcgccgagaagtcacgcaccaaacaccaccaagaacgaacaactcttctccccctctccccctccttccttgctcctcctcccatcttgtctcctccctctctctcgcaaagtcgcaacgcgctcctcctcggtgaaacgggagtgaggtgcgtgcggccatggcgtccagcgcctcccggttcatcaagtgcgtcacggtgggcgacggcgccgtggcaagacctgcatgctcatctgctacaccagcaacaagttccccactgactacataccaacggtgttcgacaatttcagcgcaaacgttgttgtggacagcaccacggtgaatctgggcctctgggatactgctgggcaagaggattacaaccggctcaggcctctgagctatcgtggtgctgatgttttcgtgcttgccttctctcttgtgagccgagctagctatgaaaatattatgaagaagtggataccggagctacagcattatgcacccggcgtgcccattgtgttggttggcacaaaattggatctccgtgaagacaagcactacttgttggaccatcctggcatgatacctgttaccacagcacagggtgaagaacttcgaaaacaaataggtgctgcttattacattgagtgcagctcaaagacacaacagaatgtcaaaggtgtgtttgatgctgctatcaaggtagtaatccagcctccaactaagcagagggaaaagaagaaaaagaaatcacgacaaggatgctctatgatgaacatgttccgtggaaggaaaatgtcatgcttcaaatcctgattgatcgagatgtcccttacatgatgcaatgttctgggtgcaacctcaagctggcaacctttggagtctgaatgtgctggtagagttagatgcaaagttcttgtgtatatttgcatcttttggtaattaattactagagttagatggttaaactagtctgcttatgtaccgcacaatgctcttattattagctcttgttggtctagaaagtctgatagatgccaaaggaacaaggagacaccgttctgtcaggacaaaatcacagattttgtaatcgatctgaagtctcagtatcgtcattagaacattttatgattcgatggtagaactgaaagcagcaactacaaagctcgccgcc

SEQ ID NO: 18966 - DNA, 2214 bp, Oryza sativa
  ref <308>: DATABASE ACCESSION NUMBER: AK069346
  ref <309>: DATABASE ENTRY DATE: 2001-12-06
ggtcggccccaagagacgaggaacgagtctttcttcttccccggcaccgtcgcggcagtccgttgctgccgctggccgccgctgtgcgcgtgtcctcaaggctgccgcttccgatcttggagaagcatgggcgggcgacctcatctcggttttggagaagccggcgtcatcaggagtagtacagcactcggaaacctctccgtgtctctgagaattacaaccaagatgaagacgggcccccatggggatgctggtttcggagaaggtgtggtaggcgcaagcgcaagcacccgcgaaatcgaagacggggctccatggggatgctgggtctggcgaggatcatgtcgatgaaacgccggcggcggcggcggcggcgaatccaggccggatgtgttgcatcagataattgctctcctgccaatgcaagatgctgcacgtgctgcctgtgcctcacgagaacttttacagtcctggagacattatcctgagctcaaattcagtgccaaaacactagccatggatggacaacacaattgtatacaaggtcaaatggattcatatatcaagaggattgatattgctctgcaaaactgcactggtggttgggtgaagaggtttaggtttgaactacaattttttcatgagttgtctgcccatcatatcaaccattggcttgatgcagctatccctgggatcgaggagctcaccctagagctgccccgggatgataaaatgaaatataaattcccatgtaaactcttgtttgaaaagggatgctcaattcagtctctgtgtctctattcctgcgcttttcaccctgatcaaggagcttgttccttcagaaacttgaagagagtgtactttagcttggtgcatatcaccacagaagaactatggatctttctttataattctcttagtctagagcatctggaacttgggttttgccataagatagcttgccttaaaataccttgcacactgcagctgcttaatttcttgcgggtcagacgatgcaacatgctgcagataatagtgagtgatgctcctaatctctccacctttcactatgaagggcccctaatacagttgtcacttggagattcactgcaactgaagcatgtaaacatatcaatctacccttggtttaatttgtttgaatatgctcgcaagcagcttccaacagttgccccgaacgttgaaactctgttcctgatgtctgcgaatgaggctggtattttctatccactcatatttcagccgcatggaagattcctgcacctcaagtatctggagcttgtgattgttggaccaaggaattatggctttggctatcagtacacttatctggttactttcctcaaagcttctcctgtgttggaaacttttatcttgcacgtatgacattttatctctcaaagcaaaattttgtcctctttcatccttcagctgtttcccttgtcattttatcattaagaatgaatgatatcttttttcctttcatttttactgtgcaggtggagtctgctaaagagccctatccattggttattaatcctaaatacctaaaaaatcatttgctaccggaacattgccaccagagcatcaagcatgtgacagtaaccggtttttgccacacgcaggaactagtggagctgatattttatatccttgagaacgcaacttcgcttcagtgccttacactggacaaccgaattcgtggttttgagaaggacttggtggcatgcatcacacaagacgctggaacctgtgattatcaagagtggtggaaaaattttggtgctaaagagataattctacatttttttaggagagaatcttatccaaagtcatactgggatgcttactgttcttatgttgctatcagaaagtatatcattggaagggttccctcatccgtggaactgaagatataccagttgtgcctcctgatgaaattatatcccgtctttcaaaggtagaaagtgagctgctgaaaagtccttagcaaataatagtaatgacaaaggatatgatatcttttctgaaaagtttgcaaccttcaatcatgcatggtagatgttaaatgaacagaccctatttgtaataatattgttcataagttatgtcaaaataactttcagatactctgttgtatgcaatctgcaaatcatcagtcaatggcatggccataggtcgacttccagttacctg

SEQ ID NO: 18967 - DNA, 839 bp, Oryza sativa
  ref <308>: DATABASE ACCESSION NUMBER: AK069347
  ref <309>: DATABASE ENTRY DATE: 2001-12-06
gcggaatcgatctcttgtgtttgttgatcgatcgaggtcgaggatgccgaagaacaaggggaagggagggaagaaccggaagcgggggaagaacgaggcggacgacgagaagcgggagctggtgttcaaggaggacgggcaggagtacgcgcaggtggcgcggatgctgggcaacgggcggtgcgaggcgcagtgcatcgacgggacgaagcggctgtgccacatccgcgggaagatgcacaagaaggtgtggatcgcggcgggggacatcgtcctcgtcggcctccgcgactaccaggacgacaaggccgacgtcatcctcaagtacatgaacgacgaggcccgcctcctcaaggcctacggcgagatccccgaccacgtccgcctcaacgagggcgtcgtcgacgaggacgacgccgccgcccacgacgactacatccagttcgaggacgaggacatcgacaagatctgatctcatctacccactgctgctgctgcttcatcagtccaatggtacaaagaaacaatccaagaattgcttcttgttacttgctactattgtgatgtgtggtgtgatattataatcacggtggtgtgatgtgtgaggtcgtctgcctgagagagacctgtatatatggaagagattcggggggcaattattctgcccaataatcaaatattgaatcgaattgctcgctttacgcgatggggttcatctagttttgttctactctggttcatgtctgatcagtctctgttgttacacagttttcattacttagggctgtagcctgtatgcactggaactaatatattaacagtatttagtattctgaccg

SEQ ID NO: 18968 - DNA, 1253 bp, Oryza sativa
  ref <308>: DATABASE ACCESSION NUMBER: AK069348
  ref <309>: DATABASE ENTRY DATE: 2001-12-06
gagagagagaaggagaggggctttgcacttgcagaggagagaagcaaggtgagaagtgaggaggcaagggaggaggtttgccggagaggggacatgctccctcctcatctcacagaaaatggcacagtaatgattcagtttggtcataaaatgcctgactacgagtcatcagctacccaatcaactagtggatctcctcgtgaagtgtctggaatgagcgaaggaagcctcaatgagcagaatgatcaatctggtttggactagacacaccatatgcattttttgtatcagtaaataatattgcaatacagcacctccagggtaaaaggaatattgatggatgcaaagtttgtttgcatctacactactgaagttatgtgacatttcttttcttcttgtactaatgctaggtaatcttgatggttacacgaagagtgatgaaggtaagatgatgtcagctttatctctgggcaaatcagaaactgtgtatgcacattcggaacctgaccgtagccaaccctttggcatatcatatccatatgctgattcgttctatggtggtgctgtagcgacttatggcacacatgctattatgcatccccagattgtgggcgtgatgtcatcctcccgagtcccgctaccaatagaaccagccaccgaagagcctatttatgtaaatgcaaagcaataccatgcgattctccgaaggagacagctccgtgcaaagttagaggctgaaaacaagctggtgaaaaaccgcaagccgtacctccatgaatcccggcatcaacacgcgatgaagagagctcggggaacaggggggagattcctcaacacaaagcagcagcctgaagcttcagatggtggcaccccaaggctcgtctctgcaaacggcgttgtgttctcaaagcacgagcacagcttgtcgtccagtgatctccatcatcgtcgtgcgaaagagggcgcttgagatcctcgccgtttctgtcatggcaaatcatccttggcttatgtgtggtgcccagcaaaaaaaaatctgactgaacctgtgtgtaaactgatgggtatgggtgggttttgtgcaactgtaactagggtgcttgacatctgtgtctgttgttcctctgcctccttagtttggagacggtgcagctgcagctggtaccagtaatctgatcatgctagacttgtgacaaggacaaaactagcaccccgttatgtttcctggcttctgaatttggtggtcattcagc

SEQ ID NO: 18969 - DNA, 809 bp, Oryza sativa
  ref <308>: DATABASE ACCESSION NUMBER: AK069349
  ref <309>: DATABASE ENTRY DATE: 2001-12-06
ttgtgccaacctgttgcctctttgcagaaccagaagttccttcctttggtctagctagcaagagatcttacttgtgagaggaagaacaagaggaggagaggtagtatagccttggccttctttcttcagatgaattcagaagtaggaattcttggttgagattatactgcccatgccagtgagctgacaagagagaacaaaaatggagaaagaacacatcaagatggccatcctgaagcaggaacagacattcagacaacaggtcaatgagctgcatcgtgtgtaccgggttcagaagcaactgatgatagagatgcagagcatctcaacccaggctcaagcaaaagcagacaaccgaaccataccaagattggagatggaccatcaacaatggtacagaaactcgggggagaagaaggcccccgaattcgttgaagatttcgaccttgaactcacactggcaactggggctggtaggaagcaggagaagccatccaactcggactccggagcaacagtgtcatcgtcgacttctgctgaatcagagtcggagcagcggttccctgagtccaatgtagccctaaggtttcagaatgagagcaagaggcatgatgatcagctcatgcaatctccttggctctatcaatgtttaagtctgaagatggcatgatgacttagctatgatgggtggctttatgagtgttcaaaaactcaaaaatctcagataaaaaaaaaaggcttcttttatgtatatgtatatgacactaattcagagtaactggaaggctcaaaagagtgagaaaatgcac

SEQ ID NO: 18970 - DNA, 1407 bp, Oryza sativa
  ref <308>: DATABASE ACCESSION NUMBER: AK069350
  ref <309>: DATABASE ENTRY DATE: 2001-12-06
ggttggcgttgactagtcttctttagttttccaccggacaggagtaattggcaagaagaaacaaaagggaaaaaaagtggcggaaaattcatttttgggaggggaaatggccaccgcagaggcgaagcgccggcgccaccactcaccgccggcctccatcgccgccggcggcgattcctccacccctacctcggcggcgcccgccgactcgtcgtccccgtcgctggatctcatccccgacatagcccgccgcctgacgtccctggaggatttcttctccctgcgcgcctcctgccgcgcctaccgcgcgctcctcccggcgtcgcgccgcctcctcgcctcgcagtccccgctcctcctcgtctccctctacccctccttcgccgaggcgctcttccacccgcgcctccgccgcctccaccgcttccgcctcccatgggggcaccacctgcccccctcgcgctacaccctcctctacgcccacggcttcctcgtcacctccaccaccgccgccaacaactacccgccaaggctcctcctcctccgcctcttcaccggcgagcagctccgcctccccagggtcttcgcgcccttctcccgcgtcatcctcaccgcggacctcctcgtcgtcatcttcttgcccggccgggccaccgtccagcactgccgccccggggacgcgctctggcgcgttgcctccgcccctgcaccccatgtgttcgacgatttgatctctgtcaatggcaccctctacgcgctggttggcctccgtcttgccacgctccagctgtcggagagttcgctggagctgtcatttctgggaggagagcatgatgacgcgaacaggccggagggggatcggttcatgctcggggagtgtggaggcgaggtgttgctcatcagcgtggagcatgaggagagggttgtgtaccgcgtgttccgttgggcatctgagaaaaggaagtgggagatgatcaccaacttgggcgggcggtcgctgtttcttggcttggatggattcgcagcttgcgttgatcaagatcatccaggggttcgaggggattgcttatatgcagctgggcgacgcttgggtgagtggcatgagtattccttggctgatggaacctgtgatgtctgcaatgctgactatccaggcgcgccacccctgaacaacagttcactgatcagaccatcagtttggatctttcccagcttgtgttgatgcaagcctgagtagggttcatcctagatcaatgttgaagccctattgctcagttgctcacatgagagaaaagaatggtaatgcttgatcactagcttgcttactaggtcatttatgtaaacaatatattcatacggcgatcagtacttgcatcttattcgaccagtcaattgttgttttggtcg

SEQ ID NO: 18971 - DNA, 4239 bp, Oryza sativa
  ref <308>: DATABASE ACCESSION NUMBER: AK069351
  ref <309>: DATABASE ENTRY DATE: 2001-12-06
ggtttcccgaagttttccctaaccctagccgcctccccacgctcgtcttctctctccgtcgccggcagtcgctccagccgccgtttgccgtcgccctcctacgccgccacctccctcggctccgcaaggtcgagctctaccccgtccactggtttccctctgccaaatcccgccggaagccgctgtcaccgtgaaggccgagttcgccacccctgtttgatctccggccgagcctcctcgctgttgcggtcgtcacccgttcaccccgaggccgtcgtcggcatcgcagcaccaagccttagcccgtccacccctccgttgccgccgctcatcgccggaaagccgtcgccatcgtcaacccaaggtcgccgtccttcggagctcgtcgccggccatctccctcgccgtctgtcgtcgcgtaagtggtggtaagggtcgccttgatatcctctctctctcccggtgccctccgtttgcatcattgtaccgtggttcgctggtaaccgccgttcttgtgctcgccggcgtcgatctggcgtggtagccatgtcatcgctgacatcagcgctatcttggccatcaaaatcaatataaatcctgttatcccttttcaatagcatattagttttttttactatatgtcgtctactaaattcattccaataatttccggaggatgttttagtcttttatctcagatataaattatttgtaaattgtttaattaatttggaatagtcttttctttaataggctttaattggaattaatcttgtaaaattcataactaatccatatgaaatcggaatgaggtcgttcaagtctctaaattcatctaaaatcatgatctacatgtttgtttactttttatgtactgtttatttggtttttattaatctttttctttgttttgcgtgttagcttgtcgtttccgttgttgcgaaggttcatgagtgcgtcggaagtgttcaagaagactaattgaagaccgattattgcaaggcaagtcacacagatcctaaacaaccctttgagcattctgaacccgtttaaagctaatgttttatctcaatttatgcattattttagaatagcatcgggtggtgagcctttcccaattaattaatggccgaagatgactttattttcctatgggttataatttgattagctagaaccttatatattggtttggttcagctaaatgctatatatatataattgcttagccatgcttagaaacattaactcattaatgggatgaatcatattacattatttcttatggttatatttaatggtagctcacgatggtcaatcgtgctatgataattaattaataactaaaacctgattaatggtgggttgtgagcatatggttttgaaggtcgtggtcatgacaattaaggatcggttcacaagctactgttgtgagacattaaccgtgccaaccacaagccagcgtgggcaatggctttaccttttgtatagcatggttcattacggggcaccagactgagaagcggcgagaagtccgtgggggtcgctggggagtccatgcctctgttttttttttttgagggggtgattatgatccaggaatggtgcactatggtgagttgtgttgtgcgaggggtactgtcacagttcctttccgagataccgtggtggtattgaggcgcatggtaacatgtcgtggagctgtgtcttgtgggtacagtggtacacctctggccagagtaaaactattcgaatagccgtgcccgcggttatgggcgggttaagcagtctttttcgtgattagtctcatacctctcacaataattattaatgctataattggtaataatttgtttacctcctggtttggagttagatctgtgcagccgggtttggttgttcagaatggttgggcctgagcagcatgggtgtgctgttcagtgttgattaaaattgatgattactctactgttttactattcttaaatatttgctaaatgctgcttttgcaaatgagcctatattatgccatcctttggtatccttgtgcatttgcatatttgttgtgtggcttgttgagtatgtcatatgctcaccttgcaataatcaatcaacctcagttgaagaaaaaggatccagaaggagaagacatttggcttataccccagttgagctgcctgtgggagtggagctgaagccatcgctagactgttattccgctgttgtttttcttttggtttgtaagtatgtaacgttattattatgatagatttgtatattaaattatcagtttgtgtacctcggctgattcctggacgaggaatctatgcacaaattagttcggaaattactagtgaatttctgagcgtgacaaaagacaagtgtgggggtgatcttgcacatcaacgctataaccaaagcaagatcaccctagaagtgatgagccatgacaaaccacacaaggggaattgatgtagtcaaacccaatgaggggtcagttgaacctccagttcggctgaaccacctctatcgtgaatcgtcctctgttttatacagagcgcaggtttgcacaatttttcctttggaaatccattctatcttgagtttaatttgattatcaattctaaaatatcgaagataattaaactcaagctagagatggtacaattagagttgatggtctccctgaaaataacatgcatgcctattattctttgctcattacttgttgcttgtggtgacatatccaatagggaccccatgttatctaggtaattaatgaatgaaatatagtctgatgatagaaatcctgctcttcatgtggcacacttgggaattttataaaaagaaaaaaaaacatataatgatgctaaactcctcattgatatttttattcccactagagccataggttgatcattcatgattagcttgctacatacgctgcttgtcattacattgagcgttgtcaagttttgtgaccctagtgaaatgcttttcatactttcatggtcaagatcacatacactccaaatacacccaccaatgcttgacttctacactggaagttagcattgctcatttgtcattcatttcatccatagtccacaaaataaatactccatgtcatttatgcatcttcctccaaagttctttcaaaaagagagatagagagagaggcatggctatgaaaaagaaagaaaaaaatgctcatacaagtatggagcatgatgatgaaaaaaaaaagaaagaaagaaaagaaaaaaaagagatagccatgcattctcccaaatttcaaaagagaataaatggaggaggaggtatacaaaaaggagttatttttattttcctttttccactcacaaatttaccacacacatatacatgcacattcttgactagaaagtatgactagtatttccatggatcctttatttgactttgcaatatatgtgatgcaagtaatgctcttctcttttccatactctgagctccacataagccttattagatggtaggaaaagaaaaggcacaatcatatgcctttgtggggaatcatacaccttgagtgatcaagagaataaattgaggagcaaaccgaagttataattttgtgttacttgagaaaaaaccccaagttgttcttcatgaaaagttagggtgacttaagtcaagattgttccatttctcaattgttcaagattgcatagtagacactacaaagatcctcaagtacaggtatgactttgaataatttgtttgcatgattgttagtaaggaagtcataactctattgtagagtccatagccttcactctagacgagcaaaggttaagtgtgggggtgttgttgacggtccttaaatcataatatctaaccgtcaatacctacatataatgaaataaaacatggtatccaacttagtggtaggtattattactaatcatttccactagtgttggtgaaatatgtgtatgcaggtaatttgaggagaaaacacatccgtcatatgacaaaatgcacctccgcgcattcaggacgcgtttacacggattagaggcccaataagtcaataaaaaccatttagaattaggccaaaacatagtccaggttgttggaggcccaataagcaaccccctggccgaaggaggggccgggaggagagtttttgggttcccctcactctctaccttattctaatgtacaaaagatacaatagagcctcttgtaattcagctc

SEQ ID NO: 18972 - DNA, 3604 bp, Oryza sativa
  ref <308>: DATABASE ACCESSION NUMBER: AK069352
  ref <309>: DATABASE ENTRY DATE: 2001-12-06
gatttccaatttctcggcaaaagacgcagtccatggccaacgcccacgcgagcaccagggctcccgcgccgccgcctcatccaccgatgcttcttcggccgccgccgcagcccagggcggcgccgttgcgcccccgccgcctccctcgtccgccgataggcgcaccccgcagcccggagacggaggccgcaccgacggatcgagctccgccgctgcggcggccgatcggaagggaaagaagccgatgtcggcgtctgatgatcggaaacaggcgcgaaggaaggagaagaggaaatctggttacccgaaagagaagttgctcgagagtagcatgcgttcgtatcaaggccccgccaaggaggaggtaaggagaagttttacttttcattcttgactggcctggggctgagcgttcttgtgccatcttccgtgttgggatctttggacttggatcctgtagttcgtgtgaaatcttgggattatcttgcatcgatgcataggcgcaatcttgttgcttaggcacggttcttgtgtcagtttgtatgttggaatggtggagctaggagcttggcattcttgatttctatttaaccatggttgattttactgtgcttcagcgaagaaatcttggatggaattttatggtatcctagaacagagttgaaatcaactaggccttatgacagataaaaaaaaaaaaaaccaggcacatgttagggtgccaattcagctttctgtatgtatagcgagtaaactggttctttcttgatatcttcttatggcacttggataaaagaacggcctcctttcctgtcgaaattgttgagacttagttgctcctgcttgcgttaatggatttgctttttaatgcgatgcatttttatcgcactgtaacaatgggtgtgtgtgtgtgtgtaacaatgtggtgttagtaggtgatgtcatgcctgccgtgatattttggtaagaaatcctcaagccaaatttatgagctttcattgtcattgaatggttcatccatatgtgcatttgggaattgggattgcatcactaggatcgtttttctaaattattgaccccttacttggaaaatcacttggcacactctactgttcggtctaaaatattcaacatttggttggttactagccaaaattggcttgatagctcgacgcataattggcaagagtagacaaactgcagacaccagttttgtgattttgctaatcagttcttaaaaatcttcattcatcccctatttctttgtttcctactgtgaaatgtttgatattgatattacttccctgtaattgggtttaagtctggtaatatgtacggattgtaacttgtattgttgtggaatagcctttggataaaaaaggaaggtggacgtggtgacacgctatccaattgaaattccacaaaaagaatatactcacaattgtcacttcacgaggatcaccagatttgactccttttaacctttgataatgttgaaaatgggcatataaattatgactaatgtgatatcatagtaagaaatcctaaagccagacgtatgagatttctgtgttatcagacagtgttataaggaaaattttgtcggtatgtgtatttgggattttgcatcactggacatgatttctctaaatcataggcttccaaactcaccctagtgttcggtctaaaatattcaggcttctgctgggttgctgcctagaattgtatcagaagacccatagttcaattagtaaagagttgacaaattgtcaaagcaccagttctgctagcctgttatttaaccttgtttttagaataccatgtatccctattcaaccttgtttcctcgtctgaaatttttagcccttatattaattctctgcgttgccctcttgtaaatagcattcagacagagaaggagaacaaccgaactctcccagtcaaaattccagatctagcatgtcaaaatcttttcctcaggtgtttcacaagaaacttcctatgggagacgccgtgtattattatttcaaggacatctatgatgctcttcggatagcacaagttggtgtacgtttgatatttcttgatcatgattattcagaatttaggccggttgttccagatgaggagtgcttctataggagtttcatattttcctatctggagcaagttgttgataggatagacacactttgggaagaccgccttcttgctgctcttagagaattggatagacgagctgaacgttttcagcgggcctctgaattttcccggagacgagatgcacaccgttgttacacaatagtggcatgacatcgcagtgttaattctaacaaatttgtgtagttaattacctgattgaacaaatattcaaccttgcaaaaaaattttgcagttgcacagtactagtaaagaatacaatggagacaaacaaagttatatgtgtcttacgttgatgactgaaatgctgtacacatgctccttcatggtgtggccatctgatcctaagtcttccttcttactactatctcatcaaatattatttcgaatgattatcttcatacttgtactttaactatggaagcttctcaggcgagttatgctagtcatgtttgttcatatccaattattgatgatcagcattctgtaagcgccattgtaagatgctggtaactctttggttgatagatgccagctgtatgcaatgatttattgtatcattgattcttgcaggtatttgtgaagctgattgcgaaaataaagggatggaagcgcatgcgggattacccaccgtcaagagtcagctacagcagcgtggaatttctcctcgagttcttcagcagttatgattcaacgaatgacatttttgctttcctcagattagtagcagctacctggatttgcacgcacaaagggagatatggacagcatgtaagagaaggtcaaagtccggaagattggtgctcgatgctggttattcctccccatgcgccggaagaccggatcataccaatagccttagcggaagcactacaatgatggaactagtctagatacgcactacaatgttgcccgtggcacaccccgagtgagcttgctgctcatagagtctagatatggcatcatctacgcactccctcctagtgctgctactcctactagccgtccaaatcagccaaggcctgatcctgtggcgagaccgggattctggtggttcgattgctgcattgttgttcccaaggagagcctcttgcaaggcagcacggcctagccggtcaccagctacagagcaggccaagcaaatcctgcactgactcttcgagagttcaaggcaaggggcagtcttcaactgatgaagctctagttagcacctgggttgatgatgaatgtatacaggccatcataatctgttgtcctgtgaggagtaggaacgtaaacattgatcattcctgaatttgtgctcttaagtaactcgatcgatctttgacatggctttgttgccccccacaggattttgatgtgtagataaatgtgatcagatgaatccaaggtattgcggttttcgtttctggtcgatttccatgtgtggagttgatttctgtgc

SEQ ID NO: 18973 - DNA, 1024 bp, Oryza sativa
  ref <308>: DATABASE ACCESSION NUMBER: AK069353
  ref <309>: DATABASE ENTRY DATE: 2001-12-06
gagccatttcgatcgatcaaggagagcaaagaggggatgtcggtgatcaaggattgtggggggcacaaggggtgcgagtgcgagaaggagaaggtgcaccggcggctgtgctgggcgctggtggcgctggtgctcctgacgctcttcatcgtgctggtggtgtggctggcgctgcggccgcacaagccgcggttctacctgcaggacctgtccgtgctgtgcctcaacgtgacgccgccggcgtccgcctacctcttcaccaccatgcaggcgacggtggcggcgcgcaacgacaacggccgcgtgggcgtctactacgacaaggtggacgtgtacgcgcagtacaaggacgtggccatcacggtgccgacgaggctccccgtggagtaccagggccactacgaccagtccgtctggtcccccttcctccaatcgctcgaccacgtcgtcctcccccccaacctcgccgtcgccctcgcccaggacgagaccgccggctacgtcctcgtcgacatccgcctcgacggctgggtccgatggaaggtcggcacctggatctccggccactaccacctccgcgtcaactgccccgccctcctcaccgtcaacgacggcaagggcagctacggcgtcaactacggcggcggcgatggctacttccgcttccagcaagcagctgcatgcgccgtcgatgtctagctgtgtcttctttcttcatttcctcctcctccttctcttcttctttttaattagtttcacggcttctcttcttcttcttgcttaatttttctcaccggaatcaatcatctcatatcaatgaagaaaaaccgatcgatgatagtactagcttcttaatttagaccgtagttggtttggagctagtgtagcttggagtgaaagggaaaattggggtattctgaaaagatgcatagtagacgtacagctgggagtagacgtgaagtgtctgcataattcgatttgcatttggcaataattatattccaatgtgagtacatcaataatt

SEQ ID NO: 18974 - DNA, 2338 bp, Oryza sativa
  ref <308>: DATABASE ACCESSION NUMBER: AK069354
  ref <309>: DATABASE ENTRY DATE: 2001-12-06
gaaattcttttctcgagggttggataaaagcataaacctcacttccaacggaaacctcgagagcgctctctcgctcgcccatactctcctccgccgcgtctccatcctctcctcgccgccgccgccgtcgtattctcctccgttccgctccaccactccggcggaccagccatggaggagtacctggctaacatgaagaccctccgctcctacatgagcgatctggaggaggaagcgacgaagcggtcggcggaggagcagcggcagcgcactgccatcgacgcccacggcgccgacctcgcccaagtgagggcgcagacgaagcaggctagcgaggagtccgagcagctttcgaaggcgagggcggagctctgcgtagagatatccgagaagcagggcaggattgccacgctggagattgagtgcgccacgctgaagcagaccttggagctcctccatcaggaaatcgcaagtacttcttcaaaactcattgagaaaagattgttctacacaaagacaatagaaagcctgacggtcaaattacaagagcaacaggaatggcttggtgcatttaagcttaaggttgaagagtctcagagcaagcaaaaccttcaaggtacagctcttctgaatatgaagtgaaataaatagtggctccaatgctattttttcctatcttacttaagtcctttcatgggttttctgtatccatgttggtaagcgtcaatatgtggtatgttgattgtgcagtttttttttttcattatatagttgaaacatgttattgtgcagtccagtcagttctaattgcatcaatctgtgtttctgagttagctaccatgaaaggtgctgaggaaggccatgaagcaaagcagactgcatgcttttaatatgtgcatgccctacacaagtacacatatgacatatgacaaatgcatttgcactgattgcaattcttggaagttgggggcatgagttacacttcctggctcaatctgtgaaatttcagacttgtagatttattatgcacatgtggattagaactaaaagctgttatactttgactttggtagtatcaaaggaggagccgatgtgcagctgcaccagttcaggctttgtgtggaagtggcaccaattgataagaagatatctggattctggagacttctataaattgcatagcatttctatctaaaagttggcatgaaatttagatacctaaattaatatttgattactatacgtagcttagattattaggaagccgaccttgtataaagagggatcaggttaagtgttgatcaagaaggaatagcgaagtccattctcctatgtattcagctcaggcatatgcacctgcccttttctggccaaaccactgtttattctagaaatcattgattgatgaggtcctcccccactcatttttgcatcatatgctctctttacaaaggctataacaaaatcatataatgtttatttacatatctaactaattcctcctttttgattaactggtgagcatggagtagaagtttctgcaatcttcttttctggacagtcttcctcaccaccctccctcccagagtctcagtacagtgccaacctttgttaatctaaaagcaccaattgatatggacaaagccatggaatacttaactcatgtgggagcctagataagggaaatgacattggaagcaagcaaggagaactcaggattcaactggagtcaactaaacataagatcgacgagatcaaagaaaaacaatcagcacttcttacggaaatcagcgaagtactccaattctgacacccatccttagatctatgacatctgcaagttgtattatgcctatttttgggtgaaactgaaaggattatgtctttacttttcagagtaagcaggtcatagagcaagagaaaaatgcaatttctggctttcttgctccactacaacagatggatatgaaatccttagaggaggaacacaaagctctacaagctgataaagctggagaaattgagtactttcagtctcttgaagaacgtataaatgaaatgaagggagtttctgatgcagtaaaatgccgttgcggattggagtacaaggtcgaactaggtggcgaagccatggatctaagctaaacttgtccgtagtgcgtaatggccacagttacacactgtaaaatgcttatatacatgttactgctttgggatagtttgacaacttcatatcgagattatattgatgacgtctagtcgtctaccagtggaaagagatactaaattgcataagctagaacattgtcaatgaagttatccagagtagattatattc

SEQ ID NO: 18975 - DNA, 1208 bp, Oryza sativa
  ref <308>: DATABASE ACCESSION NUMBER: AK069355
  ref <309>: DATABASE ENTRY DATE: 2001-12-06
gactctttttacatttttatacgagagcccccccgccgcgaaccccatcggaatatcccccgccgggcccaccaccgccacctcctcctccccccccccccccaaattcgccggccggttcctgagacctcgccggcggcgagccggcaccctctcgacacccacgatgcgctgcctcctcctcctcgtcctcgcgctcctcgcggcggcggcggcggatgccgagcccgttctccgcacggtgacgggcgtccccacgggagtgtcctccggcggcggcggcgggggtggagaatcttccgacgagctgtactgcgacggatggaggctgtcggtggagacggggaacgcggggccgtggaccgccatccccccgcggtgcctggagttcgtgcgcgcctacatggaaggggagcgctacgcctccgactccgccgtcgccgccgcggactccctcgccttcgccgcgcgggcgctggcgtcgggcggcgggggggccaggccggcgtgggtgttcgacgtcgacgagacgctgctcaccaacgcgccctactacgccgtcaacggctggggatcactagagttcaacgagacctcatttgatgaatgggtggatgtagcaaaggcacctgcattaccagccagcttgaaactgtacaatgagcttcagggtcttgggatccacatcatcctcttgaccggtcgaagtgaattccaacgtaacgccacacaagtgaatcttttatttgcaggctaccattcatgggaaaaactcatcctgaggcaatcccctgatattggcaagacagccgtgcagtacaagtcagaaagacgagcagcactggaagctgagggattcaagatacttggaaattctggggatcagtggagtgatttattgggattgccaatggctacgagatccttcaaacttccaaacccaatgtatttcatcagttgaatttattagtgaaaagtggagaaaatctgtcatgtcgcttggaacctcctttactctttcttttaagttcgtaatgaattcaagaatcattctttggacataattgccgaggatttatctctagacatgttgaacccctagtggggtttgggaccatgcccaatgatggctttgtaatgtatcctttgcccaaagtcaaaataattatgtattagacaaaataatatatcttatgaatattgcatcc

SEQ ID NO: 18976 - DNA, 3807 bp, Oryza sativa
  ref <308>: DATABASE ACCESSION NUMBER: AK069356
  ref <309>: DATABASE ENTRY DATE: 2001-12-06
gtggagccgccgccgcgctgccgtctcctccgctcgccgcagattcgagcgaaggcctccaccggcggcgggagcaagccgcatctgagggtctgcatcaacattgtccaggcaggagaccacttcttggatggttggcctcttgcaaggattatggctgatacacttgcaagccacatcaagcaccttcagcatttgctcttcatggcctcttcctctcagtgctggatccaacacctcagtatcctttccatgagatctcatctcccgggtccattggacaagttccttcgacttggacaagacctggactggcctcttccctgtgagcagctcaagcagcaccactccaaaactgtatatatcgcctcttagtgtagccacccatgcctggctgtactcaggtggaatatatcccagagtgccaattaattcagttgtaacatgtgtgtcatagggaaggatcaatctggcaaggccaaaatccgcaacacaagctctgaattctctgtcgagaaggatattgctggatttgatgtcacggtgaacaatgtgaggcttgcagatattatggatatatgaaaggccccggcttgctccttgtgcaatcttgagccttgttggccagtcgagaagtggcctgccattgtctctgttgtgaagccagtcatctagactgccgttctccatgtgagaatatatgaggagccttgagtttccttggatgcagtaaccccatagtggcacaagattgtcatgttgtgccatagagagtgcttctacctctgcggtaaattctctctccatcagacacatttcaccgttgagcttcttgattgcaagcttggatccattgggtagctcagccttgtagactagaccattacctccacatccgataatgttctgctggtcaaagttattagtggccttcaagatatccttgaatttgagattatttgatcctcccttgccttgaggtaccatcaccaaaatggttccttttatcatgtcgtgcaagtgctctgaaacagaactcaatgaagctgcttctatgtccccattgttgctgctcttgttttggtggacagagcttgttcttctgatggatataagaaaacgtcccagcaagaaaaggatggcaatccctccaaagaacacacctaatgcaagtgcaataatggccttcttgttgcgctgtttcatggaggatgcatgtgttggtactgaatcacacaggttgctgagcatagggccacatagctttggattcccactatagctagaattgagaaatgtatcaaactgtcttccagttggaactggcccttctagttcattgttagaaacattgaatttagaaaggaagtgcagattagtcagtgcggccggtagttcacctgtgagctgattgcttgataaatctagcaattgcaggtttgtgaggttgcatatctgctgtggtatttctccagataacctgttaaagctgacattgaagccatcaagcattttcaactgaccaatctcagggggaatcactcctgtgaaactattgttacctagattcaatgcgttaggaaaagcattgagcaagcggtattgacgtgatggtgtccaataaacaggcaattcaagaaaatttgggtccaactgggcagcattcttccctgattgtagcatcggcaagttcatcaacgcaactgggatatcccctgtaagactgttgtttgttatgtctaaatagaaaagaacaggcatatctctaatccaaaatggtatttctccgatgagcatattgtttgataaatccaacacttccagttttttgagctttgatatccaaggagggatttgccccattgctccacaagagtctatggtcagtacccgaagattctcaaaaccatcaactgtttcatcttgtggtatggtttcacccttgaaattggttccaataagcagtgacgtaaggttcttgcagctcctgagtatctgaagtgcatttgtgatatttgtgaaatggttatcacttattgaaaagaaggacagggacttgagagtacccattcttggtgacaactggccatgaaacttgttgaaagccagccgcaacgcaattagattgctgcatgagaatatgctttctggaactgtaccagtgaagttattaattgagaaatctgcgattctcaaattcaaccagttacctagggctgatggcagctcaccagacatgttgttgttgtccaaccggagctcctccaatgtgcttagttggccaatagaatctgggatgttgccactgagcccagtcgatccgagatcaaggactgtcagcttgacgagttttactatgtgggaaccatcaagaactccttgtaaatcattattaggaagagataggtgctccaatgaggtagcactgaagagttcttcagggagagctccactaaagttgttgtatccggccttgaactctctcatcttggagcaatttccgagccctgaggaaatactgccactgagttggttgtaacaaaggtcaaggatagcaaatgatggggagttgatgcatatagaaggtggtatctgtcctgtaaagctgttgttgcttacattaagagcgacaatattcttcatcacttcccattgtttcgatgagaactgccctgtaaatgaattgctcgagatattcagtacctggagaggagaaccaccactaggggactccaactctggcagagaaccatccaggcggttgaagctgacgtcaagaacgatgatacttctggagaacaacaattccattggtaggtagccattgagtaagttgtgagacaggttgaggtgcaacagcccagtaagattgccgagagatggcgagatgcgcccttggaggcccttggaagccaacgagacatctgtgaccgtgccatcgctgctgcagttgatgccttcccatttgcagcagtctatgcccttcacccatgacgtgctgaggctgccgttgtggcctggcaagagaccctctagaaagccgatgagggagctctcctcttgctctgtgcaggagctggtcggagaggcaaacgagagcaggaggataacaagaagccgaaagaaagccacagataacttggtggtggtggtggtggtggtgctgctgctgctgctgcatggcaaattgggcagctgcatggttctctcatgaaactcgcctgctgcaagaatgttttatttggattctgattggctaaagaaccaaatggttttttcaacaatagcctgctatggtgggaaggaagaagctgctttctgtttctgtattgttggtctttcctccttgtgctcctttgaagaagatgaccaaaggatctctttcattgaacagggaaaaggcgtcgaccatgcgcgaaaggaacatctgctcaaagattcgagcgtttctacaaggcacttcttctgctagtggcagttgcaagaaccagtagcgtatgtgtggaagagatcgatcacggatacctcgtgcagtcgtcgatctgtctgtccaacaagggaggaaaagtcaatcctgtccaaatcaaaccattcaattcagacctcgatgaattagatctgattgatgctatcaatttcatgaaatttatagcatgccgtttgtattagtgtccgtaataacacacagggtttccctttatggtttggaaggggttgtcaccttcgtactaagcccgattatcgcggtaaccatggtaaacccccccaaaaaatatttttgctatatatttaccgataaattctcct

SEQ ID NO: 18977 - DNA, 2627 bp, Oryza sativa
  ref <308>: DATABASE ACCESSION NUMBER: AK069357
  ref <309>: DATABASE ENTRY DATE: 2001-12-06
gggggcttttggcaggaggatcaaggtgaggtgaagcctgccccgtgtaagatcatttggctcaataatatattcaggtagggattctctacccccggtgatttagtaaaaaaaaataaaaaggtgaggtgagcttcgtggtcgtcctgctcgccggcgatggcgacggcgacggcgagctccggttcttggtcagtatctgtctcccttctcgcctggtttctttgctctgctgcttgtcctgctgccgtctcgccttcttggtgtgttcgtctcgaattcagttcgattcatcgtcctgtgtcaggatacaagcgttttggttgtgaacttcctcgttttcaattttgagcccgggaagaagcaaacaacctatcaaaggaaattaactgaaccaggattggatgaaatttgatggggccacttctttggggagcttctgttttcttgcaatgggctgctagaaatttcgttcacaatgttttcctgataaattccgtcaagtcatgctcttctttgatgaactttgacatgttcaagatctatagttcgtcaaaagttccaagtctcgaatcggtcggagtgcgcggtcttgtttatttttcctgaccttgaaactgcagcactttgtgactagaatataactaattctggtcatgaaaggtgtgagctttgagtctgcaaagctgaacttgccaccatccagcttcagcctcacctgcaactctttaattctaattaggaagatgtttatgccttcccaaccgaaccgatcacaactgctgtttactgctttgatctctactctgtaccaaacttaccacatgcattcttcttgaaaaacaagcacctatttttttttgttaatgttaggtgtggtagcattaatctgaactcacctttttttacttattgtctacattcttcttgtatgatgcagctgcctgattgcctgaccaacagaattcagagaacctctattttatctgcagttgatgtcttgtgagcacaattcagtcctgaaaaagaacaggggtttgcttcagagcacagtaaagggatgagattggtgaatctgaatggtctgaggttcaagcagctcaagcttgtctgtcttgccctccttgtggtgctcctgacatggaaatgggagaagggatcgctgcgaaatcgcggcgagctcctccgatcagagccattggctttgagccatccagttcaatccaagtatatagatcatgatatctccaaggaagaaattttttctagcttggatccattagtgcagttagtagatgaagtaggaagggaagctactgctgcatctccacctcagtctgtagttcatgaagcagaaaacgtcactggtaaaagggaagcatcacctcctgagaagaaagaatgtgactacaggaatggaagatgggttcctgatgacagcagaccattatattctggtctcagctgcaaaaaatggctctctgatagctgggcttgcagattgacacaacgaaaggatttcgcttatgagaaattcagatggcagcctgaaggctgtgacatgccagaattccaagcctcccagttcttgaaaaggacaaaaccattgcttttgtaggtgactccttggggaggcagatgttccagtccatgatgtgcatgctcacaggtggggatgatcactcgcatgtcgaagatgtcggtaaacgctacagccttgtcgttgcgcgccacgctaagagaccggaaggttgggcataccggttccgaagaaccaacaccaccatcctctactactggtcagcaacgctctgtgatctggagcctctcaggaggtctgatcaggcaaccggctatgcaatgcacctagaccgccctcctgcatttcttcagaagaacctccacaggtttcatgtgataattctgaacaccgggcaccactggaaccgggggaagatgaaggcgaaccggtggcaaatgtacgtctccggggcaccgagccatgaccgggatatcgccgtcatctggaaggcaaagaacttcaccatccacaatgttgtcaggtggctggatgatgagcttccaaggtacccccatctgaaggtcttctacaggtcattgtcacccaggcatttcttcaatggtgagtggaacactggaggaacatgtgacaacaaaaaccctttatccaaggggaattcggtgtttcggaatcgttctgacgatgccgaagccgaggaagcggtgagaggcaccggaatcaagctcttggatatcaccgcgatttcgcggctgagggatgaagggcatatatccaggtacagcatcagaggtagaggaggggtccaggattgcttgcactggtgccttcctggtgttccagacacatggaatgagatcctggctgctcaattgtagctgcctgctgccatagtcaacacatttttcttttgataagctctaaccattttatctgatgttatcatcatctgataaaagcagctatttttcatgtaaatctgtaataacccttcaataagtttctgtacttttctgggattagccacacacatacacgcaccccatcattcttcaggactgaaaatgaaattcttgtgtagattcag

SEQ ID NO: 18978 - DNA, 1933 bp, Oryza sativa
  ref <308>: DATABASE ACCESSION NUMBER: AK069358
  ref <309>: DATABASE ENTRY DATE: 2001-12-06
gctaaaaggagcacatctcactcaggctggccggccgaaatcgatcggcagcaaaggccaaccaaactaagccaagagcgagctagctaagctggttttctgcttgtgccatgggagaagatggcggcgtgaactcttcttccaactctccggcggccgccgttggtctcgtgctggtggtggcgatctgcacgtacctggccgtcgtcgccacccgcaagcagaagcggcggcggcggcggcggccgccggtggtcggcacggcattccaccagctgtaccacgtccggcgggtgcacgactaccacacggcgctgtcccgcgagcacatgaccttccggctgctggtgccggccggccgcgagcagatatacacgtgcgaccccgccgtcgtggagcacatcctccggaccaacttcgccaactacggcaaggggtcgtttaaccacgggaacatgagcgacctgttcggggatggcatcttcgccgtcgacggcgacaagtggaagcagcagaggaagatcgccagctacgacttcaccaccagggccctccgcgacttcagcggcgacgtcttcaagaggaacgccgccaagctcgccggcgtcgtctccagccacgccgcgtcaaaccaatccatggacttccagggtttcttgatgagagcaacgatggactccatcttcaccatcgcgttcggccaagacctcaacacgctggacggctccggcgaggggcgccgcttcgccgcggcgttcgacgacgccagcgagttcaccatgctccgctacctcaacccgttctggaagctgtcgaggctcctcaacgtcggcgccgaggcgatgctcaaggagaggatcaaggtcgtcgacgggttcgtgtacaagctcatccgtgacaggtccgacgagctctccaacaccaaggcacacgacactgattcgaggcaggatatcctgacaagattcatccaggcaacgactagcgattctgggacggttgattacaagtacctgagagacatcatattgaacattgtcatagccggcaaggacaccacagccgggtcgcttgcttggttcctgtacatgatgtgcaaacacccggaagtacaggagaagatctgccacgaagccatggaggccaccaacgccggcgaggccgcttccatcgacgagttctcgcagagcctgaccgacgaggcactgaacaagatgcactatctgcacgctgcactgacggagacgctcaggctataccctgcagttccactggataacaagcagtgcttctcagacgatgtattgcccaacggattcaacgtcagcaagggggacatcgtgttctacatcccctacgcgatgggccggatggagagcttgtggggcaaagacgctgaatccttccggcctgaacgttggctcgatgagaacggcgtctttcagcaggagagcccgttcaaatttacagctttccaggccggcccaagaatctgcctcgggaaggatttcgcgtacaggcagatgaagatcttcgcggccgtgctgctccgtttcttcgtgctcaagctgcgggacgagaaggagatcatcagctaccggaccatgattacactctccgtcgatcagggtctccatctgacggctatggcgagatgagggcacacactacagtctgggcacgcacagcagctggctcctgtactcatgcaagtgatagctccttgtgcataccaaaacgaacgagatctgcaaaccttaattatgtctgatcgtgaataacccgcattgcaccctagaataataagtgcatctgaactgcagtcagggtcagagtaacttattggagtgaactggtgttgtagggaacttcaattgtacaacttggagggcgcaatacaaatgaatggattaaatagtagaaagttgatttt

SEQ ID NO: 18979 - DNA, 1141 bp, Oryza sativa
  ref <308>: DATABASE ACCESSION NUMBER: AK069359
  ref <309>: DATABASE ENTRY DATE: 2001-12-06
gggtcgcctccctcgctcgccgcctcccccgcttccgctcgctcaccaccaccaactcctcctcgtcttcatcaacgcgctcggtcgcctcgcctcgctctggaacgcatgatggcgagcatggcggcgctgctgcagcgtctgctggtggtggtgaatcaggtggacccgggcgcgccggggttctggcgggagttcttggtgggcatgctgaagccggtggcggcgacggcggtggtggcgatggcggtggcgctgagcttcacgcagcggctggggctcgagggcgagatgctgtacgccatggcgcgggcgttcctccagctctccgtcatcggcttcgtcctccagttcatcttcacccagaagagcgccgcctggatcctcctcgcctacctcttcatggtcaccgtcgccggctacaccgcggggcagcgcgcccgccacgtcccgcgggggaagcacatcgccgccgtctccatcctcgccggcacctccgtcaccatggccctcctcgtggcgctccgggtgttcccgttcacgccgcggtacatcatcccggtggccgggatgatggtcgggaacgcgatgacggtgaccggggtgacgatgaagaagctgagggaggacgtggggatgcagcgaggggtggtggagacggcgctggcgctgggcgcgacgccgcggcaggcgacggcgcggcaggtgaggaggtcgctggtgatcgcgctgtcgccggtgatcgacaacgccaagacggtggggctgatcgcgctgccgggcgccatgaccggcctcatcatgggcggcgcgtcgccgctggaggccatccagctgcagatcgtggtgatgaacatgctcatgggcgcttccaccgtcagcagcatcctctccacctacctctgctggccggccttcttcaccggcgccttccagctcaacgacgccgtcttcgccgccgactaatcttccctcttccacaacaccttgcattttgattcattatggattactgcttagtgattagtagtagtagtaattagttgttgagtacttacttagtaggacgagagagaaagtaagagtgtgtatgtcttgaggttaatttcttcttccataataaatcatgtgttgatgactt

SEQ ID NO: 18980 - DNA, 1185 bp, Oryza sativa
  ref <308>: DATABASE ACCESSION NUMBER: AK069360
  ref <309>: DATABASE ENTRY DATE: 2001-12-06
ccctggaggctgcagctcctggcctcccgggcaactagggttcggcaaatcccccgcaaggagggtgaaacccttccccaaaactccccaatccccacccgaccttcttcgaaatcggaggcaaaaccctaatcgcaaacagctcgtcctcgcgcggccgccgctccgcagcaatggcgtccctcttcaaggacccgaccaagctgtccgcgtacggggacaggcggttcaccgggacgcaggaggagtacgaggcggcgctgcaggcgtcggtgacggtgtacgtcgggaacatgtccttctacaccacggaggagcaggcctatgagctcttctcccgcgccggcgagatcaggaagatcatcatgggactcgacaagaactccaagaccccctgcggcttctgcttcatactgtactactccagggaggatgctgaagatgcggtcaaatatattagtggaacaatgcttgatgatcgcccaattcgtgttgattttgattggggctttgaagaaggcagacaatggggtcgtggacggagtggtggacaagtaagggatgagtaccgcacggactacgatcctggaagaggtggctatggtaagatggttcagaaagagctagaagcacaacgtgagttagttgactatggaggtgcttttcaacctaatgcaccacctcaatatgacagaggtgacaggaagagagggtatggagattcttaccggaacgacagagattaccaacggaaacgttaccggaacgatgagcgatcgtcgcaaagagcacctgactctgagttcaagagagatgcgattgattcggagaagaatcctaggtttcgtgagaaaggtgattctgatgaagaagacgatgattatgataagagacgccggcgctgaactgaaagaaacaattgctgataaatgcaaatgggcagttgcagtgactacactagtaaagcccgtcgagcttatgttttttaccctgttgtgtaccatatgacttatatatctgtcgtcagctcatttctatgttgcggttcatcaccacatgcttgcataggtctcgcatgcgactgggaatggattttgtgtttattgacacttcagcttatgtattgacctgttatttaggttggcaactaattgattttggtcggtaacaattaccttgcgaact

SEQ ID NO: 18981 - DNA, 1883 bp, Oryza sativa
  ref <308>: DATABASE ACCESSION NUMBER: AK069361
  ref <309>: DATABASE ENTRY DATE: 2001-12-06
gacatgctccgccatcttctctcctctcccctctcactcctcccaaatcccctccattgccttcctcgcttcgcatcgccgctcccgccgccgccgtcgggctgctcgccggcattgggtgttggttgtgaccgtatacaattattgtttttggagctgagcgatcagatgcatgagccttccttttaaatgatctgtgtccaccatggcgatgaaccaaatgcaggaacttcccgcttaatgggctggatgcgttgtatgcacgtttgcagtgacaagaagacattgaaacgttggttttttattgacaagagggttggttgagtgtctaactcttaaggaatcctatagtctacttgcttgctcttgtgttgttagtaactgttcttacaacaactctgcggagagttctgttgatggatttgaagacaagcaactctcctgttattgctgatcctctccctaaattagccttgccatctgctgtgatgacgtacactacacctacgagtttcccctctaccgggctgtacttgaacactccgaaaaagaagcctctgcctggaaagatcgaagaagtccgcgccgctggatggcttgatctcatgctggcctcctcgccacctcgcaagaggcagactaaggactttgccaatgatgttcaagctgacgagcttgatttgctataccgtaattgggtggtgaaccatccatctgctttaacatcatttgaggatattgttaatcttgccagaggtaaaagattggcactgttccttgattatgatggaactctttcaccgattgtggacaatcctgaaaatgcagtaatgtctgacgagatgcgctctgctgtgaagcatgtggcatcactttttcccactgcgatcattagtggaagatctcgtgataaggtttttgactttgtgaaactaactgaactgtattacgctggaagtcatggaatggatatcatggggcctgttaggaagtctgattcgagtggtcagcatgtggaatgtatcaggtccactgattcagagggtaaagaggtcaacctcttccaacctgcaagtgagtttttacctatgattagcgaggtgtacaaaaagctcagtgaaagtattaaggacattgatggtgcaaggatggaagataacaaattctgtgtgtccgttcattaccgcaatgtagcaccacatgactacggagaagttcatcaacgtgtgactgccgtcctgaagaattaaccttgtctaaggcttacccatgggagaaaggttcttgaggttcgacctgtgatagactggaacaaggggaaagctgtggaatttttgctggagtcacttggactatgtgggaaagaagatgttcttcctatctatgttggagatgacaagactgatgaggatgcattcaaggttctgaaggcaaacagcattggctttggaattttggtgtcatctgtgcccaaggatactgatgctttctattccgtacgggacccagctgaggtgatggaattcctgaagaaactggcatcttggaaggaggaatccacttaagcagaagggaggaacataacagaatcgttttttgaggatatggagaagtaccaactataaatacgagcaaaatatacactgctaacaaataagtctggccaaaatgtttttgatttggcatcctattatataagaggctccctaaaccacccttttttggcctcactttcatcttatgtttctgggattctgagacatttcattcttttattagttctgttcctttagtatatataaaatatatacacatgtatgttgaaaaattttggttcctgtccctgtcgtcttaggcaattatttattctaccggcaagttgt

SEQ ID NO: 18982 - DNA, 1932 bp, Oryza sativa
  ref <308>: DATABASE ACCESSION NUMBER: AK069362
  ref <309>: DATABASE ENTRY DATE: 2001-12-06
gtccgcctccttgccaaaaatccccaaatcctcgtcttctcggcgccgccgccgcgctgtcttcctcccaccatgccgcagcgctgtcttcctcctgcgatgctcggctggcgccgtcttcctcccgcggcgcccggctgtcaccgccgcgccatcttcctcccgcgacgcccgaccgtcaccgccgtcgccgccttttgcggattgattccttcggcccgtcgccaccggacctcggcgactgtggtggctacgaagcatggcgccaccaccgctatcctgatctacctctctgtccccttacccaggttctcaagttaattcgtgaatcatcctccctgattccttttctcatccccaaatcctcccctggttcgccgcactagccggcgccgctgcgttcttgcggagcgagggaaatcacggcgctggcttcgccgccctcgctggtgccgccaggttcttgtcgagcgagcgaaggaccagcgccgcgacagatctagccggcgctggctgctttctcacggagccatcgggcaagcgccacaaccggccgccgccctcctcttccgaagccggccaccgctgccttcaggcggagccaacggcttgtgccgcctcctcgcagagctggtcggcactgccgcttctcggggaagcacaggccagcgccgttgccgccgtcttttcgtcgcgtcagttctcaatgagaggtcccatgatctcgtcagctgctcctgatgaattctcttagtgaaccactgcaggatattaaaaacatcgttcattgactatgggctgccatccatacatttccaaccaccacacttttaggacagatggttgacaacttctcaaataaagaacagatagttaagcatggatgcctatcatgacctttcgtgcacagaagtgcaatatcatccaagactgcctgttgcagaggatctgaattcgttgcaatggggttcctatatttctttcttactttcgtgctcaatgcccaatagttggtatgtcttttgcaagttactattgggtagtaacaggctgcatattactaaaccttggagtaaattttgcgagagtaaacttggccagtgatgaaatactaatgggacatgcaaaatataaagttatgccaccacaaggtttgctctaaattttgcctatgactttgtctttttgaatacttgctgtaattggacctacatgaaaaactcttaaccatagaattgttctacaaattctcatgtatagtgatatccttcttttctatgttgtcattctgcaaatttttcagctttcagcatgtttttggcatgagttgaccatcctgtggctttcagggcttgcagtaccactatggcaagcaaataacaacttggatgttgagcataggttgtaactgttgtagttgtaccgtatactttttatacctaaatacttagttgatttatttggatcttcgtgaaccaaaaatggcctctttttttttttgcacagttgttcaatggaattaatagcaatggctgatagatggggcttaagtaacctgttcttcattgatttggtcatcattcctaacttaattcattagtcctgaatccggcatcgccaacagtacctcccagcattgggtttgctatcttcaaccaaattctaccataaagcgtggcgtgagccaggaccatctcagtgccggtgagcacccacatggtgatttctcagagtttgcaatgtactactatttgatttcttgatgtatggctgcagcaagttagtaaaacaagctataatttataatcaggtatttcaatccatgtacaagatggttatctccacttatttaatatttcttatattatgtgctaagttacattgagatatctggaaattactcggttatgttatttttttaaaaaaactacc

SEQ ID NO: 18983 - DNA, 1803 bp, Oryza sativa
  ref <308>: DATABASE ACCESSION NUMBER: AK069363
  ref <309>: DATABASE ENTRY DATE: 2001-12-06
ggtcgtccctccctttttcccttctaagcccggcctctctctctcccgtccttgtcttcttgcgcgcggaggcagaggacgccgacgacgtcccgccgcgccagtgcccccaccttgaccgcgccatattgctcctcccgcgctcgtgacccgattcttcgccgtccgatccaccgcctccatcgtcccttgcatccacgccgtcgccgtccccacgtcgcccacgaaccgcctttgccgctcgctcccgcctcgaaccgacctcgcctccgctataaagccgagcccctcctcacaatccctcccgcttcactctccacctccaccgtgccatcgttgccttcccgctgttctcgccgtcgccgtccgtcgccgagcaccgggggagccggtgcgtgcgtgggcgcgtgacgcgggactccgggcgccgtcttcttcccttgcccgacccgaggtcgccgtgatcgcgtctcgtgccaccggccgtcccccgccgcctctccccgtcgcggtttttgattgtttgcgtatagttgcggttaccggattttcgtcgatcgcgggttttctcgaagattcgtgaagctccgtgaagaccttgagcaaggcaagtcaccctttgatcaattgctcctataattggaaaatcattattattttgtttgcaacttgcattagtagaatcacacacttaatttgcttggcctcggtttgcatgtcaaatcgacggacctacccagtagtcgcactaattcctgtaggttgtactaccctgattccttgtcgctccacccttgtggtacttcggtatttgtactctctgagtgcgtataccaaatatcccacatacaccgttgattgtcgaaaatttgggaaatgggtttgagaagccttgaaaacccgacatgtggtgtcggtgtgtttaaaaataaaatgaattatgaaaactcgcgatgcgggggttgtgcctatgtggcactgtcccgtattcgcatataaggaccgattcctgtgggaaactcatcgagcataatcaaagtgcaaccacaaggtggaatgggacaccctggctaagtaactagtcggttcagggaaacctcgcatgccaatagttgggaacgccggagcggggtctgttggagccaaaccgggttcctggtaagcaaggaagagaagcttgctgaattaccgatcgaggtggttggagtttgatttgtgaaaactaaaatggcctatatttatgtgaggattcgatccttctatgtggcatgaggtaaccctgggtcggcttgggaaaggctttgttgcgaacctccgataccgacgggtgttcggaataagttcgtatcttgtgggtaaagtgtacccctctgcagaggttaactaactgttcgaacagccgtgcccacggtcatgggtggatgtgaggtggttcccgttgcgtagatttgtttgcctgtgctttgtgaaaagttgttgtggtgttggaatcgtaaccagaatcagcctacgtggcagatggatgacctgagtggtcagaaacgaatctgtgtgattcgggatgtctgcgggcatcatagactaggcttcccgagtggaagcggattgctttgctgctgggcagctggactctgggagtccgagaaaatgaaaaaggctctgggagccgcttaatcaagtgaaatggctctgggagccgataagtaatgatatgacccgggaggtcggtacattaccatttgacttgttgaaaagcatctcttaagtcgaatcgagacacaagtctcttttcgatccaaactc

SEQ ID NO: 18984 - DNA, 1087 bp, Oryza sativa
  ref <308>: DATABASE ACCESSION NUMBER: AK069364
  ref <309>: DATABASE ENTRY DATE: 2001-12-06
ggcaaggttcagtgagtaataaagccaagatacaggagcgatcggctccgcggcgttcgtcgctgtaaaatccattgttcatcgtctccctcaccggcgtttgtgttcgtgagtgtgagagtgttcctgggctgagccaacagtggagtggcggtggtagcttgtgacagtggctataagagaggggagataggaaaattggattcggtgggttgaggcagtgatgtggtgagaggagaaagggagagggttaccggcagagaagattgcctggcaatagggattggctggacatggcagacagaggagagctcgaagagattgatgcatagtggggagaagggatgtgatgatgatgaaccgcagcagcagcggtgcctacggggaggaaggagcagagaaggttgcttggtcggctaagctgagcgctcgtgctcagctgtgcgttagagctatgcccgtcgctcatgctcgccgccacgtcgtcacttccgccccttcccccaatagcgatggggaatggaggagagagaggggagatggggaatcgctgaatcagagatggggaatggaggagagagaggggatgtaggccgctgcagtagttgtagcaccggagttatcttcgtcgtcaccgccgccgccaccaccaccaaaccagccctgcctccgctggagaagggagagaaggagatggacgcaaagctacggaggtggcacacgcggacggcgaggatgggcctttcgcagctgacacaaaggggacgatggccaccctcgtaaccgccggcggctccaacacggggattcagttcgctgttcgcgtgcttctctgctatgctcaccttgccttgcttgcaacaccgctgcaccaagctacaaccacttgctcgctaccaagttcactttaggagagagaagagttggctgctaatatatggggtccaagtgcgctccccacgtcagccaaaactagtcactgtactgtcaagggatcaaagttaacatggtattgtaagttgggggatgtgttatacctagtattcggttcaggaatgaattttagacttggcgacaaatttgaggg

SEQ ID NO: 18985 - DNA, 1862 bp, Oryza sativa
  ref <308>: DATABASE ACCESSION NUMBER: AK069365
  ref <309>: DATABASE ENTRY DATE: 2001-12-06
gatcatccacaaactcccctaaaaatttcccccccaaaatacaccaccacccgaattaattaaaatcgcgcccaattaatcatttaatccatccccacgaaacccaccaccatgagcttctcgtcgtcgatgagcaagcagcaggtgctcgaagtcgccggcgacgaggtcggcggcggcggcggcgaggaggtcatggagctcatccccggcctccccgaggaggtcgccgagaagtgcctcctccacctgccgttcctctaccaccgcctcttccgcaccgtctcctccacctggaaccgcttcctcaccgtctccccggccaagttcccgtccgcggccgcggcgtcggtgtcgctgtcgctgccgttcctgtttgcgtttgcgttcgacccggcctcccggcggctccagtgccaggcgctcgacccgttctcgaggaggtggttgctgctgccgcccgtgcccggtggcgccgccgcggctgggtcgttcgcggtggtggggttaccacgccgaggtgagatctatgtgattgggggcgtggtggaaggcggcgacaaggccgtgaggagcgtcgcggtgtacagcgcggcgaggaacgggtgggaggaggcggcggggatgggcacggcgagggggtacatggcggcgggggaggtgggggggaggttggtggtggccggggaggacggggaggcggaggtgttcgacccggaggaagggaggtgggcccccgcggcggcccggcgtggcgcggccgtggcgaggtacgacgccgcggcgtcgggggggaagctgtacgtgacggaagggtgggcgtggccgttcgagcgggcgccgcgcggcgcggtgtacgacgcggcgtcggactcgtggtcggagatggcgcgcgggatgcgggaagggtggacgggctcctgcgccgtcgccggcggccggatgtacatcgtggcggagtacggcgagtggaggctgaagcggtacgacgagccgcgggacgagtggaggatggtcgccgggagcggggtgccccccgaggtgaggcgcccccacgtcgtctccggcgaggtcgaggaggtcggcagcggcggcaggcggcggatatacgtggtgggcgccggcctcgacgtcgccataggcacggtctccccttctccggccatccacggcggcgacgacgagagggtggactgggaggtcgtcaagggccccgccgagttcgccggcctcgccccgtgcaacgctcaggtcctctacgcctgaactccccgccgccgccgctgccgctcgccggtggcgcgtcgcatcgccggggaccccgctttttccgggcccacctgtcagtgagacccctccacccacgcgggcccacctggcagaagcacgtgacgatgcttcccgctgctcactgctgacgcccatccacgggcgaaatcacacaggcactgccttggcacgggacccacctgtcagtgactccgaatcgggggctaaatggtcttttcacccccgctgtccatctctgcatctcaattctatcttgtcagaggagcagaggacggaggaatggagcgtgcgtctctgtaaaacttaaataccacccatatttaattaattactcctactagcagtagtattagattcttcatgtaccactagtatatttgcaaatatttgcacgaggttttgaacaaacgagaaaaaagtggtgaagatcgatgacgtcgacagcactactgaatgaatgaacaaagtggggaaaaagaaaagaaaaataattcaaaccccatttcatttcgttcactaaggcaaagtacttaccaataagatggtgaagaaagaatgttttgttcccagcc

SEQ ID NO: 18986 - DNA, 1948 bp, Oryza sativa
  ref <308>: DATABASE ACCESSION NUMBER: AK069366
  ref <309>: DATABASE ENTRY DATE: 2001-12-06
gacttctcctcagctcgctttccccttcaccactgcaacttgctcatcacccacacaccaagcaagcactcactctctcttgctagctctctccaccacaagaagaaactagctagccaagaaacggaggatcgatcgaggttcaggatagagattattacatcgtcgtggtcgtcgatcatgggggatcatcagatgatgcacgcagctccggcggcgatgtacaacggcggcggtggtacgacgagctctcatggcgtgtggtggagcaacgcggtgggggtaccggcggcggcgacgtgctcgacgacgacggagctcgccgggtacaccgcctggtcgtcggctctggccgctggatacgatggcatggtagctgacaacggcggcaagcaggcgaagagcaccaccacggcgtcgtcggagtcgcccggcaacaacagctcggtgaccttccaagagccggcgagcatccccgacccggccgccgtcgccgccgtgccgcagccggggctcgccggcttcaccgactggacccagcctttcatgaacaacggtgctggtctgcatgagtttctgcaagatggccaccatgacatgagcgcgtcgagcttgatgaatcactcatcaaataacctagcactgcagcaagcaggtcaccaccacgagctgctgtccagcttcggctcagacctgctcttgtcgccgacgtcgccgtacggcggattccagtcctcgctgctgaggagcctcatggagccgacggcgaagcagcagcagcagcagccggctttggctggactccagcagtatcatcagtaccagcagcagatgggacacgcaccagcagctgctgccaagttcgcgcaggcagttggggccagggattcactccagttcaccaacgacgcgccgttctggaacccttctgccggattcggcatgccggcggctgtggcggtggcggcggcggcggcgcaagatcaagctagcgttcgctctgccaaacgctcgtcgccggcgccgccgcgtgcggcagcaacccttgcattaaagactgctatggaaggagtaggggactctagctcagtgatcaccaagaaggagacagcgttcaagaaaccgagactcgagacaccgtcgccattgccgaccttcaaggttaggaaggagaagctaggggacaggatcacagcgctccaacaactagtctctccttttggaaagacggataccgcatcggtgctccatgagaccatcgagtacatcaagttcctgcacgaccaagttggtgctcttagtgctccatacttgaagaacggtgcccatcaagtgccccacttgaagaactcaagtcctgacaagtccgagcacggcgagatatcactgaagggccgggggctttgtctggtgccgatatcgagcacgttcgccgttgccagcgaggtgcccgtcgagctgtggactccatttggtgccaactttattaggtagaagaacaagtcctggaactgaagaacactgatcagaagcgtcaaattaacgatcgagtagctagctgctaatatagtcgcctagctagcacaaatcgagatctgatgtttcttgattgtatctacgtactagttgtatgatgataatttcgtaaccctagtagtactgatgctgtggctgtaatcagcaaagcactgagctagttagctagatgaacctttggaatgagtgcttgaagacttggattcattcttcaggttcatcacagaataaggaatcggctagttgagaggggacagaattatgtactgatcatcatcaggttcttatgattggttgctaggttgcatcgtatcaatgagtagttgcggaagaatttgttatagaattgatggttcgattcaatggtggatcaattaagtaatgtagcaggtttctctctgttgattgtacc

SEQ ID NO: 18987 - DNA, 1645 bp, Oryza sativa
  ref <308>: DATABASE ACCESSION NUMBER: AK069367
  ref <309>: DATABASE ENTRY DATE: 2001-12-06
gaagttccgtgggcgtcaggaccactcccttccggcgcggcggagatcggaatcggcggcgatggcggcgacgacgacgagacccctccccctcctcctcctgctgcttctgcctcctctcctcctcctgctgctctccttccacgccgccgccgccgccgccgccgaggagttcccgcgcgacgggcgggtgatagagctggacgagagcagcttcgaggcggcgctgggcgccatcgactacctcttcgtcgacttctacgcgccatggtgcggccactgcaagcgcctcgcccccgagttagatgaagctgcaccggtgttggcaggactgagtgagcccatcatagttgccaaagtaaatgctgacaagtacaggaagcttggatcgaaatatggagtggacgggttccctacactgatgctttttatccacggggtccccatcgaatacactggttcaagagaagctgacttgcttgtccgcaatcttaataagtttgttgcacctgatgtttctattcttgagtcggactctgcgatcaagagctttgttgagaatgctggcacgagctttccaatgttcattgggtttggggtgaatgagtcgttgattgctggttatggagggaaatacaagaaaagagcatggtttgctgttgcaaaagatttttctgaggacttcatggtcacttatgattttgataaggttcctgcattggtttcacttcatccaaagtacaaagaacaaagtgtattttatggcccatttgaaggaagtttcttggaagattttatacggcaatccctgcttcctttgactgtccccatcaacacagagacactcaaaatgttggatgatgatgacagaaaagttgttcttgcaattttggaggatgattcagatgaaacttcttcacagttggtaaaagttttgaggtctgctgccaatgcaaaccgtgacttggtgtttgggtatgtcggaatcaaacaatgggatgagtttgtcgagacttttgatatttccaagagctcacagctgccaaagctaatcgtctgggatagaaatgaggagtatgaagtggtggaaggctcagagaagttagaggaaggtgatcaagcttctcaaataagccaattccttgagggatatagagcaggaagaacaacaaagaagaaagtcagtggcccatctttcatgggtttcctgaactctcttgtcagcctgaactcgctatacattcttatatgtgtcttcgctcttcttggtgtcatgatatactttactgggcaagatgatactcctcaggtaagacgagctcatgaagagtgaaagaagcttaccaaaagaggctatccaccaagagatacatatatatatagttcagaggtcaggtttcaaacttccaagtgatgcaatcctgaaggacctggttttattggttgattctgacattattgtatctctgtcggcaattatctagttgtgccttgtgcagttgtgctctcctgcggttctgccttctgttcctctgtttatttgttaattagaactaaaactagcttccacatgtgcatgatagaaaatgtgattcttagttcagttctaatttgaacagttctgtgaaaaatatttttgttgtcc

SEQ ID NO: 18988 - DNA, 2601 bp, Oryza sativa
  ref <308>: DATABASE ACCESSION NUMBER: AK069368
  ref <309>: DATABASE ENTRY DATE: 2001-12-06
gagcatttccctccaaatccgctgcttccctccattttggcgccacaatctctctctctctcctcctcctcctcgccggagatgtcgtaccccacgttccacgtccacccgccgttcccggtgtcggcgaggaagaaggaggatgacggcggcggcggcggcggcaagaaggaggcggcggccgccgcgatgaggcggctggcggagatggaccaccgcgcggcagccgacggcgggaaggtggtggcggccgtggccgtcgacggcgacaggggcagccagcacgcgctcaagtgggcggccgaccacgtcctctcgctctcccaccccttcttcctcctccacgtccgccgcaagcacgcctccctccactccgccgggggaaagcaattctccctattgcacgtgcaggatgatgttgcagcttcttctcctgatcaaatggatcatcacaccaaagatctgctgctcccattccagtgcttctgcagcagacgagggttacaatgcagggaaaccattcttgatggaactgatgtgtggaaagttattatagattttgtccttgaccataaagttgacaaattagtactgggggcatcatctaggaatgcatttacaaggacaatatggaagttggatgtgccaacatgtgtcacaaaatctgcaccaaatttctgttcagtgtatgttatatccaaagggaaactatcttcattcaggcttgccacccatgcaaatgcaaatgataccagcaaagaagagctggagaatatatctgaaaatcggccgctaattgcaaaaagtgaaccagcaccaataatacatattgaagggcaaaattcatctagtgcactttgtcctggctgcaaccctttatctccaaacctgagtgaagaatgtactgaatcaacttctaaatactacccagaagatttggaggctgaaataaggaagttaaagcttgagctgaaacagaaaaatgacgatatgcacatgtggaacaagttacctcttgggatcggagacaggagtgaaaactcaaatgcaagtgttgaacatgaggatgaacatttacaagaattcacgacatgttcaacccattcctacagtgagagaccaaatgcagaaccgagttccgcagttcgtggcccaaagcataagctcttgaaactcgaaacttcctcttctgatcaatgcagagagagaaccatacaggaatttaaagaccatagttcccaggatacggtgcatccgatcttaagacgtttgccgcccaaattttactcgcctagaaatgattctaagcatggatgtgcttctgaaaaggcttacaaccttgaactgaagtgtaaatctttgccaaggccaattgagacgaaaagactactggagggtcttccaactagattccaatgcaaaatatacacaacagaagaggttgcaaatgccaccgatcatttctcaccggaactgaaggtaggggaaggaggttatggaccagtctataaagctacacttgacaatactcttgttgctgccaagattctccattctaacataactcaaggactgaaacagtttcaacaggaggttgagttgttgaacaacattcgccacccgaatatggtgcatctgttgggtgcttgccctgagtatggctgtctggtgtatgaatacatgccgaatggcagcctcgaggaccgtctcttctgccggtcaggcaccccaccgctgccatggcagctccgtttcaagatggcagtggagatagccactggcttgctctatctacacaagatgaaacctgaagcctttgtccaccgtgatctcaagcctggaaacatcctccttgacaaagatttcgttagcaagatcagcgatgtcggcctcgctcgcatcattccccggtcgatggatgagacggtcacgcagtaccggatgacagatgctgcagggaccttctgctacatcgatcctgagtaccagaagactggattggtcaccacgaaatccgatgtttatgcgctcggcatcatctatcttcagatgatcactgcaaaagatgcaatggggcttgcttacatggtctctgatgcactggaggaaggaacatttgaggggctcttggatcctaatgtcaccggctggcctgtgcaggaagctcagaagtttgctgagctttcactgaaatgctgtgaactccggcacagagaccgtcctgacttggaatccgtcgtgctccctgagctgatccgtcttcacacattcgttgcatcatctggagataattcttccatcgaccaaggccaccagcgttcagtcagcgacaaggagttggctctggaaaatgacttggccgagattctgaacgatgggctagtgaagggggcgtcatttgcagcataaaagtgcaaggggccagtagatgttattctgtcaaagatactggaatctgcagtagttttgattttgctgtaaatactaccctagcccagaaatttttgaataattagatcatttgggaaacgtgtactaacaacaacctgtaaattgaacacaatctatagctctcatctggtagcactgttcacttctatc

SEQ ID NO: 18989 - DNA, 2417 bp, Oryza sativa
  ref <308>: DATABASE ACCESSION NUMBER: AK069369
  ref <309>: DATABASE ENTRY DATE: 2001-12-06
gctcctctctctctctctaccagcagagctgctccgcgctctagcctccacctttctccaccaccgcctcccctcttcgccgcgagtgccgccgccccacctcgccgccacggccacagcctccccttctcgccgcgtcgcgggccctccctcctcgccgcctcctccttctccaccaccgcctccgctgtctctgccaccgcctctgcagccgggctcccctcctcgacgcttccaccgcgccacctcgctcctccgccaccggccgtgatgcgcgatgacgacgacgatgatggcgacgcctatggatctgccattggcttggcccgggcgcgtggatccgccgctggctggtctcggggaggggaggggagctgatggcgacgaggaggagaggcggcggctcacctcctcgctctcccttcgtcgcaccgatgacgatggcgacgacggcgccgcgtgtggtaagcccggacagaggaagagaggcagcgacgcacgacgacggcctcaacgatgtcgccgccagctgttggggaggccagcggacggaggaggagagccatcggccagaggggaggccggcggcggtgccttttttttttatttgctgtgatgtttttcgcaggcgggtgaatctaccgtcaggcaggccattgggccgcctgcaaaaatcatttattttcgcaggcctttgcttctagacggttcgttcccccatgcatctttcccactgagttacttgtctcttttgtttacatgagttttacgcgcaaattgcagtctaatttttttttaagaattatacagtacaatgtagacattcacaacacatgcacactcacccctataaacatactagttatattgtaattacttactagttacattgtagttacattcgtactattaaagtaaataaaatctttgtgtgtgtctatatatatagtccccaccaaccgagcaagctaaccatgttgggtacgtaataaaatattatagttacaatgtagttatagtataattacaatatagttatactattatatttgtaactacaacataagtaaacaaattctaattataagcctgttatgaattttttggcagcccagtattgtgggttggtccatcagattgaggcccattagatagttaccgtggcagttactagtgagcagatcttatccaagggttaaaaaaaaacgtgatatatggactccaaaaatctgtcgatagacagctatgtagtcctttccaaccagctcttatgtagttttcatcaaatcatatctctcaatccccctcccactcctccactatatctcattcattagggccatcatgttttttttatccgtaatctcttaaaaattttaaaaatatcttatatttatggacagagtgagtacacaacacgaaatatcatgacaatgaataggtgtgagcgtgactacattggtgcatatatataccgatagtgtagtcgattgcagtgccaaataccaacatctgatacacgtctagcatatcaaagccttataccagtatatataccaccagtccaccacatcgtactgcaggtgagttccagcgttctgtctagctaggttgaacaaattaaaatattgagacaatacttctaatgttacagtaccaatatttttttcttccaattcaatagaaaacaggtagctctgctgtcccagaaaacttgaatatgccacccagtttgccaccatttggtcaggcttgtctgaattactgaatagaaaatggtagctatgctttacatcatgtgcgtgtgtgttatatatgcaaggttatattattctcattggtttggtaggcatcaggaacatctgctcgccatgcaggaagcagaaatgtaatttagcagaggattattgcgagttgtagtgatgcaaaggacagagctggaatggccttagtagcactcttcaaaatgtgccacctagaaagaaatagggcatatcgactgctccatctggatcagtatcatcgctatgaggcaggagtggaagccgagatccctatgtaagaatatgaagaaagatgacgatctgctaaaacctagagacgcgagcgtgatcaaactagttgttctagccagctgaggctatcagcttctaatcatgaccatgaattaacatcaaggcatgtattaaacttaattggaatcgatatcgtaattcttacttttgccttatttccagttccattttttttattttgcaggtatgtgttaaacttttaaagctttttttatattcacttaagctttttttatattcacttaagctttttttattttctgaaatttgtgacgcaaaggacctgtaattgacggttatatatgaccactcttatacattttcatttgaaaaatggctttc

SEQ ID NO: 18990 - DNA, 1017 bp, Oryza sativa
  ref <308>: DATABASE ACCESSION NUMBER: AK069370
  ref <309>: DATABASE ENTRY DATE: 2001-12-06
ggcacatgcatacacccattctctccagtggattattcaccgttctctcctgctgccattgcacgtcttgcttgctgccaatcccagattcatgcacgggcactgaggacgctggagattccacggagcgagatcagcgacgcggcggtggagagcgtggcgccgaggctgcccaacgtgacgttcctggacatcagcagctgcaccaagatcggggcgcgcgcgctggaggcgttcggcaagaactgcaagtcgctggtggggctccggcgggtgatgcacccgacggacgtcgccggcaaggcgtgccagcgcgacgaggcgcgcgccatcgcctgcaccatgccgaggctccggcacctggagatgggctacatggtgatcgcgacggatgcggtgctcgacatcctcgcgcggtgccgcgacctccggttcctcgacctccgcggctgctgggccgtcgacgacaagttcctgcaggagaggcacccggggctgagggtgctcggccccggcgtcgacgactgcttcgagaacagctacctggaggagtgctccgactactccgacgactcctccatctactcgtgggagctcatggaggacgacgacgacggctactacgccgtcgggagcgacgacgaggccatttgggacggcggccaggcctcgagaacctggaggtcaggttctacggcggcggcttcagcgagagctatgctggcttcgattggccaccatcaccatgaccatgagagcagctcagctcagctcagtccctgacctcactgtccttgctcttcctctcgagccgtgtacctaagcttgcagttgcagtctcgcagatgtgttgttgtactctgtgtgtgtgcgcgtgtgccagtgtgtcatcagcatcactagcttgcagtgcagatatgtgtgagtgaacttctacggctagttgttactactactacatccagatgtaaactttggtgtttacatgaagaagcaatgcaaatgcaatatgtggtg

SEQ ID NO: 18991 - DNA, 1387 bp, Oryza sativa
  ref <308>: DATABASE ACCESSION NUMBER: AK069371
  ref <309>: DATABASE ENTRY DATE: 2001-12-06
gactacacaccacgtgatttcctctcccaaatccaccaaccgtcctccggtctctcctgttcttcgctcgatcctccaatttcctctcccaaatcatctcgagtagtaatcagtgtattttgttgcttatttcgatcgatctcatcccaacctgttcgatcgtcgcctccgccgagttttgctgctcgatcggatcggtcaaagcagcacaccggcccggcaagccatggagctgacgctgctggtgttcgtcctcgtcgcggccttctccttcgtgatcggcacggccgtcaccacggcgccggcgccgccatggccagcggcggccttcgccgcctacctcttctgggtcgtcgcctccgccgccgtcgccctgttcgtccgccgccccgccgcgtgaacacacacaccctcaccaactccggccggccaaactcaactcggatcgagatccagtcagtgattctaacccttcacttcctacctactgctccgtccaaaaaaaaaagaaaaaaaactctaattatgaatctagacacgtatatgtctagattcgtagttagaattggattttttttttttggacggagaggtaaacagctagtagtatctcaatctgctagctctatccgccgcctcgctcgatctcggcgttcgcgcgcaccgcacgccggcctgaatggctccaagggaagggaactcctcttctctctctctctctgaaaatatacttagattataatataattcactttgcaggtttttattttttcgaaccgcttttattttattttattctttaacgaaattgatttcttcggtttcataggcgttcaatcgatagatcgatggatcgatctgccaaatttccccgaggaaatttctgctacctccctaggcacacatacatacatataataataaccatatacatcaaattaatgatgtgttacttacagatgatttatatatattagctcatcgatctctcctgatgcaggcaaagggatccaccacaagcggcgcgcggcagccggccggtcgatcgataaccattatatatattcatttggaatgattactaatgctgcaggtcaatatatatcaagatgctgtgttatatttggtgaatatattgcgagttcttcgtcagggagagacggacaatcaaattgtcgtctcgtcttttcgatcaaagtggaggtgctggtggatcatagttaaattcgcaagtctgcgcattcatgaatgcctgaaaaatcgaaaagaggaaatatttattatcttagaatgttatatgcatgtaaatttggatgttgtgattatctcggcatcttataagagtggataaaaaatatttatatacagtacagtacatgttgcttgg

SEQ ID NO: 18992 - DNA, 2729 bp, Oryza sativa
  ref <308>: DATABASE ACCESSION NUMBER: AK069372
  ref <309>: DATABASE ENTRY DATE: 2001-12-06
ggggggttaatgaagttctaaagttgctgtcaaaaaaaaaatccgggtcgattgattgctaggcgaaattaccaagttaccctcgccattttgacgcctccgtcgtgcgggagttatcctgagtttgcccttgaccaccgccgccgcctccgcctccgccgatccccatccatcccaggagcgagcgtcgctcgtccttctgcttccgccgcgtccgttacgcacatcctccgccaccgccgcctccgccaattcccatccatcgcgcgagcgagcgagcagggttcgccgtcgctcgtcctgctgcttccgccgctgggaacatggcggagagcctggagaccctggatgtaccattagcacatagcgatatgaatggaagctccactgtccagggagaaccttcagatgaaaatgagttgattgtagatgacttggacgccatttggaatgaattaaataccagtcttcatgtttcaagatatgttactgactctgttatgaagggaactataagtgctgtagagcaagaatcagctcgccagattgcatctaaggatgcagagatagcattcttgaacgaaaagctgcatcaattcagaaatagtggcctgagtttatctgagggccgagataaactctatgaagaaatttataaccttcgccaacagcttgtgactctttctaagtcactcttgaattctgagtgggggctttcagtatcacactataacaactttgaaggcgcagaagatgaaagtaagcatagagggaatgaaaaatcctctaaagatggtataactaaggaaaatggttctaaaggctccaatgaagatatttttattgatccaacagttctgaagcacatggatagggatgagttggtagcccatttcaataaaatgatgaatcaaatgaaacggcagcatgattcgactttgcaagagaagacggaagagatatttagactaaagcgggagaacctaaaaaaagaaggacctaacccctggcatttacgcaataataaagaatttgagctcatgaggaagaaaatttgggaagttattacaaaattggatgaggtccttgtggagaataaaagaaccatccgcatcaagagtgatgtatttcctggtcaacaagacaaaatcaaggttgtagattctcacaaccatcagttgcaaggtgctccaactgacaatgaagaggaagaatgcactactctaattaaggcttcacatttcacacccattgagacaaattacctgaatcagattaggaggttagaatctgatattgaagatgccagcattgtaaccatagttagagaagagacagaaaagattttagtaacagagtttattagtgaaataaaaatgggattgcatggttatgagatggagtttaatatgaatctggacttttggtcaattattcagaaagaggccatagctgaagcagcttcaaacattaattcatttttgttaaaatacagcgaggaaaacagctgtgctgaagcacaatctctacatatgcaagagatggacaaattaaagctaaatgtggataccttcaatttagtgataagggagaaggaggaatatttgtcacagattgaattcaaagcaatagaggatcatttggattttctacgccatgaacttgattcactaagaggcaaagttgcaaagcaagattccggcatttctgataagtgcagggattttgatgtcattgttagcaggttggagcaagctctgcagcatgttcatcgtaatgagattgctctgaaggagttaaatgatagatttaggactgtatcagattctcaaaaggaggtagagaaacaaaataaagttttacatgccatcattaaagaaaaggagaagggattttcatcatccatttctaaagaaaaggagtttacagaatgcatgagatgtgttgttgaatctatgagaggttttgaaaagcttgttacagaccaacaaactatcattgcacacaaagttcagcacaatgaatcaaggtttagtctattgaaagaacaatgtaaaatccttgcaaaagaaggcaatactttaagaaagaaggcattgagatacaaggaaatatctgaaacaagagcctccaatcttcagaaagctgagctcgaggtagatttacttggtgatgaggttgaggcattaacagatcttcttgcaaaaatttatattgcactcgatcactattctcctgtcttgcagtactacactggtgttatggagatcttgaacatgatcaagaaacatttaaacatgtcgaaataaacttatccttcatacttgtatctgctactacagtgttagcaaaggcttgacagcttgacggtttgactctgcatttatagtagtatgaggtgacttttgtagatcatgcccttcttttgatgtcaaatcaagggttaggtgatgcaaagtagtttgctccccattttagatagtagatttggtagcctttggcagcttgtaaatgagccaacattagttagtccttgtattgcgctattgatcctatgggtctggaaaagatgaattctgaaatacttttccacttgatggactaggaagaatgttggtggagtttttgaaccacattgagaaagatgtatgggattaatgtatgagtttgaccaagtgtggtttactggtcatggtctaatgatgtcacgacctgagcattgtatttct

SEQ ID NO: 18993 - DNA, 3573 bp, Oryza sativa
  misc_feature (556)..(556): "n"=any one base of a, t, c, or g
  ref <308>: DATABASE ACCESSION NUMBER: AK069373
  ref <309>: DATABASE ENTRY DATE: 2001-12-06
gatcgttcctttttctctccccggtggaggaagcgaggtgtgcgccggcaccgagcggagcggtagccgcgcggcgccggcgacgagcggggctccacccatcctcctcctccgaccggcggctagcgggagcccgacagggcggatctggcgtgacgcggccctcccccccccccttccccgggggggcgccggcgtggcctcccgggacctccgccgctcctctcccctcctccggccgccatgcctctcctcctcgtcctccgaccgccgcggtgaggtcggggtggcgcggtccggcgtcgagcggtgtaggggcttcccggcgccggcggggcggcacgagcggcaccctgagctgcgacgagaaggcagcggagaggaggggttcgagatggcggcggcggcggacgcgacgacggcgatgacaatcgacttcctccgcgcgcgcctcctctccgagcgctccgtctcccgcgccgccaaggagcgcgccgaccagctcaccaagcgggtggcggagctggaggagcaggtgcgggcggtgacggcgcancgccggaaggcggagcgtgccgcgggggaggtgctcgccatcctcgagtccagggcctcgcccgcttctccgatgtggcggattccggttcaggttccgacgatgaggacggcctcgagtccgccgagagcggcagcaaggctcgctggggacgcggaggatgcgctgtcggggtcagagtttggaggcactgctactgcggcggcggccggggggctgtcgtggaagggccgcgccgcgagccacgagtcgcagaggcggcggcagcagcagcagcagcaactgaaaggcaggcatcttaggccgaggcatagccataggagaggctacttttacttggtggccgcggattcgtcgcccaagtaccacccagggcaatcgtgccggaaggtcaagaggaaggagctgaggcttcacactgaaggagacgaggggaaggacaatgccatggaaagtactgaggaggggcacgagagatcagattgtactgtctgtactgatgagcagcctgatattgatggtgaggtgagccaagatgggcagggttcctgtggcaatggaagagatggagatgatgacaatccatatactgttgagtatgagaaggatggggagatggagagagttcttgaaaagcaggcagagttaattgagcaatacgaggaagaagaatatgctcagagggagtgggaaaggaaattcaacaattcccgtgattcaactgcgggtgatgttgagctatgcaataagctaaatcaaattgaaaaggcttgtgagcagagggacaaagctgctcagatcaaggataaagaagtttctgaagtgggagggccaagtgacaaaaatctctttgccaatgacagtccctctgaatgtttgtcaactgattctgtttccggagtgccccaaaatgcaccagaagaaaatgctattaagcattgcaaagttactgagtgtgattatgattttggggaagctacttcaacagttgtttctgttgatagtggcccacagattaggaaggatgagttggtagacaaaagtttcactgaaattattgaaggaagtgggaataatatagagaagttgtcctcttcactacaaagaaactacgaaagtgtccaaaatgcaagacataatgaagatggagtagatgaaagctcagacggtggtccaggctaccatgtaaatgcttgctcttatgagcactacatcaacacaccatcagttgctagccgatcaagtgacacccctaaaagcaaagtctctgaatggagctcatcatgctttcacaaccacactgataaccagattgacacacagatgcatcaaccttcaagtgatggtgtgggaggtgttttggaggcccttcaacgtgccaagatgtcccttagagaaaagctgagcaaaccaagtccacctagcctggaaatgttagcacttccagcaccagagtatcactacgcaacggatgattcgccagtcagagacacagagctttcactttgcatgtcaacgtttcatagccaggaaatattggcgctaccagaaccagcagagtatcgcagcaggatcataccacgggatgacgtgaaagtgccggtgggccttgctggtttgttccggttgccaacagactcttttgctcaaaatgagttgtgttcagctgatggctatcattcaaggttcagtttgacagcaacaagtcgggaaaacctctcaaatcatttcagggcaaatctgtcactttcacgatatggctccgagttctcaccggatccttgtttcagtgctcgtaattctatgttgctgtcgacaccaacttttggtggatgtagcaacccagtgtcagatttcagagtaggcgacgcttatttcccctctgaagttccaaggtctagcaatagaagagggatgccttctggagatcaagggatgctgttccattttgctggcgattactgctcgaataagtggacgttatagctatgcattcttagaaatcatagtatagtctgagtaggatgctttttgtagtatcaattctgcctacggattgacagtgatgtatcacatctagtattccaatctgtgaataattggtgcttataagcagcagttttgtctgatattctctctgatatgccctcgtgacaaggtactctgatatcagtgaagttcaacatgacatctcttgtcactctgatatcagtgaagttcaacatgacatcattttcctcgcaaatgaagctttttcagtggatgggtacatgcatcgaacagggggaaaacggatagatcttgagtctctggtttcctcattcctctctgtctggcaacaccaaataccaatccatcatggcagatacacagttgtggcacatctcattgctgcataagccaccttcagtttgaggattgcagcacggttttggtgcctcccttgtgtcctttagttcatctgcacagtagccacatgactcgacgaaaaccagcacacacacacggacagttataaatttaaagaaaaatgcacttgcctggtgtccatatggccaacaggtaaggacttggatcatcaggctcccgttggtcgagtgctagctgtaagatcatttgcaatcagaaataatatcttgaagtgttttaaagaaagatggcacaatttctcatggtctcacctgttgcatgaggggatgtgaatctggaagttcataactgcgagcagaaccttaagtcagtaatagaaattaaaaaatattttgttcaggatgtatagaattacttagatggtgggctctataataaatgtaagtttaaacaggtatatgttcaagctaaataaaatatcagttcaacacttacacatagtgttctgtccgaagtctatgcacattctttagtttaggtacaggaattgaagctgcttcattgctgatagcaaccaatgcttttgtaatatcatcagattggaaatccttattgctttcttttatgcaattttccaagttttgagc

SEQ ID NO: 18994 - DNA, 1280 bp, Oryza sativa
  ref <308>: DATABASE ACCESSION NUMBER: AK069374
  ref <309>: DATABASE ENTRY DATE: 2001-12-06
ggtctgcctctctcaccaccaccaccgtgcgctgctccaagggggagatggcggtggtgaagtgcatcagggtccacgagctgggcgggcctgaggtgttgagatgggagcaagtggaggtcggggagcccaaggagggcgagatccggatcaagaacaccgccatcggcgtcaatttcatcgacgtctactaccgccagggggtctactccgctccactgcccttcgtccctgggagggaagccgttggagtggtgaccgctgtaggtcctggcctgactggcagaaaggttggggacgtcgtcgcctatgccggcaatcccatgggctcttatgctcaagagcagattattcccgcctccgtcgctgttccccttcctccttccatcgaccacaacactgctgccgctattatgctcaaggggatgactgctcacgttctacttcgccgtgtttacaaggtccagagtggtgattgtgttctggtccacgctgctgccggtggggttggatcactcctttgtcaatgggcaaatgcccttggtgccactgtcatcgggactgtttcaaatgaggagaaggctgcacaggcagctgaagatggatgccaccatgtcatcatttacacaaaggaagatgttgtcacaagagtcaaggagttcacagctgggaaaggtgtcaatgtggtatatgattctgttggcaaggatacatacaagggttcggtggaatgcttggcgtggcgtggtatgctggtgtcgtttgggcagtcgtcaggtaggcctgatcccattccgctgagcgatctggcaagcaagtcgctgttggtaacaaggcccagcctgatgcattacgctgctacccgcgacgagttgctggagtcggccggtgaggtgtttgccaatgtaggaagcggggtgttgcgcatccgtgtgaaccacacatatccattgtctcaagctgctcgcgctcatgcggatctccaggccaggaagacgaccggatccatcctgctcatcccagatgatgcatgatactccagtactagtgtaggagtagtagttattccagtacaaaaagtgtctcttctccaatgccgctgctgtttcttactttagtactcctgtatttttcatgcattatcaatcaggttcaggtttggttgccagttgatgtgtgtctgcgtgcgtttcgttgtggttttcatgttgacaggacaggacgtatactatacataaataaagggcagcatctttgaaataaagatcacttatactatt

SEQ ID NO: 18995 - DNA, 1527 bp, Oryza sativa
  ref <308>: DATABASE ACCESSION NUMBER: AK069375
  ref <309>: DATABASE ENTRY DATE: 2001-12-06
gtaatgactaatggcatttatatctctagagagggcaagtcgggtgtatataaatatgttttgtggcatcttccggaatcgattcttcttgttttgtttggagcagcctggtggcaaatgcgcttgatgcactcaacctggctaagggatccgcgattgccattgacatgcccatgaatgtgaatgctgttgtgatctacctggcaattgtgttggcaggctatgtggttgtctcaatcgcggacagctttgctgctcccgcaatatcaatgaggctaaagatatcagaagcaaaagcaattttcacccaggattacatccttcgagatgacaaggaattgcctttgtacagtagagttgtggaagctaaggcccctatgacaattgtgatccctgtaaggggatcaacaccaataaaaggactgcgtgctgatgatctgtcctgggaagattttcttgcaaaagttaaccatgccaagtaagtttgctacattctgatcatggtttcctttttttggtaaaatggccggtggctgcacgtggaatgactggtgtatctgcaaatttttgtcacattggatatgccgttactgcctaaattgtggagcagtcgccaaaattttccagtgcagcacgttcataatgtgtggtgtgcaaactccagaaaatttctgggtagttagcttggaaataatttacactacctctcagaaatacatgtttcttgaattaagtatgtattactatattatgcaataatgtgacaaaattgcagggctgataattataccgctgttgagcaacctgcctatgccttcaccaatatcttgttttcgtcagggactacaggggagccaaaagcaattccatggacacacttaacacctctgaagtcagctgctgatggatggtgtcacatggatattcgcagaggtgatgttgttgcatggcctactaacctcggttggatgatgggcccatggcttgtttatgcctctttactgaatggagcttccatggctctttataatggctccctgaatagttcaggctttgcaaagtttgtacaggatgcaaaggtgactatgcttgggttggtacccagcattgctcgttcatggaaaagtacagattgtacagctgggtttgattggtcaaccattagatgttttagctcatccggggaggcatccagtgtggatgattatttatggttgatgggaagagtttgctacaaaccagttatagagtactgtggaggcacagaaattggtggtggatttgttgctggatcattgctgcaacctcaagcattatctgcattcagtacacctgcaatgggttgtaacctgtttattcttgacaacaatggaaatccattaccacaagattctgttggtactggagaacttgcgcttgatccaaccttcctgggagcttcaacaacattgctgaatgctgatcatcatgaggtgtacttcagtggaatgccagaatggaacgggaaagtccttcggaggcatgggg

SEQ ID NO: 18996 - DNA, 1230 bp, Oryza sativa
  ref <308>: DATABASE ACCESSION NUMBER: AK069376
  ref <309>: DATABASE ENTRY DATE: 2001-12-06
gaccaccacacccctcgtctccgcaaactcgacgcgccactcgacagcgaccccgcagccgatccatcccgccgccgaagcagcagcaaccgccacggtgcgccgccgccgccggtaccgatgtcgacgagctccggcgccgactcgtccccgcccgtctcgggcctcgactacgacgacaccgccctcaccctcgccctccccggctcctcctcctcctcctcctccaccgccgaccccgaacgcaagcgcgccgcccacgccgaccacgccgacgccaagccgccttccccaaaggcgcgggcggtggggtggccgacggtgagggcgtacaggcggaacgcgctgcgggaggactccgcgagggcgaagctggtcaaggtggccgtggacggcgcgccgtacctgcgcaaggtggacctcgcggcgcacgccggctacgcgcccctcctccgcgcgctccacggcatgttcgcctcctgcctcgccgtccgcggcggcggcggcggcgacggcgagggtacaaagctcgtcgacttggtcaccggcgccgagtacgtgcccacctacgaggacaaggacggcgactggatgctcgtcggcgacgtcccctggaagatgttcgtcgagtcctgcaagcggatccgtctcatgaagagctccgaggccgtcaacttatcgccaagacgatcatccagataatcgatcctaccacacgcaacgatgcaatgccgcaattgatctgtctgtctgtctgtctgtctgaattagttcgtctgaaagtgtgtgcaatggaagaggcttggctgtacaggtcctccatgcatatgtacctataccgtagtaggatcagtgatcgatgagccaaattggtgtgtgtactgtacaggccacaagaacgaaaatatcctctctctttaattcaggtgtgctccctgctgccggatcacggccggcccggtttggtttttggacgacggcggcgaggatcgatccaagggaggcgccgccacgccgccgcggcggtgtactttaattttcaagttgtcagctactttctgtaatttgtttcatgatggttcggtttcctgtgacagccagcacttttgttgtatgtcaaatgcaatgtatacatgatataccggttgttatcgttgttgttgctgttgttgactttgttctgtccattgatgcattgcaaggtcaaatataggagcacaataatctgcc

SEQ ID NO: 18997 - DNA, 3201 bp, Oryza sativa
  ref <308>: DATABASE ACCESSION NUMBER: AK069377
  ref <309>: DATABASE ENTRY DATE: 2001-12-06
gactctcttctgtcaagatttctgcgcttttgccaattggacggcggcccacctcggcggctgtgctgttggtggcgactgtggcatcaaagcttgatcttggggaggctttggggaggaaagattgagattttggttggttttcttggttctagaggaggttttcttggttgatatttccgggtagctcgcccaatcagtcccaaatccgattttctgggctctgatttggagattatttttctttagctgtgattattggttcttcgctcctgtaccaaagctcccgtttttggttcttgtggggatcaaagagggagggagttcgatcttggaaagagtttaagtgtcaagattcgaagtggcattctgatttggattatgcaagctcatgttcttggattatctcttcgaagattagcctttgcgtagaccaaagtgacaagaggttttggtggtggatttgaggattcgggttggaattttccggtgagagagagttctacgagttgtggttgatctttgcttcggtggagaagctctggagttccatttgggaagctggaagcttccatttctggttcgagcaaaggtcgctttcagccacttggagagttccctcgtgtgaggattcgaggttgaaggagacccacccatggcgtctatttcggatagcgagacgacgaaccatgggagcatatgggatttggatcagaaccttgatcagcccatggatgaggaggctagccggctcaagaacatgtacacagagaagaagttctcgtcgattttgttattacggctcgcgtttcagagccttggtgttgtcttcggtgacttaggtacatctccattatatgtcttctacaatatattccctcatggggtcgatgatgatgaggatgttattggggctctttccttgatcatttacaccctcaccctcattcctctgatgaagtatgtttttgttgtcttgcgggcaaatgataatggccaaggtggcacattcgctctctattctttactttgccggcatgcaaagcaaaaataaagagatggctagagggacatgtgtataaaaagaactgtcttcttattctagttctcattggtacctgcacagccattggagatgggatccttactcctgctatatcagttctctctgcatcaggtggaataagagttcagaatcagaagatgagtacagatgtggttgtagtcgttgctgtgatcatactaattggcttattcagcatgcaacactatggtacagataaagttggatggctctttgcacctatagtgctcctttggtttatcctaattgggactattggggcactgaacatacacaagtacaacagttcagtcctaaaagcatataatccagtctatatctatcggtatttccgacgagggaagtctgagagctggacctcccttggaggaatcatgcttagcatcacagggactgaagcattatatgctgacttatgtcatttccctgtcttggccattcagattgctttcacgttagtggtgttcccttgccttctcctagcatacaccggacaggctgcgtacattattagcaacaaggaccatgtagttgatgccttttatcgctccattccagataccatatactggccagtattcatcattgcaactcttgcagcaatagttgcaagtcaagccactatatctgctacatactcgataataaagcaagctctcgcactgggctgttttcctcgagtcagtgtcgtccacacctcaaagaaatttctcgggcagatttacatccctgacatcaactgggtacttatgattctttgcattgcagtaacagctggattcaaaaaccaaagtcagataggaaatgcatatggaactgcagtggtgatagttatgctggtcacgacatttctcatggtcccaataatgctgttagtatggaaaagccactggatccttgttgtcatttttatcgtgctctcgttgatggtggagctcccatacttcacagcctgcattaacaaggttgaccaaggtggttgggttccacttgttgttgcaactacctgcttcatcatcatgtatgtgtggcatttctgcaccgtgaagcggtatgaatttgagatgcacagcaaggtttccatggcctggattttaggactcggaccaagcctcggcctcgtcagggtgcctgggcataggcttcgtgtacaccgagctggcaagtggagtgcctcatatcttctcccatttcatcaccaacctccctgccatccactcggtcgtcgtcttcgtttgtgtcaagtacctcccagtatatacagtcccaaccgaagaaaggttcatcgtgaagaggatcgggccaaagaacttccacatgttccgttgtgtcgcgaggtacgggtacaaggacatccacaagagagatgacgacttcgagaagatgctccttgacaggctcttgctcttcgtcaggctggagagcatgatggatgactattcggactccgaagacttcaccatgatggaggagaagacccagggatcaagcaatgcgctgctgctaactggaaaggctgggagcaacacaatgtgctccactggtgacctgagctactcatcacaggactccattgttccagccaagtcacccataagagggaacagcctgacaaggtactcgagccagacgttcggcgatgaactggagttcctgaacctggagttcctgaaccggtgcaaggacgctggtgtcgtgcacatcctggggaacactgtggttcacgcgcgccctgattcagggatcatcaagaaggttgctgtgaattatgtgtttgcattcctcaggaagatctgcagggagaacagtgtgatattcaatgttccccatgaaagtcttctcaatgtaggccagatatactatatatgaacattttttgttctttggtttctgattcagagagtgagcaggtgtgacaagagagtgagcaggtgtgacattctgctgtgtgtaggcctagatgaacttgtaaatgatcagttctagagtaaggttcattcatcatttttttcccctgtcagtatgaaatgatgctgtagatgccatgtcctctgtcagcctaaccagtaaaggagaagagaaaaggactgcataattcaaatgcttatttcaagttc

SEQ ID NO: 18998 - DNA, 1734 bp, Oryza sativa
  ref <308>: DATABASE ACCESSION NUMBER: AK069378
  ref <309>: DATABASE ENTRY DATE: 2001-12-06
ggtgcggtagcgcacctgcagagtgcagacagagacaaaggcgacgtctatcatgtccctgcgactgcgtctcgccttccgtctcctcttctgctactgcctcctcctcgccgccgctcatccgtcgtcccgccgcctcctccccctcctcgtcgtctccgccgccgaacgcacgaacgtcgccagcctccctggcctcgatggcgcgctcccttcccgcttcgaaaccgggtacgtgaccgtcgacgaggagaacggcggcgagctgttctactacttcatcgagtcggagggcgaccccggcgccgaccccgtcctcctctggatcaacggcggcaaccgctgctccgtcctcagcgcgctcttcttcgagatcggtccggtgaagctggcgatagagccgtacgacggcggcgtgccgcggctgcggtacaacccctacacgtggaccaaggtcgccagcgtcctctttgtcgactcgccggtcggcgccggcttctccttctcccgggaccccagggggtacgacgtcggcgacgtctcctccacgctgcagctcaccaaatttgtcaacaagtggttctctcaacatcgcgaattcctctcgaatccgttgtacgttggtggagaatcctacgctggaaagcttgtcccatttctcctgcagaaaatctcagaagatgttgaggctggagtcaagcctgtgcttaatctcaagggctatctggttggcaacccgggtaccggcgaaagcatcgattacgagtcgaaagtgccttatgctcacggagttggaatcatttcagataactatatgagactatactggagcattgcggaagagaggattatgccaatcccaagaatgcaacctgcgctcaagctttgaacaggttcagtgagctcatgggagaagtttcagaggcacatattttgtataaaaaatgcatctatgtatctcccaaaccagatgatggtactattggaagaaagattctggaggagattgtagtgggaaaccatcggccaccacgtcctccaatggattgtagtacctatcccaactatttgtcatatttctgggctaacagcaacaacacacgggaaaatcttggaataaaaaagggaactgtggatgagtgggtgaggtgccatgacgatggactaccttattctcaggacatagagagcagtattaagtaccatcaaaatcttacatctagaggctatcgtgtcttggtatacagtggcgaccatgattccgtggttccatttttgggtacacaagcctgggtaagatcactcaactacccaattgtggatgactggagagcctggcatatcgatgggcagtctgcaggattcacaatcacatatgcaaatgacttgaccttcgctacggtaaagggtggtggacacactgcaccagagtaccagccggagaggtgtcttgcaatgtttgggagatggatttcagagaaatcactttgacgattgtgtatatcagttatgatgagagctgctttgattattatctaatgaatgatacatcccttggccagttcattgggcaaggaggtagctcaggtgaggcgcattatggtagaacatgccacagaggaccagaacaagctttagatggttactaaagtgaatatgaaaggatacaaataatcctgagatctctcagtgatactctcttcgtttttttaatagatgacaccattaactttt

SEQ ID NO: 18999 - DNA, 1419 bp, Oryza sativa
  ref <308>: DATABASE ACCESSION NUMBER: AK069379
  ref <309>: DATABASE ENTRY DATE: 2001-12-06
tgcttgcgattttgggtgattagctccagcagcagataggtgattagttctttcagactttcaccgtttcacgtcgccggccggcgggacacccggcaaatggcgcgcgccggtgcggtgctcgtggtggtgctcgccgcggcgtcggtgctgttggcgccgtgggcggcgacggcgcagacatccagctgcgacgacgcgctgcccccggcgctcgccggcaactactccgggctggcctgccgcccggtctggaacaacttcgtcctccggtacgcgcaggggaaggacaacgtgctgcgggtggtgatctcgtcgatgtacagcacggggtgggtggggatggggttctccaaggacgggatgatggtgggatcgagcgccatggttgggtgggtcggcaagacggggctgtcccacgtcaagcagttcagcctccgcgggaagacgccgtcgcaggtggtcgccgacgagggcttcctccagtccaaggaccacgaccacgaccgcctcactgagcaccagggcaagacgtccttcaccttcgatttcaccactggcggctcttcaggttcgtcttacccggatggtctgaagagggcccatggggcactcaacctgtttgcctggggagttctcctgcctatcggtgctatcatcgcgcggtactgcaggagatgggaccctctgtggttctaccttcacgccggcatccagcttgtgggcttcatccttggtctggctggcattgtggccggagtatcgttgtacaataagatccaagcagatgtcccggcgcataggggccttggcatatttgtgcttgtgctgggtatcctgcagattctggccttcttcctaaggcctcacaaggactcaaaatatcggaaatactggaactggtaccaccattgggtaggcaggcttgcgctcttctttgcagccatcaacattgtccttggaatcaaggtcggagccgccggcaactcgtggaagatcggctatggcttcaacctggccatcctcctgatcaccattatcaccctggaggtcctgctatggacaaggtggaaaaacaacaacagcagttcgatgccaacatattaagtgtgattaaattaggttgatcttgtcgctgtaacttataactgaaggccctattcttccattagtttcttttaatggttgtaccatttgtgtgatgctgttgctttgatgtttctgcaagatcttttagcagaaaccaaagatgtagtacaagactagtcagttgatgtcttgatgatgagctgtgacgtgcaaaatgacgaggtgaacacaactggtaattgtaatgcagtggcaaaggtgtagtattatactccctccgtttcaagttgtaagatgcgtttcaagttataagatgttttgatttttacc

SEQ ID NO: 19000 - DNA, 2319 bp, Oryza sativa
  ref <308>: DATABASE ACCESSION NUMBER: AK069380
  ref <309>: DATABASE ENTRY DATE: 2001-12-06
ggggagagtgtcagtgactcagtagagagagaggggggcagcggaagaatggggcggtggtggccgccgacgtcggcggcggccgcgacggcggagccgcggtcggtgcagctgctgctgctgggcgtcgccctcgtcgctgcctccttctacgccggcaccgtcttccgctccccctccgcccccgcgctcttactgcccccatccgcctcccgatcgcccgatccttccagaaccccaggtgctccaaagtttacaaacagagtctctctttcttatcgaacaaaaccaatctcagttccagattatggagttgatgtttgtcctttgaaatacaacgagtatattccctgtcacgacgcatcctatataagccaattaaagaaactggatagatctaggcatgaggatcttgaaagtatttgcccaccacaagagaaacgcttgttctgtttggtgcccccaccaaatgactacaagatacctataagatggccaacaagtcgggactatgtttggcgtagtaacgtcaaccattcacgccttgctgaggtaaaaggaggacagaactgggtgcacgagaagggtaagctttggtggtttcctggaggtggtactcacttcaggcatggtgcatcagagtatatagagaggctagggaatatgacaacaaacagtactggtgatctccgctcggcaggagtggtccaagttttggatgttggatgtggtgttgcgagcttttctgcttaccttcttcccctagacattcatactatgtcatttgctccaaaagatggccatgagaatcaaatccagtttgctctagaacgtgggattggtgcaatgatctctgtgttggccaccaagcaattaccttatcctgaaaatgcatttgaaatggttcattgttcccgttgtcgtgttgactggcatgaaaatgatggaatattgctgaaagaggtagatcgtcttctgcggcccaatggatattttgtatactctgctccaccagcttatagaaaagataaggactttcctgttatctgggagaagttaatgaatataacaacatcaatgtgctggaagcttattgctaaacatgttcagaccgccatatggatcaagcctgaagatcaatcctgccgacagaaaaatgctgatacgaaactactgaatatctgtgactcgtatgataattctccaccttcatggaaaattccattgatgaactgtgtgagattgaacaaagaccagtcaaatatgcagaaactgccttccagacctgaccgcctatcattttattccaggagtttggagatgataggagttactccagagaagttcgcaaagaataacaagttctggagggaccaggttagcatgtattggtcatttcttagtgttgagaagactagcatccgaaatgtcatggacatgaatgctaatattggtggatttgctgtggcactaagcaatgatcctgtctggattatgaatgtagtaccccatacaatgagcaacacattgcctgttatctatgatcgtgggttaatcggttcttaccatgactggtgcgagccattctcaacatatcctaggacatatgatttgctgcatgctttccacatcttttctcattaccaaagtcggaaggaagactgttcattggaagatatcatgctagaaatggaccgtatcattcgccccgagggttttatcattattagagatgagaatgccatcttgtcaggaatcaatgatcttgcaccaaagttcctttgggatgtcaccacacatatgttggaaaatgaggaaagcaagccggagaaagtcttggtttgcaggaagaaattctggtccatcgtttgagtgagcggatactattcaggccagttctttccagatgagtgtcctattattgaaaaagcagatgtcattcggcaaaaggaacacagaaaaatacatggaaaagaaaagaggacaacaccgggtttccttcagcaactatttagattcgtatttcagtgcttgagtatatgtcgatttttctgactttaaaaagggcagaccaaaggtgtaaagatgcaagatgactttttcacttgtttgatgacgatgctagtatgtgttatgtactttctaatttctaactagtctaagttaacctaggtgttttagcaaaattttgctggtgtttctgttcttgtatgggagcacatgtggtactactacgactgaacggcatgaaggctaaatttacagtggactttgagggataattatttcattatctgtttaatttgatttattatcctt

SEQ ID NO: 19001 - DNA, 1092 bp, Oryza sativa
  ref <308>: DATABASE ACCESSION NUMBER: AK069381
  ref <309>: DATABASE ENTRY DATE: 2001-12-06
ggcgtgctcctcctcctcctcctccgattccaatccaatccaatccgattcagaagtagagcgagcggcggctgcggcgatggcggtggcggcggtgcgggcggcggcggcggacgcggcggtgacgttcctgtgggtgctgtgcgtgtcgacgctgggggcgtcgacggcggcggtgacgtcgtacctccgcatccacgaggggatccactacgcgctcctcgtcaccgtctccctcctctccgtgctcctcttcgccttcaacctcctctgcgacgccctcggcggcgccagcttcaaccccaccgccctcgccgccttccacgccgccggcctctcctccccccgccactcctccctcttccccctcgccctccgcttccccgcccaggccgcgggtgcggtgggtggggcgatggcggtctcggagctgatgccggagcagtacaagcacatgctcggggggccatcgctcaaggtggatctccacacgggtgccgccgccgagctggtgctcaccttcgtcatcaccttggccgtgctctggatcatcgtcaaggggccccgtaatcccatcgtcaagacctggatgctctccatctccaccgtttgcctcgtcctcaccggcgctgcctacactggcccatccatgaaccctgccaatgcgtttggctgggcatatgtgaacaatcgccacaacacatgggagcaattctacgtctactggatatgcccttttgttggcgctgttcttgctgcctgggtcttcagggccgtgttcccaccaccggcacctaaacctaaggccaagaaagcatgaggaaatcaagcacaaacttcaactcaggagttggtacagatgttgggtttgaagaacccaacattatttattagctagaatggtacaaggaataatcctttccaccatatttaattcaaagtaatttaggtaattagcttcggaacactgacaaacccaagagcatgcacattaatttgattggacgacctgaatgtaatttcaatcattcattggtcttgtttgctcttgaactggtggatggtatgaatggatattataaatttatcagt

SEQ ID NO: 19002 - DNA, 2203 bp, Oryza sativa
  ref <308>: DATABASE ACCESSION NUMBER: AK069382
  ref <309>: DATABASE ENTRY DATE: 2001-12-06
gttctcaaggacggcaccatcgttgacaagcttgacgtgtccaggaaaggagcttacatgtttggtcgaattgatctttgcgattttgtattggagcatcccactatttctcgctttcatgctgttttgcagtttagaaatgatggggaggttttcctttatgatcttggaagcacacatgggtccttcatcaataaaactcaggtcaagaagaagatatatgtggaaattcatgttggagatgtaattcgatttgggcaatcatcacgtttgtacatattccaaggaccatctgagctgatgccccctgaaaaagatatgcagaagcttcgggatgctagagttcagcaagatatgcttgatcgtgaagcttcccttttacgtgcaaaaaatcaagcagctttagcagagggtatctcatggggtatgtctgaggatgcagtcgaagattctgcagaggatgaagctgatgagatcacatggcaaacctacaaaggtcaactcactgatagacaggagaaaacacgaagcaaaataataaagcgattggaaaagattaccaacatgaagaaagaaattgatgcaataagagctaaggacatttctcaaggtgggttaacccaaggtcaacaaacacagattgcacggaatgagcaaaggacatctcagcttatggaggagctggaaaatttagaagaaactttgaatgacagtatacgggaaagtcttggtgctcgcactggaaactcaaatcgtggtagtcataaagcaagtcttgaggaagaagatgacattcttagtgacgaagatgacttctatgatcggacgaagaagaaatcttctagtcataaatccagtgagcagcaagtggagactgctgatagtcttcttgataaaaaagataccataaccagcgatattgaaagtaaaaagaaattggttgaagaagagaagaataagttggcaaaaagtgagaatgcggatgttggggacgaccttgatgcttacatgagtggattatcatctcaattagtacatgacaagattgcccaaatccagaaggagctttctgatcttcaaactgagctgggcagggtggtttacctactgaaaatagctgatcctatgggagaagcagctcgcaagagggatctcaagccacgagaaacaaaatctccagcatctaatgatagtctaagaccagagtccagaaagcaaaacaaagttgcacaaaacaaagcctcaacagaggagaagcttaaggaatcttgtgctgaaaaaacacaagtggataaaccagccgaggaagagaagggtatctccacaaaccaagaaaatggcagcaaacctgcattctccattccaaaacctcagtggcttggtgacaagaggaccgtggaatctgaagagaactgtataaaagaagaaagtgccaatgaagaggagactgataattttgtggactacaaagatcgaaaaactattctttcaggttccgccaatggaaaagaccttgaagaagctgctcctgggcttattttacggaagagaaagtctgatcaatcagcagccaatgaggtggaatcttcagttgaatccgaagcatctgctgctgatgctgtggccctcttgctgaagcacaaacgtggtttacaaacttctgaagatatggaggatgagaatgaaccacaagctagcaagagaaaaagtaaaaagtcgaaacaaaaacgcgtactgggtccagcaagaccagattttctggacgcaggtccagatcatgaaacatgggtgccacctgaaggtcaaactggtgatggccgcacttcattgaacgatcgtctgggctactgaagttttcacattcaagactcgactcgatgcgtcatgaagaagaattcagtagcgacgatcgcggtattactgcagctagtccttgagcatgcgtttcatataacttcaaatggaaactggcccctttttattagttgctcgccatttcctgagactgtagtagaggctgtgtaagattgcgaatttgtagaaaatgagagttgaaatgacaggtggtggatctgtatgggaatggtgtcacctgtccaggggtcacaaaggatgcaaatgtcattttcagttcgctacgagaatggggtgggattttgtaatgtacatcatcgtcccatagtataacggttgtttggtgccg

SEQ ID NO: 19003 - DNA, 2037 bp, Oryza sativa
  ref <308>: DATABASE ACCESSION NUMBER: AK069383
  ref <309>: DATABASE ENTRY DATE: 2001-12-06
gactcccaatggggagtaggagcagaggagggagacacctcctcctcctcctcctgcttcacctcctctccctccattcctctctgctaccatgggcggcggtgtcggcggcgggagggggtggttccggagacccgtacgtcggcgtgacgatcgggacggcggtgacgaacctgctgtcgccgtcggacctccccgagttcctccgcgcgcagcgcatcacccacgtgcgcctctacgacgccgacccgcgcatgctgtcggcgctagcgtcgtcgggcgcccgcgccttcgtcggcgtccccaacgacgagctcctcgcgctgggctcctccccggccaccgcctccgcctgggtcgcccgccgcgtgctcccctacgccggcgccaactccagcaccccggggctcatcgccgccatcgccgtcggcgacgaggtccccaccgcgctcccctccgcgctccccgtgctcctcccggccatccagtccctcgctgccgcgctcgccgccgccaacctctcctccatcccggtctccacaccgctccccttctccgtcgtcctcgacccgttcccaccctcccaggccttcttcaaccagtcgctggccaagtcgttcattctcccgctcctctcccacctcgccaacacctcggcgccgctcatgctcaacctctacccgtactactccatgatgcagagcaacggcgtgatcccgctcgacaacgcgctgttcaagccgctcccgccgtcgctggagatggtcgaccccaacacgctgctccactacaccaacgtgttcgacgcgatgctcgacgcggtgcacgtcgccgtgaagaacctcaacgcgaccggcggcggcgggccggtgccggtgctggtcacggagaccgggtggccgtcgtacggggaccgcagggcggagccgtacgccacgcgggacaacgccgacgcctacaactccaacctcatcaagcacgtcaacgacaagcccggcacgccgatgcgccccggcgcgcaggccagcgtctacatctacgagctcttcaacgaggacctccgcccgggcccggtctcggaggcgaactggggactcttccacggcaacggcacgccggtgtacctgctccacgtgtccggcgccggcggcttcctggccaacgacacgacggaccggacgttctgcatcgcgtccgacgacgccgacgagaaggcggtgcaggcggccatggactgggcgtgcggccccgggcgcaccgactgcacggcgatccagccagggcaaggctgctacgagcccaacgatgtgcggagccacgcctccttcgcattcgacagctactaccagtcgcagggcaaggccgctggctcctgctacttccagggcgtcggcatggtcaccaccactgatcccagtgagtatacccctcctcaacactgccatttcttcctcattgcttatgcatttaggttctttcttcttttcatgttttcagttttaacagtttttgatctgttcattcatgtttgcttggaattggaaggatttagtagaagtgcttgcggttgggtgataattctgtgacattgagtgaggattgtggttaagaaatgcacttgttaatcagctgacgagtgacagttcgagtagctttaggattgactgggtctgggatttgctcatttgcacagtagtttctcgtgatccactttaggtctataaagaattgcaactggccaggccacactggaaacgtttctctgaagatctggggtttcgatttcaagtaggagagacgccattgtcacgcccgaaaagtagacggcattcattcatggaagtccattcaggaaagttgtgcggtttgtcttttaattggacaacacaagcgcacaggtatttattcggttgattgttaggagaaaggttgcttttccttctaggtaagggtaggagaagtgcagcaagcaaccatgtgtggttttatgatttatctaggaggaaaagaaatgctagattcatctaagattggttc

SEQ ID NO: 19004 - DNA, 909 bp, Oryza sativa
  ref <308>: DATABASE ACCESSION NUMBER: AK099090
  ref <309>: DATABASE ENTRY DATE: 2002-08-28
gagcaggttcgccgtcgccatggcgtccgcccgcgccgcgctcctccgccgccactgcctcgccgcagccggcggcgccaaccccgtgctcttctccggccatggcctccgctaccgcaagctggaggtcatcctcaccacgacgattgataagctggggaaagcgggggaggtagtgaaggtggccccaggacacttccgcaaccaccttatgcccaagatgctcgctgtcccaaacattgacaaattcgctctactcatccatgagcagcgcaagctttaccaacgtcaagaggaggaggtggtgaaagaagtccggcaagaagatgatgatgctaagcaacaggaagagaaactgaaggagtatcaaacggcagcaaagtgtcttgataatgctctcttggtgttgaggagattcatctcagttgggaatgaactgcggtctcctgtgacaaaggacgaaattgtttccgaggttgcaaggcaactcaatatcaatatccacccagacaatcttcacctgccgtcaccattggcatcccttggggagtttgagctgcccctccgtttgccaagggatataccacgcccagaaggcaagctacaatggactctaacggttaagatcaggagaaaataagtacaatccatggggtaactttgttccccctccaaggaggtgaatgatacgaaaacgttgcagaattcagagcaagagacttcagataaggtttgctacaaaattcagtcccattttgaaaatggtggactgcattctgcggtgtggtttttcgaacctgcttatagacattcttggcctttccttgagaggatgatcggtactagccattttcattcgtgaatactgaataatctttctggaatagatatgttgcaacagtttttagc

SEQ ID NO: 19005 - DNA, 1158 bp, Oryza sativa
  ref <308>: DATABASE ACCESSION NUMBER: AK069384
  ref <309>: DATABASE ENTRY DATE: 2001-12-06
gagtctcacaaatagctcaccagttctgacaacggcgtgagcagacatcacctgatctcaccaagaacatggccgccggcgagaggccggcgaccatgcgcgccgtccagtacagtggctacggcggcggcgccgctgcccttaagtttgtggaaatccctgttccttctgtgaagaaggacgaagttctcgtaaaagtagaagctgcaagcatcaatcaatccgatttgatgactcagaaagggatgatgcgcccctttcacccgaaatttccatttattccagtaaataatgtgtccggagagatcgttgaggttggctctgcagtacgcgagttcaaagttggtgataaagttgtctccaaactagacttctggacagcagggggccttgctgagtacgtggccacatcggacaagctcaccgtcgctcgccctgccggaatctccgccgctgacgcggcgggtgtgcccgtcgccggcctgacagcgctccaggcgctcaaggccatcggcaccaagttcgacggctcgggcaccagcggcggcgccgacgttctgatcaccgcggcctccagcggcgtgggcacgtacgccgtccagctcgccaagctcggcaaccaccgcgtcaccgccacatgcggcgcgcgcaacctcggcctcgtcgctggcctcggcgccgacggggtcctcgactacaagaccccggagggggccgcgctgtcgagcccctccggcaagaagtacgactacatcgtcaacatcagtaacaagaacaagtggtcggtgttcaagccgcgcctgagcagccatggcagggtcgtcgacgtcgcccccaacttcggcaacttcgtggcgtcggtggtgacgctgttctcccggaggaagaagctgtcgctggtgagcctgaagatgagcaaggaggacctggggttgctgctcgagctgatgcgggaagggaagctcaggacggtggtcgactcgcggcatccgttcgagaaggcggcggacgcatgggcgaggagcctcagcggccatgccactggaaaggtcatcgtggagatgtgagattaagattcagcgatggctctaagctttgctgtcatttaaatgtatgtgctattaccatatttgatcatgccatcggtacacaacaatc

SEQ ID NO: 19006 - DNA, 1592 bp, Oryza sativa
  ref <308>: DATABASE ACCESSION NUMBER: AK069385
  ref <309>: DATABASE ENTRY DATE: 2001-12-06
gctccctctcatcatcatcatcatcctcctcctccctatccccttctcccccctctctctctctctccaccccgcgcggcggccgcttccgatccctctccgaccgaccaagcgccgcctccaagaatggggagctcggagaagaacggaactgcttatggcgagtacacctatgctgaactggagagggagcagtactggccgtctgagaagctgaggatatcgatcaccggagctggtggtttcattggatcccacattgctcgccgtctgaagagcgaggggcattacatcatcgcctccgactggaagaagaatgagcacatgactgaggacatgttctgccatgagttccaccttgttgaccttagggtcatggacaactgcctcaaggtcaccaacggcgtcgaccatgtgttcaaccttgccgctgatatgggtggtatggggttcattcagtccaaccactctgtgatcatgtacaacaacaccatgatcagtttcaacatgctcgaggctgcacgtatcaatggtgtgaagaggttcttctatgcctcaagtgcatgcatttaccctgaattcaagcagcttgaaactgacgttagcctgaaggaatctgatgcctggcctgctgagcctcaagatgcctatggtttggagaagcttgcaactgaggagctctgcaagcactacaccaaggactttggcattgagtgccgtgttggccgcttccacaacatatatggcccctttggaacatggaaaggtggccgtgagaaggcaccagctgcattctgcaggaaggctcagacttccactgacaggtttgagatgtggggtgatggcctccagacccggtccttcacattcatagatgagtgtgttgagggtgttctgaggttgacaaagtcggacttccgtgagccagtgaacattggaagcgatgaaatggtaagcatgaacgagatggctgaaatcattctcagcttcgaggatagggagctgcccatccaccacatccctggacccgagggtgtccgtggccgtaactccgacaacaccctcatcaaggagaagcttggctgggcacccacaatgaagctcaaggacgggctgaggttcacctacttctggatcaaggagcagatagagaaggagaagacccagggcgtcgacatcgcgggttacggctcatccaaggtggtgtccacccaggccccggttcagctgggctccctccgtgctgccgatggcaaggagtaatttcaaagctgctacaccatgaagatcaatcagctcctctcagcttgatcgtggccataccttacttcgctacagatagctcacagaaatgaattcttcttggaaatcttgcaacctttcagaacaacaacagccgttcttcctgtcgttataactcatatgcagtacaccggtttcttgtgtttaaaaagctatactcgagatttcttcctctttttttttttcgcgtcgtgttggaaattcttcgtatggattacattttgtcatatgaacaatgaaacaatgggaatgctctgcattacctttatgaatagatgatgtgttcttcc

SEQ ID NO: 19007 - DNA, 1192 bp, Oryza sativa
  ref <308>: DATABASE ACCESSION NUMBER: AK069386
  ref <309>: DATABASE ENTRY DATE: 2001-12-06
gagagtgagagggaccgggacaaggatcagctgctgctcatcccggtggcagccgaccgcgccgccgccgctgttgccgccggaggccacgaggaggagacgtcgtcgctgctgccggtagggatcgtggcggccggctcgccgccgccgctgccgtcgtcggcgcgcggccaccatatccaccgccaccgtaccggcatcgaggtgaggcattttcaagggtgatacgcagctgggcatggaagaagttcatgactggatgtgtcatcttgctccccattgccatcacattctacaccacctggtggttcatccgcgtcgtcgacggcttcttctccccgatctacatccatctcggcatcaatgtcttcggtttggggtttgcgacgtcgatcaccttcatcttcctcgccggcgtgttcatgtcgtcgtggctgggagcatctcttctcggcctcggcgagctcttcatcaagaagacgccgctggttcggcacatctactcttcttcgaagcaaatcagcgctgcaatctcaccagattgatttcgtgctcaattcagaccagagctcacgggcgttcaaggaggtggtgatcatacgtcacccgaggataggcgagtacgcgctgggattcatcacgtcgacgctgacgctgcgcggcgtcgccgacggccgccgcggcggaggcagtggcgccggcggcggccgggagctcgcctgcgtgtacgtgccgacgaacaacctctacctcggcgacatcttcctcatgagccgcgccgacgtcatcgtccccgacctctccgtccgcgaggccatcgagatcgtcctctccggcgggatgtcggtgccgcagatcatctcggcggtggagggggtcgtcgggctcggcggccatggccggccggtgaagtctccttaggctatggagtatggagaatggtgtcaagttgtcaacttcacactcggtataattttgagcttctgtatgattagatgattagttatagagaggaggtttccagcattggtaggatggaattatgcaagcataaaatttgatccactgtgagacagcattaagcttgtatacagaatttgtgatatttccttttgcatcggcaaattattggtttgcaatttgttttttggtacagtttgtagttgaagcaatatacaagcctcattacagc

SEQ ID NO: 19008 - DNA, 3250 bp, Oryza sativa
  ref <308>: DATABASE ACCESSION NUMBER: AK069387
  ref <309>: DATABASE ENTRY DATE: 2001-12-06
ggaacttttctgaacttctgaactttccgcgtcttcttcgtcttcgtcttcgtcctcctcctcccaccaccactataatctcctccactcccattccctccatctcccccccacgctcgcgagcttcgcggagtcgggagatcgaccgccgcctcccccaccacacatccgcccgcggcggcgggttgcgcctgcgccggccttctcggagtcccgcctctccactccggctcactctctccgggctagcccaaaggatttaaaatggtagagaatggtgttctggagcaaccaaagggggtgtctcgaaataggccacgtgctcagtcgaatgatcatccagttgatcctggatacctcccagagttgacatgggaacacaagcttagcaatattggctatgatttgccatccttcagacttacatggagagagacattccagttggctggccttggtcttcgtcttggccgacacatccttgaagaaacatcaaaaggacgtgctgctgtgattgatcccatgaagaagcgcattgcaagatctggtcagggtgttccacttggcggcattggttcaggaagtattggaaggagctacaaaggcgagtttcaacgctggcaattgttcccgggaacttgtgaagagagacctgtactggcaaatcaattttctgcgttcatttcccgcaaagatggtagaaactattcctcagtgctgcatcctgggaaaccagatttgccaaaaggaagtaacatttcaggaattggatcctgggactggaatatgagtggacaaaactctacgtaccacgctctttaccctaggtcctggacgatatacaatggagaacctgacccagatgtcaacatagtgtgtcgtcagatttctccaattattccacataattatcaacagagcagctatccagtttctgtattcactttcacagtaactaactcaggcaatacggctgctgatgtaactttgctttttacatgggctaactctgttggtgggaaatctgaactaactggatatcactccaattcccctatgatagaaaaggatggtgtgcatggcattctgttacatcacagaacagctaatggacaaccaccagttacttttgccatagctgcacaagagaaagaagatattcatatctcggaatgcccttactttataatatctggaagttctgatgcattttcagcaaaagacatgtggaattatgtgaaagagaatggatcttttgataaccttgatctcaccaaaacatcgatgtgctcaaaacctggattatcaataggggcagctattgcagcttctgttaagctgcctccccagacaacccagaatgtatcatttgcacttgcctgggcttgtcctgaagtgaaattctccagtggaaaaacctaccataggcgttatacgaaatttcatggcacggataatgatgcagcagcaagccttgctcatgatgccattctagaacataattcttgggaaaggcaaattgaggagtggcagaatcctattttgcaagatgagaggtttcctgactggtacccggtcacacttttcaatgagttatactaccttaatgctggaggaactatatggactgatggattgccaccaattcaaagcttgacaggtattggtgaaaagaagttttctctggacatgcaaaatggggacgctgatgatgccaatgggataatcccacggaataatactgccagcgacatccttaatcaaatggcatcagtactcgagagaattcatgcatctatggaatcaaattctgccataggaacaactttacttcagggtgaagagaatattggccaattcctctaccttgagggcattgagtattatatgtggaacacatatgatattcatttctatgcatcattctctctgatcatgctgtttccaaaactccagctcagcattcagagagatttcgctgctgctgttttgatgcatgatcctgaaaagctcaggatgttacatgatggaaaatgggttgcgagaaaagttcttggtgctgttcctcatgatcttgggctatatgacccctggttcaaagttaatgcatatacgctctataacacagatcgatggaaggacttgaacccaaagtttgttctgcaagtttatagagatgtggttgccacaggtgacaaatcctttgctcgtgctgtttggccatctgtttatatggcaatggcatatatggagcaatttgacagggataaagatgggatgattgaaaatgaggactttccagatcagacttatgatgtgtggtcaatggctggtataagtgcgtactgtggtggactttgggtggccgctcttcaagctgcgtcagccttggcacacgaagttggtgacaaagcgtctgaaaaacttttctgggacaagtatgagaaggctaagtctgtttatggcaagttgtggaatggttcttacttcaattatgatgatggcgacaacataatgagtgcatccatccatgcggatcaattggctggacaatggtatgccaaagcttgcggtctcttcccaattgttgacaaggataaggcggaaagtgcactagaaaagatatattctttcaatgtgatgaaattcaaggatggtaaaaggggagcaatgaatgggatgtggccagatggcacagtggacatgtccgcaatgcaatctcgggagatatggccaggtgtgacatatgcacttgctgcaaccatgattcaagaaggcatggttgagaaggggttcaaaacagctgaggggatttatcatgctgcctggtctccagaaggacttgggtactcatttcaaacccctgaagcttggaacaatgacgatgaataccgatcgttgtgctacatgcgccctcttgcaatatgggccatacagtgggcactatcaaacccaaaactccacaagcagactgcagatatcccacaggactctttcccaaagaaccagttctcgtatgctcggattgcgaagttgctgcatttacctgaagacgaatcgccggagagtttccttcgagtgatttatgagattgttcgtaacaggtataggtcctgatggaagggcaaatatgctccttattgttgggtgtccattggccgtattttcattgttggttgagaacatttgttgctgttgatcagcacacttgagtatatagtttatgataataaaactttattaatcgtgg

SEQ ID NO: 19009 - DNA, 942 bp, Oryza sativa
  ref <308>: DATABASE ACCESSION NUMBER: AK069388
  ref <309>: DATABASE ENTRY DATE: 2001-12-06
gtggcaagcctcgccgacgccattgatgctttacaagcgttggtgagaggccaggagaggcgtggagagggagagttatgagcgcaaggacattacgacaagatcgttattcctaatgggtgagataggcataaacgattacaaccaccacttcttccagaacagatccttcacagctgagatcaaacccttagtgccactagtgattttaaagattgaaaatgccaccaaggttttgatcgaccttggtgccaagaccatactggttccagggatcccgccaatgggctgcattccgaggtttctcaacttgctccctagcaagaaccacaatgactatgacaagcttggatgtctgaagtggctgaacgacttctctcagtaccacaatcgtgctctcaaacaaatgttacagaggattcatcatgatcctaccgtcaccctaatctatgccgactactatggagcaatgttgaagatagttcgaagccctcagaacaatgggttcacgaaggagagcgttctgagggcgtgctgtggggtgggtggggcctacaacgccgactcgctggtgtgcaacggcaacgccacgacgtcgaacctgtgcacggagccgtccaggtacatctcctgggacggcctgcatctcaccgaggccgcctaccactacatcgcccgcggcgtgctgcatgggccgtacaccgagcctgccatacccaccagatgcacagcctgatcatacccacacattacaccttgtttatcccagatgtataaccagaaatacttaaatttaaaacggatgcaaaattagtaaattacctttatactccctttgctaagttgattgtttgaattttcactttgatttgtacatttttttaaactactagacgatgttttataaaacaagtccttccgctacgttgatttttgtaaacc

SEQ ID NO: 19010 - DNA, 2667 bp, Oryza sativa
  ref <308>: DATABASE ACCESSION NUMBER: AK069389
  ref <309>: DATABASE ENTRY DATE: 2001-12-06
cagctcgatctctctctcgaaaagctcccactaaacaaaggcgaaaaccaaccgagaacctgcacaaagtacacaagcataatcctaatcccttcctcctcctagcccaaaaagcaagaatccgcgcttaagtttcttcctctcttcccctcccctcctgcctagcatcagattcttctcatgtcggttttttctccgcccggttaatcatttcccaccatttcctttctctcccggcgccggtggatcgagctgcagtttctttttggttcttggcacctactaggctactaccattgttgctgttgtccggtgtacatccacaacttctttgcctgcctgctgttccttttagtttctccaagctcctgccaacagcagcacagcctgtgtgtcaccactcaccagggaggaggccccactcctcctgtcttgttgctcactcactctgctggcagcttcccctaggttgtcctttgcttgccctgggtttggttcttgggtccatccatcttcagagttttcctttttgctgaatcctttgatctcggatggatgatggccggttcttgataagccttgctgcaggttctcctcccgagaagatgtggtaacatttcttggcttcttgcgttttggattggaggcaagattgcttgtgaggatcttggttagcctgaaacttcgtttgctgttcagaattcggggggctttgttggttcttggcctcttgcctgttggttgggtttgaaggaggctgaagagagtttgccaatggagccaccaagtgggttctgggcctccctggggagcttcctcaagttcttgccctacttctgcggcctcctcatcctgggggtcatcaaaggtattttgatatgcccttgggcatgccttattatggcaattggattatctgcgctaatcctgggcttatggcccatgcatgtgatttggacttactactgcattatcagaactaagctggtaggacctgtagtaaagcttctgctccttattgctgccactgcaaccttaatcttatggttgatagttggcatccctggaagcatcttagctggattggtgtatggctttctagcaccgataatggcaacatttggtgcggttggaaaaggaaaagaaaagccgtttgttcattgttttgtggatggaacgtggagtactatcactgggagctgtacgatagtcagggacgtgaaagacctgcttttccactcctatttttctattatggacgatcttcgtcttcaggcacctcctgataacaagccatatgagataagattgctcgatattcctggtgctttattatctgctgcatgtggactcatactggatggtataatgttcacgctgattgccatctacaaatgccctgtgatgcttttcaaaggatggaaacgactgattcaggatatgattgggagagagggaccttttctggagacagcttgtgtgccgttcgcaggtcttgctattcttctctggccatttgccgtagtgggagctgttctcgcctccatcctatccagtattcctttaggcgcatttggtgcagtcgtggcttatcaggaatcctccctaaagatgggcttatcttatgttgtctcatctgtgtccatctttgatgaatacacaaatgatgtgcttgacatggcaccgggatcttgttttccgaggttgaaatataggaagagagaagattcttcacatggaggtagcttatccaggccaacctcattcaacaaagaaaagcaagagggaaagaaacctccagcacgtgttacatcttttaagaacagtattgaagacttcaatccattcaagttgctagaacacctatttgtcgaatgcaagcaccaaggggagactttggttaatgaaggagtcataacaatgaaagatatcgaagagacaaagtcgggaaaagttggcactggagttcttaatgttggtttaccagcatatgtaatccttaatgcactccttcggtccgcaaaagctaattctgttggcctactcttaagtgatggctctgagattacatctgacaataggcctaaacatacactctatgaatggttctttgaccctcttttggtcatcaaagaacaaattaaagccgagaattttacagaagaggaggaaaaatatctcaaaatgcgagttttgttgattggtggccctgatcgcgtcaagggcagtcttcccgatgtgccatcactggatgagcgaaaaaaggccgaaatagacgcatttgctcgcagactgcaagggatcacaaagtcgatatcaagataccctaccgcgaagcgacgcttcgatattcttgtcaagcagctcttgtctgagcttgagaggacggtgggtggcggtcaatcgaccaatgggtcccaatctcaaagcttgagaggcggcattgccagaatgctcagccagaagtccatggggaaggcggcaaacgtcagagatgaagatccagaagcgcaaatgacaagccatgatcgcactccgtgatataatgtttgacagtgctgttttttcactttgtaccggacatgctagtgaagaggaacctttccctgtaattaccagctacattgtacaaattagtagattctgcagctatatgagctaaccctt

SEQ ID NO: 19011 - DNA, 1249 bp, Oryza sativa
  ref <308>: DATABASE ACCESSION NUMBER: AK069390
  ref <309>: DATABASE ENTRY DATE: 2001-12-06
gggagcgacggcgaccgctccactcccctctcccttccccttttcggcatgtgggtggcggatggcacggagcgcagagtggtgaggcggagagggccgagcggctgccgacggcaggcagcgtgaaggccggcaggtgacggagagatggctctacaaggcggggccagtgggcggaggaaggacggtgagctgtgggccttccccttctcttctctccctccatagattggcgctacacggcggggccagtgggcggaggaaggacggtgagctttaggcctttcccttgtctcctctccctgccaagccacggccgccggcggtgaacccttgtgcgtagggaagaggaagaagaggggatgaggtctccagcgcctagtcgcagggtcagcctccgccacgcgttgcaagaccaccattgtcgcgggtgtcgtcttcgcgatgtccttctcatcgtcgtcccctccggcgcttcctccccctggcgtcgcgggcctaatccgatgaggtggtggacggaggcctgggcaagggggtgaaagtaaatgtggttgacgacgctgacgagtgggtgcgtgccggcgtgggtgacgaagtcaatgacctcgagcgctgccttaactatgcggggcatggcgtgctggagcggcggccattgccatccactgctggctcgccatcctctcttgccgcccgttgccctttcccgctggtcgccgtcaccgcccagtttctctcccgctcctcgccgcccgcctctagggagggagatgggagaaggggaatggggcacgtgaccagaggagatgctcccacgccaacatcgacaccttcctccacggcatcgccagttgtcacagaagccctgctctcgccgatgccgccgagaaaaagtagcagagagagacgaagaaggagattacaagtcactgacatgtggggcccactattttttattttttatttagactgaattaccctgacatgtgggtaccacacttgactcagctgccatgtcagctccttttattgttttccggatcaaatagccacgtaagcaccacgtcaatgccacgtaggcatcacgtcagtcaaaaccggggcaatactgccgagggatttagtttgcattggtttttaaagttcagggatggattgtatctagttttgtagttcaaggaggaaattagaatgggcgacaaatttagggacctcaagtaaacttattccaaggcaaaaacatgtc

SEQ ID NO: 19012 - DNA, 1926 bp, Oryza sativa
  ref <308>: DATABASE ACCESSION NUMBER: AK069391
  ref <309>: DATABASE ENTRY DATE: 2001-12-06
gattcccagtggctcgccgccactactcttcctctctctctattctccctgatgccggtcctagtgtcggcgcctccgatgaacggggaaccacgttgctgccctgcgccatccacaggccctgtcaatctgccatccgtcgctgctcatctccggtcgacgacgagcctccgccgaccctcccccttccggtgaccggtcctagccaccatggactcaggtgctccagatccggacaccctgaactcggaggtcgcggatccaaccatcccgagtttgggtactccaaatcccacgaccctagcttcaccagctccagatccggcctcgaggtaagcggtccgccgtccctcacaccaccccgcgtcgtcgaggtcgacctgccatggggagagcaggcgccagctattccccttccacccgatcctcggtagtcactgcctcatctcttttaatcaggttagtggtcagtaaaagccgcccttgcctttccttgtgtccagatctgagttggtgcatcactaagatctgttgctattttccttgttagacctcttagcataagaagttttttttggtgtgtttttggatactctacaaatcccccaatttctatgctagctgaacaaattagacctagttctttctacgaatcgtgagcttcctgccagttgatgtctttccatctctttaggagagtatttaactactgaaatgcatagtgcatagggaggacactatgaaggatgggtgaaagaccaaggaatattaatgtgaggtaaatttatttttggcttctcactcagaatacccccatcttattttgctgttttgaagcagcttatgttgagatctacatgcaaaactaggaaacggtgatttgtttgacatggaattaacctatcagtggcttagaaaattatgatactagctttatgataattttaaaggataatatatctggatattattctttttttatagaattggatatagaatttactccttatcatagactatgcttttattggtcacatttagttagaatttagatgttggttaatatcttccctagaaaaataaatctagttagaatgcagatgcagatgcttttcttatgctatttttgccttgtcattcatggtaatgattgtgtgaatgatgaacactatagtgttttgctttctctgtttcaggaacaaacaaaacatttatttagctctgtttgtatgtatgaatacattagtgctttccagtctcttgtactctggtagtgcatatacatacttcacacgtctaaatccatgtatatcttttggcaagacatactgatacatgtgttggatatatacatgccatctaaacaaaattaatttcagtctctttgtttttaaaattttattatgtacaaaccatttataatttaccttagcttgcagcttaaatgccgcagttaaatatctgtagaacgttgtacaacatgaaaaatcaaggtatgcctctcatccaatatctaatgagtttgatcctagcattcatgtcttatctgaattggcagagtactactggaataattgtgaggtccacttatcatttcaagtgtcgtatttcatttttcatgcttgtacagataaatttatcttgctcgcttgttatttattttgtaatgatgaagaaaattatgccaactgaacctcttttttaaaacctttttggtttcatggccaaggttgaagcaccacagaacttggattgctgctggaagacaatttccttgtacatgtatttgatgaatacaattgtaactgaacacattgaacttccttgagtaactgaacacattgtacatgtattactaactctgatttgaatgaatttgttggtactgaacttggatggactattcatgtaagctttgaaagcttg

SEQ ID NO: 19013 - DNA, 1587 bp, Oryza sativa
  ref <308>: DATABASE ACCESSION NUMBER: AK069392
  ref <309>: DATABASE ENTRY DATE: 2001-12-06
ggttggaagagagtatgacgaagcccacgacgatggccatttttctttctatagtgctactatccatggcacagcttccctctctcgtcgccggcaccggccggccaagggtcataatcatcggcgccggcatatccggtatttcagcggggaagcggctgtcggaggctgggataacggacatattgatcttagaggcaacagaccacattggcgggcggatgcacaaacagaggtttgccggcgtcaatgtggagatcggcgccaattgggtggagggcgtcaatggtgagaagatgaaccccatttggcccatcgtcaactccaccctcaagcttaggaacttcctctccgacttcgacagtcttgcccaaaacgtctacaaggacggtggcctctgcgacgcagcatacgtgcagaagagaatcgacctggctgatgaagcggataagagtggggagaatctctccgccacactgcacccaagcggccgggacgacatgtcaatcctttcaatgcaacggctcaacaatcacctgcccaacggcccgtcgtcgccggtggacatggtggtggactacttcacctacgactacgagttcgccgagccgccgcgcgtgaccagcctgcggaacaccgttcccctcccgaccttcaccgacttcggagacgacaactacttcgtcgccgaccaacggggctacgaggccgtcgtctactacctcgccggccaatacctcgaagccgacaagtccggcaacatcgttgacgctcgcctgcagctcaacaaggtggtgcgtgagatctcctactcctcgaccggcgtcaccgtgaagacggaggacaactcgacgtaccaggcagactatgtcatggtttctgcgagcttgggagtcctgcagagcgatctcatacagttcaagccacagctgccttcttggaagattcttgcgatctaccaattcgacatggccgtgtacaccaagatattcgtcaagttccccaagaaattctggcccgaaggggcagggagggagttcttcctctacgcgagcaccaggagaggctactacggagtctggcaggagtttgagaagcaatacccggatgccaatgtgctcctggtgacggtgaccgacgaggagtcgaggcggatcgagcagcagccggacagccagaccaaggcagagatcatggaggttgtgaggagcatgttccctgacgaggacgtccccgacgccaccgacatcctcgtcccgagatggtggtcggacaggttcttccaaggcagcttctccaactggcccatcggcgtcagtcgctacgaacatgaccagctcagggcgccggttgggagagtctatttcaccggtgagcacacgagcgagcgctacaatggctatgtccatggagcttatcttgcaggtatctatgcctaatttgttagcctatgtctctaatgttagagagaccggagatgtaaaccatttttattgtcttaaaaaaatacctgctctagtgattgacgagatttgtaatgctaatatttgtgctttattatgtgctgtgcctttgcttgtttttgtc

SEQ ID NO: 19014 - DNA, 998 bp, Oryza sativa
  ref <308>: DATABASE ACCESSION NUMBER: AK069393
  ref <309>: DATABASE ENTRY DATE: 2001-12-06
gaacgtgtggtttaacaatcactgtggactccgaaagcctcctggcgacgatggcgtcgtcgtcacggccggaggaggcggcggcggcggcgccgccgtggagcaggctggaggggcgggtggtgctggtgacgggcgcctcctcggggctcggccgcgagttctgcctcgacctggcgcgcgccggctgcctggtcgtcgccgccgcgcgccgcgccgaccgcctccgctcgctctgcgacgagatcaacgcctccgccccccgggcttcggcggcggcggccgccgtcgagctcgacgtcgcctccggtgggcccgccttggaggccgccgtgcagagcgcctgggacgccttcggccgcatcgacgtcctcatcaacaacgctggccttcgaggaggtgtgcactcaccattggattggcctgaggatgaatgggagacacttatcaagacaaacctcacaggatcatggctcgtcgccaagcatgtatgtagacgcatgcgtgatgccaagctaaagggttcagtaattaacatttcctctgtttctggtcttaaccgtggtcatctgcctggctccactggatacgcagcttccaagtctgccatgcattatgccacaaagctaatggctttggaattaggagcatatggcattagagtgaactcaatagcacctggaatcttcaagtcagagataaccgctcctctattgcaaaagaaatggttgagcactgttgtttcaaagatagtgccacttaagactcatggcactactgatccagcattgacgtcgctggttcgttttctgatccatgaaacatcatcatatgtgactggcaacatcttcattgtagattctggtgccaccttacctggtgttccaatattctcttctctgtaatattcatcattagaatttgctttcaaaaagtcatcggatctattgatttggcatcaaataaaaatcgaaactccagggaggtggaatttctat

SEQ ID NO: 19015 - DNA, 1752 bp, Oryza sativa
  ref <308>: DATABASE ACCESSION NUMBER: AK069394
  ref <309>: DATABASE ENTRY DATE: 2001-12-06
gctctccataatccaccacctctttgccatggcctctcttgctctggttttccttgccctcttgttgcctaccatctcatggctatgggactacatcattgtgccccatatatggaggccttacattgcagccaagaggctcagggagcaaggaatccgtggactaccctacaagttcttgaaaggctgcaatgaggatgtgaagaaaatgaaggatgctgcagatgatctggttcttgatgttcatgaccacaattacctcccaagggttatgccatagtacctgaaatggagatctcaatatggagagccctttgtatactggtttggggcaaagcctcgaatctgcatcttcaactatgagtgggccaggcagattctttcaagcaagtcaggacactttctgaagaatgacactaccccaacagtgttggcgttgcttggcaagggactagtactggtcgaaggaattgattgggagcgccatcgcagagtaatcaaccctgctttcaccatggataagataaagatgatgacaaaaacaatggtagcttgtgctcaaaacatggtgaaggaattggaagatcaagcatccagcaacaagaatggagaaactcaagtggaattggacaaacaattccaagagttaacagcagatatcatatctcatacggccttcggaagcagctataagttaggaatagaagcgttccatgcacagaaagagctccaggaaattgctgtaaaatctctcctcaacgtgcagataccaggattcagttcagctaccttcctacaaaagggaattggaggaaattgacacttgaaaagaagcttaggggcactctcatgcagatcatacaatcccgattatcatcaaaaggaagtggatacggaagcgatctccttggtttgatgcttgaggcttgcattgcaacagatcagggaagggagcaacatcagctcagcttaagcatcgatgaaattatacatgagtgcaaaacattcttctttgctggtcatgaaaccacgtcacttcttcttacctggacagtgtttttgctcagtgtgtatccagaatggcaggcaagactccggttggaagctttgagggaatgtggaaaagaaaatccaaatggtgacaaccttagcaaactgaaagagatgtcaatggtattccttgagaccctaaggctctatggtcctgctcttttccttcaaagaaaacctctaacagatattacagtaggagaaacaaaaatacccaaagaccatgcaattatcataccttcagcaattatgcaccgggacaaggagatttggggtgacgatacagatgaattcaatccattaagatttcagaacggggtcacaagagcagccaaagttccacatgccctactggcattctcaatagggccaaggtcttgcatcggtcagaattttgcgatgttggaagccaagtcagttatggctatgatcctaaaaaagttctcattcacactttcccctaactatgttcatgcacctgtagacctgttaactcttcagcctaagtttggtcttcctgttgttctaaggctactggatgcatgaagttagatgatttacatgttaccaaacttaaatggaatctgtatgccaaaggttgctactgacctacggcactatacattgtaccccacagtggatgtatccttataaaataaaatagctcgggccatgattcaatgtgaattactgttctggtgc

SEQ ID NO: 19016 - DNA, 1670 bp, Oryza sativa
  ref <308>: DATABASE ACCESSION NUMBER: AK069395
  ref <309>: DATABASE ENTRY DATE: 2001-12-06
gacttcgtagtagtagtagtaggagacgacatccatggccgccgtcgccttccgcttgggacagcgcgtgcacgccgccggcgaccccgcccgcgtcggcaccgtgcgttacctcggccctgtcgacggccaccccggagactggctgggcgtcgactgggacgccggcgccggcggccgccatgacgggtcgctcgccggccgccgctacttcgttgccgccggggaacgctccgcctccttcgcgcgccccaccgcgctcagcgccgggatcacgctccccgacgccatacgcaaccgctaccgtgtcgaggaattcaccaaggaggaacaagatgaaatgtatgtcttctcatcaagtcagaagcgcgtgtcagtggaattggttggcaagaacaaagttgaggaaaagctgaaaaacctcaatgatctgaccagtgcatctgtatcctacatgggagtaagctcaattgggccaggagatgaactaaagaatttggttccaaatctcagacagcttgatttaactggaaatcttctctctcagtggcaagtatgtacctcaagagactaacattatggatatattctctctgtgtgaagctctggcatcactggaaattcttgatttgacaaacaataccatggagaatgactttactgacagttcatctgtcaagaatatccgtgttttggttctcaactactgtggtgtaacatgggaactggttgaaaagattaaagtctcattttcatgtctcagtgaactccatctaatgacgaacaggataaaagcaatgatggatctaaccagatagatgaggtcctttctgtggattcacttaacctctttccgagtttaacagatgtcaggctttctgataatcctgtagctgaccctgccaagggcggcgtgcctcgatttgtgcttatcgcccgactaggaaaagttaaaatactgaatggtagtgagataagtccacgtgagcgaagggaagcagagatacgatatgttcgccttgttatgggaaaagctgaatcatatgatcctgaagagatcaaacggctgcaccctaggtaagatttgctgagctgaaagcctttcatggtattgaggatgagaagccgagttcaaggacttctggtcctcaaaaaatggcttctgggcttataagtatcaccttgaaatgcgtagggccatctatgggtgagaagcaaccattgacaaagaagctgcctcctgcaactactgttggaaagttaaaatctttgtgcgagagcttctttaaactgaaggacgttaaactgagactgtatcttgaggaagagggttgccctatgccgcaattcttcgaggaagacacggtttctctcatggagcttgggatcggcacgggatcgaccattatcgtggacgaagaaagctagcctaatctagtttactggcattctttgtgtgcgctttaatttgatttatttgagtaaatttggtgtgttgagctggagaaaacaaagtccctgtaacatggtacaaatgctcaagtaacttacactcggcagcttaacgccatcaaatgtgtgtgcatgtacgtgctctcgagtctcgactcgaccacattatgagtcatgacagaaagacaatcattcttgctgtttagtaccttttgagc

SEQ ID NO: 19017 - DNA, 1824 bp, Oryza sativa
  ref <308>: DATABASE ACCESSION NUMBER: AK069396
  ref <309>: DATABASE ENTRY DATE: 2001-12-06
gaagggccgccgcctcccccgccatccgcgtggccgccttccccaaccgcagcgctctgaaacacaaacttccccaatccccaatccccaatcccccaatctaccccagctttctcccgataattctctcctccgatttcgccgccttccctcccgctcgggccatcgacgcagcctcccctaaagaacaacacctaccctctgccgcgtcggcgaagagatggggaagcacgagttcctgacgccgaaggcgatcgcgaacaggatcaaggcgaaggggctgcagaagctgcggtggtactgccagatgtgccagaagcagtgccgcgacgagaatggcttcaagtgccactgcatgtcggagtcgcaccagcgccagatgcaggtgttcggccaggcccccgaccgagtcgtcgagggcttctccgaggagttcctcgacgccttcctcaccttgctccgccgcgcccaccgccactcccgcatcgccgccaccgtcgtctacaacgagttcatcgccgaccgccaccacgtccacatgaactccacgcgctgggccacgctcaccgagttcgtcaagttcctcgggcgcgagggccactgcaaggttgaggacactcccaaagggtggttcatcacctacatcgaccgcgactccgagcaggccgtgaaggccaggctcaagcgcaagaggatcaagtccgaccttgcggaggacgagcggcaggagcgcatgattgcacgccagatagagcgagcccagcaatccatgggtaaaactaatggtgaacttggtgatgatgctagtccggatggtagcgaaggtgagtccggcagcgaagatgagtattcggactcagaaaatgaccatgagggacaagaggaggatgcaaaagaagccaacaaagcagcagggaagattgcaattgcacttcagcgggctgtgccagggccaaaggttaaccctctcgatgataagccaaaggttaaatttggttttgaggaagaggatgaggtgagcgcgcgggataaggagaaggaagagttggccaagaagaagggaaaggatgctataaacgcagcagaagctaggaggtcagcattggatgagctgatgaaggaggaggagaaagcgaaggagcggagcaataggaaggattactggctatgcccaggtattgtggtcaaggtgatgagcaagtcgctggcagagaaggggtactgcaaacagaagggtgtggtgaagagggtgattgataagtatgttggggagattgagatgctggagagcaagcatgttcttagggtcgaccaagatgagcttgagacagttatcccccagattggtgggctggtgcgtattgttaatggagcttaccggggatctaatgcaaggttgctttcagtggacacagagagattttgtgccaaagtgcaggttgagaagggcctctatgatgggaaggttcttaaggccattgagtacgaggacatttgcaagatttttcactgagatatcatggaattccatcttatttctggagcattactgctgtcaaatgtcaaacatatgactatgcaagccaatgtgttggacctttctgttagttgcctgacaatgtatgtgcttgtgctagaatttgttctatcgaatatctttcacatgttgatgtttctactttctagttcttcctagctgccgaaagaactctgtgtaagaaaatggtctgatgctttcttgcttgtttggtgattagaatgatatgacaatttttcaacatgtaatctctccataattgtttctgataaaacttgttagttacc

SEQ ID NO: 19018 - DNA, 1703 bp, Oryza sativa
  ref <308>: DATABASE ACCESSION NUMBER: AK069397
  ref <309>: DATABASE ENTRY DATE: 2001-12-06
tggaggcctcaaaccctaagccgcgagagcaccaccaccgccaacgcccacgcccgccgccatggccgtcgtctccgagagctcgcgcaaggcgctgctgcccagcttcctgtacgcggcccctgccgcctcctcgtcgccgtcgttcgcggccgccgcagccgtgggtgtacgtggggtccccgcgccgtcgctggcggggccggcggtgtgggctcgctcgccgagagagccggcggggaagattgagatgtactcgccggccttctacgccgcgtgcacggccggcggcatcgccagctgcgggctcacgcacatgaccgtcacgccgctcgatctcgtcaagtgcaacatgcagattgatccagccaagtacaagagtatctcatctgggttcggtgttctcttgaaagagcaaggagcaagaggtttcttcagaggatgggtgcccacactgcttggttacagtgctcagggcgcgtgcaagtttggtttctatgaattttttaagaagtactattcggacattgctgggcctgagtatgcagctaagtacaagacattaatttatttggctggatctgcttctgctgaagtaattgcagatattgcactctgccccatggaggctgtgaaggttcgtgtgcagacacaacctggctttgcgagaggtttatctgatggtcttccaaagtttgtcaaggcagaaggctatgctggattgtataaagggattgttccactctgggggcgacaaattccttatactatgatgaagtttgcgtcttttgaaaccgttgttgagatgatatacaaatatgcaatccctgcccccaagagtgagtgcagcaaaccactgcagctcggtgtgagctttgcaggtggttacattgcaggggtgttctgtgcaatagtttcacaccctgcggacaatcttgtgtctttcctcaacaatgccaagggcgcaacagttggcgatgctgtgaataagcttggtatgtggggtctatttacgcgtggactccctttgcgtatcgtgatgatcggtactctcactggagcgcagtggggactctatgacgctttcaaagtgatggttggactgccaactactggtggagttgctccaacaccagccaagtgatggttggactgccaactactggtggagttgctccaacaccagccattggtgaagagcagctgaaggcctgatgcttgattctatacttccgaacttctaacaattccgtgccaacttggatgatggcgaaataggttcttagtttagaaacaaaaaggattttgttgacgaatgcttatagttcattaattcaatcgctgctaaaaaaaactgagataagcatgctcagggcttacaaattataagggtattgcggtacagagtttaggatagtagtatagatggccattcgatgaatgatgcttgcgtgaatgaccgtggcatccttcaatttttgtaggtctattttttttattgcagtagaaatgttgattacgccttgggccttggctctatcttttgctggccggttgttatcgttgtaactctccgcggtattcgttcttttcttcagatgtcaataatgcaatctgtgtagtgttccattcaatataccactgtatcatatctctctattgtgctagtattaatgaagctgtcgataagtatttgacaactg

SEQ ID NO: 19019 - DNA, 2421 bp, Oryza sativa
  ref <308>: DATABASE ACCESSION NUMBER: AK069398
  ref <309>: DATABASE ENTRY DATE: 2001-12-06
ggtcgtcttcttcccgcgcctttcgcgaagccaactgctcgaacggacgcacccgtgcagccgcgctcgtcggccgtcgccgtcgaggccgcccctccgccgccgccagcagctgatccgttcgccattccttcgcgcgctggtttccacctttccttgcccgtccgtcaggccggacatggcacgccgcgtcgctgcccgcgcccgcgcccgcgccggcggcgtcccgcgctcggagggtacgatccaagaccgagcacgcgttgggagcggtggcgccgaggacgcactcgacgtgttcgacgaattgctccggcgaggcatcggcgctccgatccgcagcttgaacggcgctctcgccgacgtcgcgcgcgacaaccccgcggccgctgtgtcccgcttcaaccgcatggcacgagctggtgccagcatggtaactcccaccgtgcacacctatggcatcctcatcggctgctgctgcagtgcgggccgcttagacctcggtttcgcggccttgggccatgtcgttaagaagggattcagagtggaacccatcatctttaatcctctgctcaagggcctctgtgcagacaagaggacggacgacgcaatggacatagtgctccgtggaatgaccgagctcagctgcgtgccaaatgtcttctcccacaccattattctcaagggactctgtcatgagaacagaagccaagaagctctcgagctgctccacatgatggctgatgatggaggaggctgcttacctaatgttgtgtcatacagcaccgtcatcgatggcctcttgaaaggaggggatccggacaaagcctacgctacataccgtgaaatgcttgaccggaggattttgccaaatgttgtgatttacagctccattattgctgccctatgcaagggtcaagcaatggacaaggccatggaggtacacgataggatggttaagaatggagttacacccaattgcttcacgtatactagtcttgtgcatggattttgctcttcagggcagttgacagaggctattaaatttctagaaaagatgtgcagcaatggtgttgaaccaaatgttgttacttatagctcgtttatggactatctctgcaagaacggaagatgcacagaagctagaaagatttttgattctatggtcaagaggggcctaaagcctgatattactacctacagtagcttacttcatgggtatgctatcgaaggagctcttgttgagatgcatggtctctttgatttgatggtacaaagtgatatgcaacccgatcattatgtcttcaacacactaatatatgcatccgccaagcaaggaaaagtagatgaggccatgcttgtatttagcaaaatgaggcagcaaggattgaaacctaattgtgttacgtatagcactttgattaatggctactgtaaaattactaggatggagaatgctttagcacttttccaagagatggtgagcaatggtgttagtcctaattttatcacatataacataatgctgcaaggtttatttcgtacaggaagaactgctactgcaaaagaattctatgtacagattatcaaaagtggcaaaaaagatcttatagaacaggggttgctagaagaattggatgatctatttctttcaatggaggacaatgactgtagtactgtgtcgactcctgcatgctaaattgcagagttacaaagttacttcaaaaaggggaagtaggcactaggcagtgctggggtttacatgtccaaaattgatcaaaataacctccccgttgaagcttcgactgttgatttgctgattttgctgatttcaagcaggaaattcaatcaaacatacggaatttctccctgaaaagttttgctctgaagtgaaatccatcctgtttgaaatggcctacagttatgcagttgtaactggctattgttggccttctcactgaattagtaatacaaacaagaaattctggaccactctatgtttggggatcacctttatctgttacatgtggattgctaggtacaaactgcccttttttttgtcacactatatctgattcccttcgaagaaaaattcccagatgatattatagttctctaattttgctactttttgtagctttgttagaactaatttattatctgctaaacttgcagtgacaaagattcccctgtatgataaatagcatagttagcagactgtttcacagaggtgcactaagcagagctggtgcttacctctccatgactgatgataagcacttctctctcaaagcatggtctgtttccctgttttatagatctttttttctggaggcaaacaccaagaatatcataggttttcccctgaaaagtacaagtatttatagaatattggaaccgctgaagatttttgcagctacg

SEQ ID NO: 19020 - DNA, 743 bp, Oryza sativa
  ref <308>: DATABASE ACCESSION NUMBER: AK069399
  ref <309>: DATABASE ENTRY DATE: 2001-12-06
gattgcagccgccgccgctcccagctcgcgctcccctcgccgccgcagccgccgccgcctcgcctcctcggagatcttcgctgcccttccgtcaacatggggaagacacgtggtatgggagctgggcgcaagctcaagacccaccgcaggaaccagagatgggcagacaaggcctacaagaagagccacttgggtaatgagtggaagaaaccctttgctgggtcatctcatgccaagggcatcgttctggagaagattggtattgaggccaagcagcccaactctgccatccgtaagtgtgctcgtgtgcagcttgtgaagaatgggaagaagattgctgcctttgtgcccaatgacggttgcctgaacttcattgaggaaaatgacgaggtgttgattgctggatttggtcgtaagggccatgctgtgggagatattcctggtgtccggttcaaggtcgtcaaggtctctggtgtgtctctgcttgctctcttcaaggagaagaaggagaagccgaggtcttagattactggtacatcttggttggcaagcatggaatagacagaatgaaaggctttagatgctcaagaatgaaggctttagatgctcaagaagatggttccttgctatgtttaaagtgcgctctttatattgttaacttaagattgtgttggtaaaaaccatgccttgtcagatttttgcttctgttaaggggaaagtactgtgctgagctattttctccg

SEQ ID NO: 19021 - DNA, 2294 bp, Oryza sativa
  ref <308>: DATABASE ACCESSION NUMBER: AK069400
  ref <309>: DATABASE ENTRY DATE: 2001-12-06
gggcattagccacaagcgaactcgccgccgtcgccgccctgcaccggccaggcgcgaagtctccagcaaaataaaaaaaaacaaaagaaaaagaaaaagagaggaaaaaaaaagtctccagctacttgctttgctttactctctcatcaacttttttttttcttcttcttcttcttcattccaaaaccacctcgcgtggcctcctccgtcccctcgccggcagtagcctcctcctccgttcatccaccacaggcgaccgcccggccgccagcctgccgcctcgaagcctaggaggttctctcgtgcgcgccccccctccgctccgccggttcgttctggtggagtggacttggcgtggcggtggagtggggggatccatcgggggcttgcagtgattcccttcttccttcggctttcctagcgcctccgccggcctagccgaccgcctcgagagccgccgcacacctccgcttcgcgccgccggcccccgcaaggagcccccgcaccgccgacctcgggaacccgccgcctcgcgcacctgggtgttaggattggagtacttcaaatgacaagggtcatccatgactctggagaaggcatgcagaaggaggcacttgctatggtatcttctgatgttaacttccccaagggccattttccagactacaagattgggccaaacaaccaaatcattgatccagaagagatacatgaggctgtacctttgaaggagatcgttgcgaaggaaacagcacagctgctagagcagcgaaggcggctttcagtgcgtgacctgaaggagaagtttgagaagggtctatcaggtgcctcaaaactgtctgaagaggctaagcgccgagaagcagcttcgttggacaggcaggttcttctgaagaagcttagagatgttttagacactctgaaaggccgtgtggctggtagaaatagagacgatgctgatgaagctatttcactggtggaagcattagcagtccagctgacccaaagagaaggggagttaatatatgaaaaggctgaagtaaagaagttagctagcttcctcaagcaggctactgaagatgcccggaaggtggcagaggaggaaagggctcttgcattagcggaaattgagaaggccagaactgcaattgctatagtcgagaaaggattgcaggagcatgatgcagcatcaagtagcagggaaaaggaggagatagagggactcaggaaagaggtccgtgaggctagaagaataaaaatgctacaccagccaagcaaggtaatggacatggaatttgagcttaaggcactgcgaactctcattgcagagaaaaatcagctttgcaatcagctaatgaaagagcttgcaatgatcaagaggctagaagaagatagctctgacctctatgatcttgaaggttctgatatccttggatcacagttttgtattatccctcgatttgatgatgctccagacatcagcagctgtccaactcaatggtaccgtgtaatttctggaggcaatagaaatcttatattgggagcaacaaaacctacatatgctccagaaccatttgatgttggccgactgttacaggcagagatagttttaaatgcagagaaagttacgatacaaacaatgggacctataaatcctgctgccggactggaacattatgtggagtctctaatgaaaagagcagatgtggagtttaatgtggttgtcacccaaatgaatgggaatgattactcatcgaactctgtccatgcatttcatatcggaaaaatgagaataaagcttcgaaaaggatggtctacaaaagcaagagagtcatactcgaccacaatgaagttgtgtgggagccgtggtgggggtaatgctgcagctacggcagttttctggcaggcaaggaaaggcctgtcctacaccttagcttttgaaacggacagggataggaacgcagcaatcatgcttgctcgtaaatttgcctcaaattgcaatattacgctcactggtccaggtgatgaagttcatgctggtagctgaatttacagtgttcacggtgtgacagcaggagtatacatgtaggctgtgaattgtgtactgtgtcagtttgtgttttcgagagtagaggttgtacactaggctttcctctttcagcatacattctcaaggcaattctttttatttgcctgccagcagctgtttgtggtgttcgtcaaacatgctgtgcaaaatgatgattattcttgagcattatatctattaacgttcgaaaagtgatagtttgctt

SEQ ID NO: 19022 - DNA, 1531 bp, Oryza sativa
  ref <308>: DATABASE ACCESSION NUMBER: AK069401
  ref <309>: DATABASE ENTRY DATE: 2001-12-06
gatagctctgtgaaattgtggcgttattatattatagcgaagtcctatttcttcattggaaagcttgaagaggctcatcagtttttaaagaagctcggacaggaagcacttgttgaatgcaggtacgggaagcaatctcagcaatcagtttcatcattctccacgacaatctgtgaactacttcgccttaaagctgctgggaacaaagcatttcaagctggtaaatattcagaggctgtggagcattacactgctgctttgttaagcaataccgagtcaccgcgtttttcagcaatctgctttgctaaccgcgcagctgcttaccaagcaatgggccaaattttagatgcaatagcagattgctcactagccatagcccttgactccaattattctaaggctatttctagaagagctggtttgtatgaacttataagggactatgatcaggcagggaatgatcttcgtaggttaatttctcttcttgagagacagcttcaagaaaatatatacacgccttcagaaaaatcagatggtattcgcagcagtctgaaccgatccaatcttaggctttctgctttggagcgggatgccaagaaggggatctcactgaatgtatatttgatactaggaatcgaaccatcttgcactttcttggatataaagaaggcataccgcaaagcagcactaaggcatcatccagacaaagctggtaattttcttgtgagaagtgaaaatatcaacgatgcagtgtggagagatattgctaatgacatccgcaaagatgctgactatctattcaaactaattgggaaagcatatgctatactttcggaccctacaactaattgaaaagcaaatgatagatgcacaatctttatttttctgcggggatgtatacagaatctttgatgtagtagtgcaaacagcgcacatgaatattacagaagtggtcagagcaatcgaaacaatgacaggagcttacaatgtttggaaaaatcatgaggtggtacactgaagaaacagaaatgcataatggatcagtcctaccctttttttcccctttgaagactaggtccgacgctaaaagttggcttctgttacgcaggattcaggatgcctaaaaagaagcctagccactgatgtcagagtttgccgaatgccaggtttgcgtctcttggtgtgcagagttttttgttgtatgccagtgttacttctctttctcacagccaaaaaaaaaaaggtgtgcatagatccaatggtatgtatagttcttgaagcagttgtaaatggaatcagaaacactgtaaatacgggtacacacccatttacatgagcgtggcagaggtatatgatttgtttgatgtgttgattgtaacacggtgattttgtaagcaggattttttttttctttttaccctttgaagctgccctcagtacagttttgtgtgaaactgaaccagtgagtgattcttttgttgtaacaaacgattaaagctgcatgaatgaattgtgtgttattcttgttgct

SEQ ID NO: 19023 - DNA, 1284 bp, Oryza sativa
  ref <308>: DATABASE ACCESSION NUMBER: AK069402
  ref <309>: DATABASE ENTRY DATE: 2001-12-06
gggaggaggctggcggggcagccggcgatgggcggactgcggaggacggaggcggtgcctcgttttggcaggtcctccccttttctctcccttcttcctctctctctctctctcttactcgttttggtgggccggtcggcgggagcggaagaggtctggtggccggtgacgagctacacgatggcggcagcgactttgtgtggcggcgacaaggatggagttgacctgcagatagagcgctgcctttccccacaactcccgcaccgagcgcacgtgaagagggaggaggcgggaaggccagcagcggcctgttcctcgtcgtcgtcgttctgcggcaacaccagctgccggacctcttcctctcccctccccccagcggcgcgcggcggaggaagccgcggcgccgtcctcctcctctcccgtctcaccccatcgacgcccgcgccatcccgccgcccgtcgatgcccgcgcctccccattgacgatgggggcgaggttgacggcgatgggggcgacggaggcgccactctccccagcgccaacaagtccccctcatcctcgtcctccggggcgctcgacggagacgcggcggaggccgaggcgcgccgccggctgacaagctcgctgcgggaggcactcgggctgtaccgggacatcctccgggtcacgtggctgttcgagtggcccgacgaccgtggcgattacgacggcatcgtgacggagtacgacgtggagtgcggtgtgctggtgtgggagcgcgacgagcacgaggggcggcgggtgtgggcgacggcgcggcatcgccccgtcctcttcgcgctcaccctggccaccgccgcagtcgccctacccttctcccccagggcgccggccgccgtcgcgccgccgccgccctcctctctcccgtctcgcctgccgacgtcgcgccgccgctttgcctcaccgagaaaccgcctagaaagagagaagtggaaaaggagggaagtgatgatgtggcttcctagcatgtggggcccacgtgggtcccacgctgactcagcagccacgtaggacaaaaccggggtcaaaaccacctaaggacctcgggtgaccggttttatatagttaagggacctcgtgtatctggttttgcggttcgaggacgtttttgtatcccgatgacaagttgagggacctttggtgtactttttccttaaatattatttcctccgttttacatatatatgtctagattcattaacatcaatatgaatgtgggaaatgctagaatgatttacattgcg

SEQ ID NO: 19024 - DNA, 1379 bp, Oryza sativa
  ref <308>: DATABASE ACCESSION NUMBER: AK069403
  ref <309>: DATABASE ENTRY DATE: 2001-12-06
gctccatctccctctccgtttgactctccctgatccgcggagctctcgagcgcccgccgccggcgagcggggtgcagcgccgcgcgggcgacctcctccttccacctgcctccatcatcgctgcttgaatcgatccgaagcattgtaaatggctgctgggaggggcatcagtcagcttttgaagaaagcatttcgtccatctagctcatctccgctctcttcatcctggataaatcatgaagagtcctctggcttcactggattgagagcattggctattctgggagttggtgcttctggccttttaagttttgctacaattgcatctgctgatgaagcggagcatgggttggaagccccacactatccctggccacatgctggcatccttagctcatatgatcatgcatcaataaggcgtggccatcaagtttatacacaagtgtgtgcctcttgtcactcaatgtccttgatttcataccgagatttggttggtgtggcctatacagaagaggaaacaaaagcaatggctgctgagattgaagtggttgacggtcctaatgatgaaggtgaaatgttcacacgtccaggtaagctgagcgaccgtttcccacaaccctacgcaaatgagcaagcagctcgattttcaaatggcggggcataccccccggatctcagtctaatcacaaaggccaggcacaatggccagaactatgtttttgctcttctcactggttatcgtgatccacctgctggtgtttcgattcgtgaaggcttgcattacaatccctacttccctggtggtgccatagccatgcccaagatgcttattgatggagcagtcgagtatgaagatggcactccagctacagaagcccagatgggaaaagatgttgtctcgttcttgtcatgggcggcggagcctgagatggaagagagaaaactgatgggagtgaaatggatttttctactctccctcgcacttctgcaagctgcatattaccggcgcatgaagtggtccgtctacaagtcgcgcaagctggtccttgatgtggttaattgaggactagttcttcattttcttcaaagcatcggctgataatttgaagtattggaataatgcgtacatgaatcatgatgtacattttgccgttggcatggttaacatgcacaatactcttttcctttgttacatttactcccagctgtgctgggcattattttaaaattttggcctgtcaaatgtaccagcaagcatctaacagtatagtcaaatagatctcataagcatatttatactccgaaccagtgtaatgttaattttagtcatcagtatgagatgatggagaaaaaaaatgaagtgtcactaacactactgt

SEQ ID NO: 19025 - DNA, 1829 bp, Oryza sativa
  ref <308>: DATABASE ACCESSION NUMBER: AK069404
  ref <309>: DATABASE ENTRY DATE: 2001-12-06
gaacggtaaacaagcacacatccacacacaagcacacatccacacaacggcaattaatcattgcagagagctagcagctaggttagttaggtgagcagtggctgcaaggggcaagccatggcatctgtggagacgtgggtagggttcgggtcggccctggccggcgtcggcttgctttggtcgaggatgccggagcacgtccatgacgaggctaggtacatcatcagtagcctggtccccatggcgatatcctacttcaacccctacgagcagatcaccgtgtccgagtacggcgaggagcggttccgacgcaacaagatgtttgacgccgtctccacctacctgagccgcgtgtgcgccggtggcgcctgcaagctcaaggccgagctctgcaacaacggcagggacgacccaattgtcactctggacgagaatcaggaggtcgtcgacagcttcgacggcgcacgcatgtggtggaggctgtgccccaaggcctccaagaacaagggggccatcaccgtcacctactaccccggggaagcggacaagccgcgctgcttcaagctagtgtttcacaaacgccaccgccagctcgtgctcaactcctacctaccaagcgtcgtccggcgttggcgcgagctaaccgcgatgaaccggcagagacggctgttcaccaaccatgccaatgaggcgaagaagagcgtgtggaccagtgtcccttacaacccccctgcaacgttcgacatgctcgccatggaccacgccaagaaggttgagatcgtggacgatctcacaacgttccagaaggggaaggagtaccactcaaaggttggcaaggcgtggaagcgggctaccttctgcatgggccaccgggcacgggcaagtccaccatgattggggccatggccaacttcctcgactacgacgtctacgacctcgacctaacttccgtcaagaacaacagcgagctgcggaagctattccttgatacgacggacaagtccatcatcgttatagaggacattgacgcgatcgaggtcgaactcactaccaagcgcaagggcaagaaggcagccaacggcgacgaaatccacgacaagcgtatgctgatagagttttccgacaagaacgatgaaaaaagcaaagtgactctgtcgggcctgctcagcttcgtcgacgggctgtggtcggcgtgcggcagtgagcggatcttcatgttcacgacgaaccacattgaccggcttgacccagcactaatccggccagggaggatggacaagcacatcgaaatgtcttactgccgcttcgaggccttcaaggtactcgccaagagctacttggacatcaccgagcactcactattcgctgaaatcgagcggctgctcgacgacactgacacaactccggcagacgtcgccaataacctcatgctgaggagcaagaggaacggtgaaatcagtcgactgctcgacgagatcgatggggcaccgcgggcagatgtggccaaatggtgcaagaggaagagagacacggacgagtgcctggcaggtttcgtagaaatactaaagaaatccaagatggaatctgcaacaactccaatggattcaatggaagaagccaaagaggaacgacctaacgcaaaagaaagctacaaaatggggcggacatatgatgagaactataggttgggaaatgccagctagactccttgttttgtgtttgctattttaccagacttgcgtgtttactagtcacttaaggtttcaaagccatacataaaatggaataatataaaattagtggtgtaacactacttattttctcgatct

SEQ ID NO: 19026 - DNA, 1088 bp, Oryza sativa
  ref <308>: DATABASE ACCESSION NUMBER: AK069405
  ref <309>: DATABASE ENTRY DATE: 2001-12-06
ggcactcttggcatgcgcgagcgcgacccctccccctcgaaccgccgcgaccttctcgatgcttcccaaatcctcctcctcgtgaactcgtcgccttcgtcttcgtctcgatctccatggcggactcgagcgcggcccgccccaccgtcctcgtcaccggcgccggcggccgcacaggaaacattgtctacaacaagctcaaggaaaggtctgaccagtttgttgtgagaggtttagtgagaacagaggaaagcaaacaaaagattggtggaggcaatgatgtttacattgccgacataagggacagagatcatcttgtgcctgctgttcaaggtgtcgatgcgctcataatcctcacgagtgctgtgccaaagatgaaacctggttttgaccctagcaaaggtgggaggcctgagttttactatgaagatggaatgtatcctgagcaggtggattggattggccaaaagaatcagattgacactgccaaagctgctggagtgaagcatatcgtgcttgtgggatccatgggaggaacaaatcctaaccatccactgaacagcctaggcaatggcaatatactggtttggaagcgcaagtcagaacagtatttggcagacagtggagtcccttatacaataataaggcctggtggtctgcaagacaaagacgggggagtgagggagttgattgttggcaatgacgatgaacttctccagacagacacgaagtcaattccaagagctgatgttgctgaagtttgtgttcaggccctgcagtatgaagagacaaagttcaaggcatttgatttggcttcaaagcctgaaggcacaggcacaccaacaaaagacttcaaatcgttgttctcccaggttacagcccgattttgagccatcttgaggagcaatctcatctcggtttccttgtgtattggatatttggatgtatatcttcgtggttagtgaggtgtgaagttgtagtttgctgtaattcgtcatcgtttcctgaaaactcctattgaaatcagtgaattgttcagacaagacacaaattgatattattcaaggacatgatgtctttttaaaatg

SEQ ID NO: 19027 - DNA, 2097 bp, Oryza sativa
  ref <308>: DATABASE ACCESSION NUMBER: AK069406
  ref <309>: DATABASE ENTRY DATE: 2001-12-06
ggaagcgcaaaaaacccacgcgctgtcgcaggagaaacgaagccgaagctcccatttccattccacctgctctcccaactctccggccgccgccgccgccgccgccgccgccgcgctaacctcctccccgcgacgagcgccaccatgagcacggcctcggcgacggcgccgccgagccgccggacgcggagccgcccgccgtcggcgtcctcccgcaagtccgacgacccctccgccgccgccgccaacgggaacgggaaggcctcctccaagcccacctcccccggccagctgaccggggagaggacggtgaggaagctgaggctgtccaaggcgctgacgataccggaggggacgacggtgtcggaggcgtgcaggaggatggcggcgaggagggtcgacgccgtgctgctcaccgacgcgcagggcctcctctccggcatcgtcactgataaggatgtagctacaagggtggttgctgaggggctgcgggtggagcaaaccatcatgtccaagatcatgacaaggaaccccacatatgccatgtctgatacgcttgccattgagcattgcagaagatggttcaaggtaaatttagacacctcccagttgtggaaaatggtgaggttattgctatgctggacattgctaaatgcctttacgatgcaatatcaagactggaaaaggcagcagaacaagggagtgcaatagcagctgctgtagaaggggtagagcgtcaattaggaggcaacttttcagctccttatgctttcatagaaactctaagagagaggatgttcaaaccttctttgtcaaccattgtcacggagggcacaaaggtagcaattgtttctccttcagacccagtgtatgtagcaacacagaaaatgcgtgaatttcgagttaattcggtggttgttgctacaggaaacacactacaggggatcttcacctcaaaggatttgcttatgcgtgttgttgcacagaatctttctcctgaattgaccctagtagaaaaggtgatgactgtaaacccagattttgctacattagacacgacaattcttgatgctctacatataatgcatgatggaaagttcttgcatattcctgttcttgatcgagaaggacaaattgctgcttgcttggatgtcctgcaacttacccacgcagccattcaattggttgaaggaggaaatgacactgtaaatgatgtggcaaatacagtaatgcagaggttttgggattctactcttgctttggagtctcctgatgaggaatgcgatagccgtagtgaagtatcattgctcttggcatcagaaactggagatggaaagagtagcatttacccccctgttattggaaattcgtttgcctttaagcttcaagaccaaaagggacgcgtgcatagattcacttgtggctcagagagcttgaacgagctagcgtcttctataaaacaaagattaagtattactgacgaagagggcataatgcaactcctgtacgaagacgatgaaggtgaccgggtgctactgacaactgatgccgatcttgctggtgccgtgctccatgccaaatcgtccggtttgaaggttctgaagttgcatatcgacctgtctgaatccagcacagaggtgacaaagccatcacagcagctggcagctgcacgcaggagtcggttgtcgcctgttcgtgttgggctgatggctggtgtggtcgctctcagcggtgcagcagtgatggtttacctgaaacgagctaaagtgtgatttccccatgaattactggtaattttttcaaacctgtatttttttccagttcctggagctaattatgcatcatgccaaagaaatgacacattggagagcaaccaaagttgcatcagatgcactgaaactctctgacgccgggctgaagaatctgcctatgttggtttttgtttcctcaatttgcacgcatatcagcaaatttcactagtactgtgaaatgtataaacattaggatgttcctagttcatatttatgtacttgtttacagataaacagatatgtaaactcattttgaaggacagaagtaaatagatccttctctcct

SEQ ID NO: 19028 - DNA, 1144 bp, Oryza sativa
  ref <308>: DATABASE ACCESSION NUMBER: AK069407
  ref <309>: DATABASE ENTRY DATE: 2001-12-06
tatccatcctcgacaccaccgtctccgcttccctttccattcgcgccgccacctcgccgtcgcacccagcggcggcgccgccgtgccggaggagcggcgatgtggtgccagtcgtgcaaggaggagtacgaggaggaggacgccgggacgtgcaaggagtgctacgaggaggcgagcgagacggaggaggagctcaagcgcgagatcgacgacctccgctcccgcctccacttcctccgcctcccttccccttccctcgacgcctcctccctctcccactccgacctcctcctccacgccatccccgccgatgcgcccgcccgccccgacacccccgccgtccccgcccaccgcgtcatcctcgccagcagatctcctgttttcagagctatgcttgagaacgagatggaagagagccggagtggcatcatcaaaatatacgatgtgtcctacgacgtccttcgtgctttcgtccattacatgtacacagcagaagctctccttgacgagcagatggcatctgatctcctggtgttggctgagaagtacgaagtgaagaacctgaaggcctactgtgagaaattcttaacatccaaagtgagcaacgacaatgccatcacgcattatgcgtttgcgcatcgccacagcgcgaagcagctgctcgagacatccctggcagcgatcatggacaacatgtcaacgctggcagatcgggaggaatacaaggagcttgttgagaaggacccaaggcttgttgtggagatatatgaagcctatctgaacagacaagtgaacactgctgctgggaaggagacagattccagtagtaggaaggggtaattcaaaagaaaactgctatcagagatgtaattaatgttctaaccaagcttttgcatgttcatgctaggcaaagactggcacatcaaattgtcatcctgcggtgtaggcgcagaacagctatttctgtatatgcttgaattgatactgtgtgctcgctactgatagaatgagatctattgccatctttatgtaacatataggtcaactgatatgtgatgatcatcaaacacactcagtatgaacaaaaaactaagtgtaaactatttgcaacgttgaacggttaaattgattaccagggctctgt

SEQ ID NO: 19029 - DNA, 1164 bp, Oryza sativa
  ref <308>: DATABASE ACCESSION NUMBER: AK069408
  ref <309>: DATABASE ENTRY DATE: 2001-12-06
gcacacacataaaaacaaataaacaaaccacttcaaattggtcggagaagaagagggcgttcgcgcatggggaaggcggcgagcatgagggtggcgctggtgtccgtggtgctcgtgggcctgatcctggtttccacggcccacgccgcgcggcccgagaagctgcccgccgtcgtctccccctccatcgcccccgccgtcgccgaggtcgtcgatgccgccatcaacgccgtcgacctcctggcagggtttcaaaaaccgccgggggcccggttaccgccacccggcggtacggcggttaccggcggtaaccgcggtaaccgcgcaaaaccgcgacaaatttacaaatcgaaatttgaattcaaaaattcgggcaaaccgcgcggtttgacgcggtaaccacgcggtttggcgcggttaccgcgcgatgtgtaatgggttgcacagtaacgggccggcccatttttttttctttttccaattttcaaatttattctccgttttgctctcaaatttgaataaatattactcttttttgagaaatttcttcaccataaaacactataaatcaagcactaccttcactattttttttgattttttttttttaaatttttgaatttggacgaattttattaaaccgtaccgcgcaagcactaccttcactattttttttgatttttttctttttttaaaatttttaaatttggacgaattttattaaaccgtaccgcgcggtacgggtaaccgtacccccgcggtacgggcggtaaccgcgccgcgcggttaccggcggtttttcacaccctgcctcctgggggtctcgaagatgcaggaggccaacccgtacactcgcggctgcagcaggatcaaccggtgccgcggctgacggacggcacgcgcgcgtcgcaattatacatgtgtatttgagtattgatcatcgacgacgacgatgagctagctggtggacgattgatttcgcgtggtggcgattggatctaattacccgtgtgtgtactactccgctcctccgattttaaatatactccgcaattattaacttgtttattttttgttttgttgttcttcaattctctaggtaatacttagatattagacacatgcatgcttaagtatatatatacgtcttcacttcaattaact

SEQ ID NO: 19030 - DNA, 1178 bp, Oryza sativa
  ref <308>: DATABASE ACCESSION NUMBER: AK069409
  ref <309>: DATABASE ENTRY DATE: 2001-12-06
tgagcccaccacagccgattcttctcctcttctcttccgcgtcgagctccgaggccgccggccagccgcgctgaaccatcatcccctcccgagctccaacaccgctggccacctacttgcccgacgccgctggccacctgcttgcccgacgccgccgcccagccccccccccctcccagagctccgacgccgccgcgccgagctctccgccgcttttctcctccttcccggcatgctagatgaagcggcacaaagggcggatccggcgaccacctcccgccctaccttggagagctcgtcgaccacattgagctctgatgccgccgccgaccagaattccaacccccatcaccgagctcgcgcttggatctagcgaggtggccggactccatggtggcggcaggtggtgggatggagtagcgcacggggatggggcgtggaggtcgccgttgccgtcgccattcccgactactagccacgccagcctcctcggggggaaccacgtctgctagtcgccgtcgccgatcccgctaccatcctcctccgtcacttccgcgtcctcgccgtcgccaccacctgcaacgcgctcggtggggccgatggtctgccactaacaaggccgcaactggcccacaaacggcggaagctagggcggtggcggtggcgcaagcggaggctggggtgtgcgacggctgtggtagttgaggcggacaacggcggcggatgctatggatgaggcccacaacagcaacggaggcggaggatgtggcgcacgacggcaacggcggagactgcggctgtgatgggtgatgatagcaatgatggagcttgaggatgaggccggcgacaacgatagaagctggaggatggaggtggagttggaggaaagggcattttggtcctatatgaaaatacggtgaccaaaaacgttttaaaaattgtcccatctacatagaatggcatgtatctaattctaggttcttgcagtggcatggttctaattatcgaatagtaatggcatatttcaaaaccacagaaattataatggcatgaatccaattaacccatcaaagaataaggctgttttctataattggatccatttcattaaaagtttcatagttttaaaatatactattactccctccgtttcacaatgtaagtcattctagcatttc

SEQ ID NO: 19031 - DNA, 495 bp, Oryza sativa
  ref <308>: DATABASE ACCESSION NUMBER: AK069410
  ref <309>: DATABASE ENTRY DATE: 2001-12-06
ggcgcgcagcctcgccctcctcggctactccttcctccccaagccctccccctcctcctccgccccattcctcctcctctccctgtccaccccggcctccacatccgctccacccgccgcctcccactcgcgccgctcgccacatccgactccttcgaatcctcttcatcctctgccgccgcgctcgacttcgctgagcccggcgccgccgaggagtccgacatgccggaggagtcttaccaggaggaggggtacgcaccggaggctgaggaggaggcagcggatgatgatgatgaggaggaagccgtcgaggcctccgcggaagttgcggaggaggctgaggacgtagaggaggtcggcacctcctatgaaaagtttgtaaatataatcaatttaccacaactatgaaaagtttgatcttaacaaaccttttgtatttacaatcagttgtaccatagcatatatttattgttgtttcccacaaatggtgggttt

SEQ ID NO: 19032 - DNA, 2027 bp, Oryza sativa
  ref <308>: DATABASE ACCESSION NUMBER: AK069411
  ref <309>: DATABASE ENTRY DATE: 2001-12-06
gtcatgacaaaaaccttcgagtgaagacaagaccctagaccgtctctctctctctctgaccaaggctagctagggaaggaagaacaaaaacagcataggaaggacaacatctttctctgaactgtgggattagtacgcccaagaacgtgaagctattacaccgtcagatatatcaagaagatgcaggcggagcaagagcaactgcgcacagaaacggtcaggcatgcctgctctccctcctgcttgtcataaaagggaagccacaagctgaagccagattgctagaaggtagttcttgaggactgaagcaaggtagaagaacttgagcttctggttcgtgtggagctactgggataagttggctgctgattgctgaagatgggagaagctagcagtagttcaggacatccaaggcagaatcctcatgttcttggctatggcttccatggagctatgcccaactccttgccttctgcaaacttgttcgagcagcaaggaggtgctaactattttggagaactagaagaggctctgatgcaacaggtggccacactcaggaggactcaacaaactgcaaccaccacctccacccttcatcatggagacaccacccccttctccaccactgctactgctgcggctacagctaggcctcctcctacactggacatcttcccatcctggcctatgaggtctctccacacacccaaggagggttcaaatgtgacagcagacacaacagactcggagagcagcagcaagaacaacagcaaccaaaatgcctcatcagaccagcatgtgctagtaggagacatggcaggccagttcgaccaaattccacagcaggaacaacacaagaagatggcaactaacagtcccactcatagcagcaagactggcaaggcgcttgatccaaagacgatgagaaggctcgcccagaaccgagaagcagcacggaaaagccgactgcgaaagaaggcttacatccagcagcttgaaagcagcaagctgaagcttgctcagatggaacaggatatccacagagctcgttcccagggcttactgcttggagctccaggtggaaacaccagctcaggtgccgcaatgttcgacgtcgactacgcccggtggctggaggaagacagccagcgcatggctgaactgcacggagggctgcacgcacatctgccggacagcgacctcagagccatcgtcgacgacacgctaacccactacgaccacctcttcaacctcaagggcatggcggccaaggccgacgtgttccacctcatcaccgggatgtgggcgaccccagctgagcggtgcttcctctggatgggcggattccggccctccgagctgctcaagacattgacaccccagctggatcccctgactgagcagcaagtggttggtatctgcaatcttcaacagtcatcgcaacaggcagaggaagctctctcccagggcttggatcagctgcatcagtcattagcagaaaccgtggctggagggtccccgttggatgaccccaacgtcgggagtttcatgggtcacatggctattgccctcggccagctatcaaatcttgaaggttttgtcatacaggctgataatttgaggcagcagactatccatcagatgcacaggattctgacagtcaggcaggcagctcgatgtttcttggccattggagagtaccataatcgcctccgtgccctgagctcactttgggcttctcgccctcgagagatactggtggcagatgaaggcaattgtggagagctaagcattgcagcacatccatctgagagccaatattcagccttctgaaatcctgtttcaaatgtattttgcaactaaccttcaaagtagggagcaaaagcttgttttttaaatgaaatctagcactctagcagatatgtgagaaactcagaagagagttgggaaacaatggaaggctccagctgcactagcaaaattttcagatggaatgaatgggattgcatgattttcagttactgatc

SEQ ID NO: 19033 - DNA, 2602 bp, Oryza sativa
  ref <308>: DATABASE ACCESSION NUMBER: AK069412
  ref <309>: DATABASE ENTRY DATE: 2001-12-06
gtaactataccaaaatcgaaggggaagaaggctcatcaccaccgtcgaaaacgacctgcacccaccgccaccgccaccgccgccgccgccgccggccggccaaggccaaccacgcaacccgccgtggccgcgacgctccacttcccccctgactccgtcctcccacccgcccaaccaaccgaccgaccaaccgagtgaacaagtgaccaaccaccaccaccaccaccatcgccaccaccgtcttcgatctctctccgcctctccggcatctcttcacggcggcggaggaggagggagcagcgacgatggccgtgcccacctccgaccagcgcaagcggcggcccttcctcctctcgctgtcgctcttcctcctcgtctccgcgctcctcgccctcgccttcctcttcctcgacccctcagcgcaatccctctccgtcctctcctcccgcctcaccgcccctactacgacgctcgcgcctcccgcggtcgtcgccggcggcgccgaagccggggagagcgccgacgcaaccgaaaaagccgaagagaccgcatcgcgaccagacgacaccgccgccgccgtcaacgccgacgctgcagcaggggaaggtggtggaagtagcgagtcgccacggctcgatgcggataagggcgccgccgccacggagggagtggcggatgacgacggcggcggtggcggggacgagccggcggcgaaggtgaggtgggagacttgcaggccggggagaggggtgtcgtcggcggactacatcccgtgcctcgacaacatgagggcgatcaaggcgctgcgctcgaggcgccacatggagcaccgggagcgccactgccccgtggcgccgcggcccaggtgcctggtgcgggtgccctccgggtaccggtcgcccgtgccgtggccgcgcagccgtgacatgatttggtacaacaatgttcctcaccctaaattggtggagtataagaaggaccaaaactgggtaacaaaatctggtgactatcttgtcttccctggaggtggaactcaattcaaaactggcgttacaagatacattcagtttattgaacagataatgcccaccattcaatggggaacacacacaaaaactgtcctggatgttggatgtggtgttgccagctttggtggatacttgcttgacaggaacgtcattaccatgtcatttgccccaaaggatgagcatgaagctcagatacagtttgcattagaacgtggtattccagcatttctagctgttattggaacacaaaaacttcctttccctgatgaggcatttgatgttgtccactgtgcaaggtgcagggtccattggtatgcgaatggtggaaaaccattgttggagcttaacagagttctcaggcctggaggatattacatttggtctgcaacccctgtctaccgtcaagaaaaaagagatcaagatgactggaatgcaatggttaaacttaccaaatcaatctgttggagaacagtggtaaaatctgaagatagtaatggaattggtgttgtcgtatatcaaaaaccagcatcaaactcttgctacctggagagaaggacaaatgaaccccctatgtgttctaagaaagatgggccccgttttccttggtacgctcctcttgatacatgcatttccagttcaattgaaaagagcagctggccccttccttggcctaaaagacttaatgccagatatctaaatgtgcctgatgattcttcaagtaccgacgagaagtttgatgttgatacgaagtattggaaacatgccatttcagaaatatactataatgattttccagttaattggtcatccacccgcaatgtaatggacatgaatgctggttatggaggttttgcagcagcacttgttgataaaccattatgggtaatgaatgttgttccggtcggtcagcccgatactttgccagttattttcaacagaggccttattggggtatatcatgattggtgtgaatctttcaacacgtacccacggacctatgatctccttcacatgagctatcttcttggaagtcttacaaataggtgtgacatcatggaggtagcagctgaaatagacaggatattgagacctgacagatggtttgtgttgagagacaccacagaaatgataaaaaagatgcggccagttctcaagtccctgcactacgaaactgtagttgtcaaacagcaatttcttgttgctaaaaagggtttctggcgttctggcaagtgagcctcctgatcagaatgacgctcaaatgttttcagggtagtcatcaacagcaaacaattcaattgattctttacatccctattgattagttctttatacagaagacagagtttgatcaaaccaaggattaggcatgttgattctacaaaatacttatacagaacagttagttcgacaaaaatacatatacacatcttgtttatggggggccattacagtaataggcttaggctagtccactagtgctcacaagtttgtaatcatattattattcttttacattcagaaacagatacttttcaggaaaacattatgctctttcacgaatacatcctctgtcc

SEQ ID NO: 19034 - DNA, 3201 bp, Oryza sativa
  ref <308>: DATABASE ACCESSION NUMBER: AK069413
  ref <309>: DATABASE ENTRY DATE: 2001-12-06
ggtcctcctcaaatattctcaactttcacctgcaattctaaatggccagagattattgaagctattcgttttgaggcagggcaaaaaccaagtgatagaagtgatatggtcacacatgtttaccatatgaagctagatgagtacatcacatctattaagaatggagaagccttcggtcccataaaagctgaggattgccgcattcccacacattaacatggctcacagctcaatctgaagaaccttcacctgcattcattgacaacctgatctgtgctgagataccagatataacagctgataggtttgggtttggtcttgttgatgaattcatgatacatggcccatgtggtgagcacaatccaagcagcccttgcatgaaggatggtcggtgttcaaagggctatccaaaatagttctgtgatgttactaccatagatgatgatggatatcctatttatcgacgacgcaatgatggtcgctatgtggtgaagaatggtgtttcactagataaccggtgggttgttccttataatccagctcttctgaagaaattccaagctcatatcaatgtggaatggtgcaataaaacataccttatcaagtacctttttaagtatataaataagggaagtgattcgactatgttcgttttcagccacaggacttcagaaaagacagaggctcatactgctagcgatggaggcataggtgaggttatgcaatacatcaaatccagatacctatcaacttgtgaattattctggagattatatggttttgagatccatggaaggagtccttctgttgaacgcctcattgtgcacttgccgaacatgcagtttgtgacataccatgatggagctgaccttgaagaggtcatagaagaccctgattcctctagaacaatgcttactgaatggtttgctaccaaccaacgtcacatctttgccagggatctcacctattgtgaatttcctaccaagtttagctgggatcctgagaagaaagtttggacaaagcgtaaaagaggaaccaagatagggagattaaagcacatccatccaagtactggggagccgttctaccttagaatgttgctcatgatagttcgaggatgtatgagttttgaagatattaggacatatgaaggtgtgttgtatggtacctatcgtgaagcctgtcaggcacgtggtctcattggtgatgacgctgaatgggatcacctctttgaggaggcagttatctgggctacttcataccagctcaggaaccttttcatgactgtactagcacactgtgatgtaggtgatgttagggttttgtttgataagtactggagatacatggtagatgattttgcttacaagttaaccaaagctcttggagtacaacgcacagctattccagaagttatgttgcaggataccttgctcaaagagttggatgccatgttctcaaataatggcttatcaatctcatcatacaatttgccaacaccagttgattgttcaggatccagtgcagcaaacaggcttatcttagaagagctttagctttaaccaacatagcctccatcaagaatctttgtccatgtatgccagcttgaacaatgaccagaagatgatatatgacaagatttttgacaggatagaccatcacgaaaagtgtattttttttatatctggacatggtggaacggggaagacattcttgtggaatgctattatggcaaacatgagatcaagaggtgaaattgttcttgcagttgcctcttctggggttgcagctctgctcatgcctggtggaaggactgctcattcacggtttcggatacctatagatatacatgaccggtcgatgtgtgctattcgtagagggacaatcctaggagatcttattaggaaagcatcactgattatatgggatgaggcgcctatgacacacaagctgtgctttgaggcattggatagaactctacgagatattcaatccgctgatgaaccagctaatgaatataagccttttggaggtaaacccattttacttggtggtgattttaggcaagtcttaccggtgattgagaaaggtacaagagctgatgtggtagatgcttcgctggttaggtctgcactatggaagcatgttgaagtcttacaccttaccactaacatgaggctacataatccatccctgtcgcagcaagccaagggtgaattggcagagtttgctaaataggttcttgacattggtgagggtcgtgctcccatgaacaaaagacaaggtgaggttgagaggacatggatagagatacctaaggagttgctgcttactccctgcggtgacaagattacagctataattgatgccgtgtacccggattttgaattgaactatgactacattccttacctttctcagcatgcaattgtctgtcctgtcaatacagttgttgatgagattaatgataagatgcttgctaaagtgcttggggatgcaaaggactatcttagcagcgacactatttcaaatacacttgaaaagcctgcagattttgatctattgtaccccatagaatttctaaactcaatatccataaacaatttcccgaaacatcgcatatccctcaaaattggttcagctgtagtcctgcttcgcaacattaaccaatcactcggcctttgcaatgggataagattgatggtcacccgactcggtgattatgttttcgagtccaaaatcatgactggcacaaatattggccagctggtctgtattccacggattgtcctaagtgggaacagtccaaagtggcctttcacgctccagcgaaggcagttcccaattaggctatgttatgcaatgacaaataacaaatgccaagggcaaactttggggaatgttggtgtatacctcagaaaccctgtcttcacacatggtcagctatatgtcactgttttgcgcgctacatcgaagcaaggcctcaagttgttgatagaggatgatgatggcaagccttgttccactacaggaacatcgtctacactgaaatattatcgttgctgtagattaatcttattgtcagtttgtcactgtgactgcagctaggatactttgctccttttgttcacctgtttcttctatgatcccatttctccgtgttactgtttgcttgtgtaacttaagcaagaactcatggcc

SEQ ID NO: 19035 - DNA, 1544 bp, Oryza sativa
  ref <308>: DATABASE ACCESSION NUMBER: AK099091
  ref <309>: DATABASE ENTRY DATE: 2002-08-28
ggcctcaaccactacaacacaaaaagcgagagagatctctcccgagctcgatccggtccaccgcgacacgaagacgaccatggcgatggctcgctcccagcttgccgccgtgttcctcgccgtcctcgtctcggtggcgccgctcgccggcgcggcggacaacctccaggacgcgtgcaaccggacgctgttccccaaggtgtgcatccaggcgctgacgacgaacccggagagccggacggcgaacgcgcggcggctggcggagctgtcggtgtacgtggcggcggaggtgggcacggcggtggcggcgttcgcgcaccacgagctgaacggcgtgaaggaggacgccctgttcaagtgcgtggacagctgctccgacgacatcgaggaggcggtggcgcacctcagcgcgctcacccgcgagctcaccgacgccaagttcctcgaggtcaaggcctggctctccgccacgctcggcggctcctccacctgcgaggacacctgcaaggacgcccccatcagcgagatcaagaacgccgtcgtcaccaagagcctcgagttcgagaagctcctccgcgtcacgctcgacctcatcaccgaggcctccggctccatgtccgccgacgtcgccctcccgcccgccaccggcggcggcggcggcggctatggctatgaatccagcagcgccgccgccgcgccggcgccttccgagtccgactccgacgtcggctccggctcaggctccgccgccagcgcgccgggcccgagcccatccgacgacaccggctacggcggctcctccggcagcccatccagcagcccatccagcagcccctccagcagcccctccggcagcccctccagcagcccctccggcagcccctccggcagccccgccggcagccccgccggcggccccaccgccggcggccctgcatctggaccgtcgtcgtacggcgccgcctctggccccgccgaagggccgtcgtcgtccggcgccgcctctggccccgccgaagggccgtcgccgtccggcgccgccggccccgccgaagggccctcgtcgtacggctccaccgaagggccgtctccatcgccgtcgtcgtccggctccgccgacgcgccgggacccggcgccagcgcaccggattccgaggagtactgagcgacgtacggcgcatgcatggctacacagatttttccttcttcatatcaccatttctttttctccagtcttctttgaataatccgttgacactagcgaagattatgatgggttgatcattaagcctacgtagaaaatccattgacataattattacaatggtgtatggggaaaaggggaaaaatattagtatggtttatgaggattatttcggatcaagaaatgaggcccatataggagagatggcatgtggccccaaatgggagatttttattttattttatttttttgggaaaaggagattttttttattattattgtaatattgttatatgttgtattggttttctttgatgaaattatatctgttctaagtgcc

SEQ ID NO: 19036 - DNA, 890 bp, Oryza sativa
  ref <308>: DATABASE ACCESSION NUMBER: AK069414
  ref <309>: DATABASE ENTRY DATE: 2001-12-06
acaccttcacaaccgatgctctggatgcactctacaagaagattaagccgaagggtgtgacaatgtcggccctgttggcgaaggcgactgcaatggcgctcgtgcaacacccggttataaactccagctgcagagatgggaagagcttcacttacaacagcagcataaacatcgctgtggcagtggccatcgatggtgggttgattacgccagtgcttcctgatgctgataagctcgacatttattctttgtcgaggaaatggaaggagttagtcgataaggctcgagcgaagcagctacagccccatgaatacaattctggcacctttactatttcaaaccttggtatgtttggagttgacagatttgatgcaatcttgccacctggaactggtgcaatcatggccgttggatcatcacaaccaacacttgttggtacaaaagatggtagtattgggatcaagaaccaaatgcaggtcaatgttactgctgatcatcgggttatttacggagctgatcttgccgcttttctgcaaactctttccaagataattgaggatcccaaggaccttacattttagacacatccagcaattgtttttccctgaggcaattgcgataggatatgcttccccgtagatgtgtagcatgtgtttctggtcatgtaagttagttgtttaagctgtcacctatgttggtatggggtaacttcactggctggttaccttcttatcattggtttgttcaataagcttttacaattttattgggataggggccgagtatgatacatattgcctttcaccggaagactgattttttattttgtcgagctcgatgtacaatggatccatgccctgaatacaacgaaatgaaacagtgttacagct

SEQ ID NO: 19037 - DNA, 2152 bp, Oryza sativa
  ref <308>: DATABASE ACCESSION NUMBER: AK069415
  ref <309>: DATABASE ENTRY DATE: 2001-12-06
gactttgttttgagtttggagggagagagagtagaggaaggaaacctccctccggatccaggaaatcctcatccatcctcatgacttccgacgagctcgccggtgagggtgaggtcgacggcgcggagctgatcctgtcgctgccggaggacgtgctcgggctcatctccgcccacctccgcccgcgcgacctcctcgccctctccgccgcctcccgcagcctccgcaacgccgtctccaccgccgacaaggcgtggctcgcccagtgccgccgcctcctccccaccgcctcccacctcctcgcctggcgcaccgccctcgcccactcctccctcgccgtctgccgcttcctccactccgccgccccgctcctcggcctctgggcccaccagaaccccgagctcggcaacctcgtcctcgccctccctggcttcctctccctcgtcgccgtccgctccatcccccaggagctctccccgcgcctcctctgggcccccgtcttcgagctcctcgccgaccaccgcggccaccccgccttcctcttcctccacggcgccgcccacgactccctcttccccggcctcctctcctcctccctccaccccctcgccaacaccctcttcctcgaggcccacacctccacctccacctcccacttctcccgcctcgccttcgccgaccgccgccgcctcctcaacgccctcgtcgccgcctcccgcctcaccctcccccccgatgtcgccactgccccgctcttcgcgcgctccgacgccgacctcccgctgctcgccgcgcgccgggaggccatgctgcgcctgcacagccagtctggcgggggcatggtgcgcagggccgagatcgaggcgctgctgatcggggccaggaagacggcggcgctgccggccgacaccgccggcgacaagatgcggctgcggaggaccttctcggtggtcgccggttttgtcaggaacagcctgcggcagatggtgacacggtcggcgtccgccaattccagggctgagtacgcccaccccaagcatctgccattggacgagttcctgcgagccggagagagcgtcggcctgagcctccgtggcgcgcggatgaggctgtctatctaccggaattggccaagcatgcatgacaaccggtttgtgctctacaagctgacgacgcaggcgcccatgcctggccgggagtatgccggtttgtggggaggcacattcgggtggccgccagggcggccggaggatgagcgcaaacctggcaaggctctcttcttcctactcctctcctatgaggaggacagcgaagggaagcttcagctgattgcaaccaaggtgttggagggtacacactatgtcgtgcatccgaatgggtcctctatgtttatcgtgcgggtcggtgagccatccactgagacttttccgtggcaaaccgatgaggagtcgcgtgctgtggagatcaatagaagctttgctggtgagggcattgccaccgggtatgggttcaggtatcctggctcaaagcccggatcgctctttgtcctcctggatggccggcttgcatttgtttggagagagaacaaagctgttctcaccttgcaaaggctggacctggaggatatgataaggagaggggagcgtgtgccttcattgccgccgatacccaacttcgcctacctcacaaagtcttactccaatgtctttgctgtggcacctggcagcacgagcttcccagcttctccaaggtaaaagatggcttgggaaccgttatgatggtatcacctgatacagaggcaacagcgacagatctttgcgggatcatgttctactgtgcttccttgccatacgtcttgtactgaagatctgaatcccacatttttcaccctgaacctgaaggttggccatcaccgtacgttgatctgagttgatgtaccgctgctgctgctgttaatggaagcagcatggcagcagtgttaatatggtatatattggtaccctgaaggaaatgcagccaactccatctgtatttcccttgttactgaactggcatcttcatgcctgcagtaaactaaaatgtcaaaatttagcaaatgagctacagtcgcagatccagcctcctgatgataacatcatgaggtgttaaactg

SEQ ID NO: 19038 - DNA, 939 bp, Oryza sativa
  ref <308>: DATABASE ACCESSION NUMBER: AK069416
  ref <309>: DATABASE ENTRY DATE: 2001-12-06
gggtcgcgcgcgcggcgccgccgcgcggccatcgtcgcgcgctgcctccacctcgccgactcgccatagcccatagcgaagcaatcctctcttcccgtctcgtggagagccgaaggtagccgatgcggctagagctaaaaccctagcggaaggtagccgatggacgcgctcgtctcggcggcgctggaggaggtgagcgcccgcctctcggccggcatcccggtgaccgatctctgggcggcgctccgtggcgcgctcgaggcggccggcctcccaattgggccggctgtcaagcgcgccgtctgggcccgcctcatcgtgctccccgtcatcagcgtcgtgctgggggaggcggaggcggaggtggaggggccggtcgtcgacgatcccaaggtcggcgtggaggacgccgagcggctgggcatgcggctggttgcgagcgccgcgctcagggacaacttccttggcatgtatgatctcaggcactccaaatcggagatgagtgccgtccagaagaaggctttacaacgtgtcggggcaagcaggacttctggtgtaacacaaaatgacctgtgcaaaagttttggcatggaagggaacaacttccattatattgtgcaaagccttcagtcccagaagttaattgttagacgatcaactattataaagtttaaaggcaatggagctgagaaggaagatgcttcacagaataaacgagtaaccaataccaactcattgtatctcactagatatgccaaagactgtatgaattcacaccagagaattgagattataaagcccggactattggtgagcaatgaagagaccaacttagatgatctacaagatgggacttttggtgtaaactccgataatgatgtatctatccatgattatcttccagcaatgaaagccatttgtgacaaactcgaagaagcc

SEQ ID NO: 19039 - DNA, 1446 bp, Oryza sativa
  ref <308>: DATABASE ACCESSION NUMBER: AK099092
  ref <309>: DATABASE ENTRY DATE: 2002-08-28
ggatgccgctctcctactcagccgccgccgccgccgcgccgtcccctctcgccgcgcgcagccgcggcctcctccgccgaccgccgcgctcttcccccgtcgtcgtgaggtgcaagaagattgatcaactgagggcagtcaatggaataccaccatacgctccagtgtctaacagatcgttgttaagtcctgtgacgctgccgattatccgggatgcgaatattaagaatgatacaaggttgcgtatcttctcagggactgccaacccttctctttcccaggaaatagcaagttacttgggcttagaacttgggaagattaacataaaaaggtttgctgatggcgaaatatatgttcagttacaagaaagcgtaaggggatgcgatgttttccttgtgcaaccaacgtgccctcctgcaaatgagaatcttatggaacttctgatcatgattgatgcctgtaggagagcatctgctaagaatattactgcagtcatcccttattttggttatgccagagctgacaggaagtctcaaggccgtgaatctatagctgcaaaacttgtagctaatatgattacagaagctggtgcgaaccgtgtccttgtatgtgatcttcattccagtcaagccatgggatactttgacatcccagtagatcatgtttatggtcagcctgtgattcttgattacctcgccagcaagacaatatgttcagatgacctggtggtggtgtctccggatgttggaggtgttgccagggcacgtgcttttgccaaaaagctatcagatgcacctctagcaattgttgataaaagaaggcatggacacaatgttgccgaggtaatgaatcttattggagatgttagaggaaaagtggctgttatgatggatgatatgattgatacagctggaactattgccaaaggagctgagctgctgcatcaagaaggagcaagagaagtctatgcatgctgtacacatgctgtttttagcccgcccgccattgaaaggttatcaagtggtttgtttcaagaagtaatcatcacaaacactatacctctcaaggaggacaagagtttcccgcagctgactatcctttcagttgctaaccttttaggcgagacaatctggcgtgttcatgatgattgctcagttggtcatgagccatactctagcttggacattgactgaagctcaaggtgtatcacgcccaatccccaatttttggcttttctccacctttggtttcgtggaataagctgtgtaatctgatgctcctactagtgcaagaacttttgagtatttcaatgaaccatagtacataagatcgaaatttaggtagtttggtttgctagcatgctcagtgtaatgtacatattgtttccacgtgatccatttatttctttgcaaagatcaatgctgaatggttcaatttattttctcc

SEQ ID NO: 19040 - DNA, 1217 bp, Oryza sativa
  ref <308>: DATABASE ACCESSION NUMBER: AK069417
  ref <309>: DATABASE ENTRY DATE: 2001-12-06
gaggataggtacacagtgttactgtagattcctgaaatgcccttgtactactcgccttctcttgctgcagactattggggcactcgcggcgagcttgtccgttgagaggcggcgaggttgcgcccgaccaccgcgcgatgtcaaccctgatcatagccaagatgagggccggtactaggggctcggccactcgagcttgactcccggggcgaggttgtgcctgaccgccggtgagctgcgacgctgtgacgagcttgatcccgactgcatgaggcgtagtgagtgcctcaaccagtctctcatggcgcgcatcggcgcatcaacgtcggggaggagtgagtgagaggagtgaagatggggaggtgtgtggtcataggagtgcgaaggtcaacgccgatgggggaaggacctgcggtcgccagatccggcgaccccacctctcgcaggcgatagatcggccggctcccgttcctcccaatgtgggatctgcgcgcctacgacgagcagctgctcatctcggtccgtgcctcatcgaagtgaggaggcacttgctctgattatgtgttgacgaggacggcgcaggcgcgcagcccggcgtccggcggtggctgcttccgtggcctcaagtgacgctgctgaagctgacgatctgggcatcaggcatatcaagctgcagcggaaccggcggtgagcacaaatctgggagtcgcaatcgcatcccccagccagccgacatgcacgatttctgcagcttcaattcctcatccttcaccgcacatcttcctccaaatccctctctctctctcctctcctctctgccgagtaaaccgtcatcgagagaacattagttagctcttgagaaaaatcccagtttcatgtgcgtatttgtttttggtgtgctgttttttttttaatttctagttctcgaagacttttgctggatactatcttcttcccatgcttctcgcaggctatcgtcttcaatgtgttgatgtgttccgatatgtaatcctaacaatcttcttgctggtgttttttttttccttgtggtgtgcactccgctgactcaggcatgctgatcgatagccatcgactccaggaagttctgatcagccgcaccagaggcttgcgttgtgaagaggtgcaaatcgctttgattcagtgatattcatgaaagaacctctgtttgcgctcaatgggatatcattttctgattt

SEQ ID NO: 19041 - DNA, 2075 bp, Oryza sativa
  ref <308>: DATABASE ACCESSION NUMBER: AK069418
  ref <309>: DATABASE ENTRY DATE: 2001-12-06
gggaggaggtggaggtggaggtggtggtgtccgctgccccccgcaataaataagcctacctccatgttcccacccccctctctctctcttctccgtctcgcctcgtcacctcacctcggcatcacccaggtgggagggggtccgccttgacttttcgtgttcgggtttgggtttgagtgccgcatctgcaagcttgtgcgaggggggaatctctcttccttgctgtggtggcggcgggcgggagggcggcgttgatttcgttggggtttgcgttgcgtgcggaggacggggttgtgtttgtgtgtgtgtttgtgctgatttgggcattggtgttggtggtggaggaggatggggaactgcgtggcgaggagcgggacggcggtggatgcgggtggtgatggaggggaggatgggaagaggcggaggaggaggtggaaggcgccgcgggaagatcagctcgggatggtgcccggccggatcttctccaacgacggccgcagccggacggcgacggtgtacacgcagcaagggcgcaaggagatcaaccaggacgccatgctcgtctgggatgggttcggcggcgaggacgacggcgtgctgtgcggggtgttcgacgggcacgggccgcacgggcacgtggtggcgcggagggtccgcgactcgctgccgctgaggctcatgtccgcggcgcgcgacagcggggcggacatgccggccgccgcatggaggaaggccttcgcgcgcgcctacaaggccatggacaaggacctccggtcgcacccttccctcgattgcttctgcagcggaagcactgccgtcaccgtcctcaagctcggctcggatctctacatggccaacattggggactcgcgcgccgtgctcggctccagggaggccaccggcggcggcatggtcgccgtgcagctcaccgttgatctcaagccggatgtccccagcgaagcggagaggatcaagaagtgcaggggcagggtgttcgcgctgcaggacgagccggaggtgccaagggtctggctgccgttcgacgacgcgccgggcctcgcgatggcgcgagcgttcggggacttctgcctgaaagattacggggtcatctcggtgccggaattcttccactggtctctcacagaaaaggaccagttcgtcattcttgcatcggatggggtatgggatgtcctcagcaatcaagaggctgttgatatagtgtccgcgtccccaagcagatcaaaggctgcaaaatcccttgttgaggcagccactcgtgaatggaaaaccaaatatccaacatccaaaatcgatgattgcgcggttgtttgcttatatttggatggaaaaatggaccatgagcgtgactcaactgcctcattggacaacatcagtattgaagagggttcagttgcagatcctaatgaacctcaggagcaggagcccaccttaactcggaatttcacagttaggacagttgcaggcagcacgcaagagaagaccttagcaggggtggatgcgaggattgctggtgtagcgaacgaccaaaattggtcaggtctcgatggagtgacacgggtaaactcacttgttcagcttcctaggttttctgaagagagggcaattggctgagctgcccatcttatatttacccccgttattttcacctattgttctgaattttagcgtagttgttctagagaaaggtagatgtgggacgatcttgtgatttggtgcggtacttggcaagcgtttcagccactatgcatagaagtcgagttgcacgttttagcccaacaaaactgcacattgcataggacagaggctctcttttcacccatcttgaggcatgtcaactccatacctcgaagatgaagcacaaaagagcaggccattgctccaaatctgcaattttgctgggttaaaactaacaaaagacgacgccaaacacagtggctaaacgcacgccaggccccagtcacccctgggatgatattgtcgggtgacttgtaaattctccaccggcgcttgctttgcttttgtagagaggtgatgtccagaccattttctccgct

SEQ ID NO: 19042 - DNA, 2423 bp, Oryza sativa
  ref <308>: DATABASE ACCESSION NUMBER: AK069419
  ref <309>: DATABASE ENTRY DATE: 2001-12-06
ggtggtccgcccatccacccacccgcgcaccccgccggcgacaacggcaatcgccatggctcgtcggcgaatcgccgcccatggtgaaagcgcggcgaccggttaccggcgcagtgccagccgagtgctggggttgccgaggtccaagcggcggcagaaggcgggcggcgcttgggattgggaaggaagcgggccgtcgcggcaactagggcttccgcggctaggagaatattgcttggcttcaaatcacaatgtactaatggcaattcacactggttatgaagataatccaaagcaagtgctacatccaaggctatattaattctttgtcttaaagtcagcacctttgtttgactaatatgttcatgggattttggatgtaaccacatatctaggttcccatttggaaaatatgggaacactatagccttgaagtctgccccagttgaatccacagaagagcatagagtaataattttcacgagatttcggtggcggacattttgtagggtttcacactcggcaacaaagctcttattagatccatggatatcaaggttaaaaatcttgatggcgatatgttcttcctgaagatgcagattgtccttttctttgaaaggaagatgcagattgcccttataaactgttccaaatgatcctgagccaagtaagttagttgaagagaatctatttgtggcctttagaacatcttcatacgttatgttcctgtgctcattcagctgttgtacatgtggctctgcttgcattctcttcgtccaaatatattttgcaaggcataacaaagtgaaagtgatagcaacaattggtattactgtcgttaggactagaaccaatgacctatggttccttttcttgtcaaccgattttgaacaaagaggcacacctctcattggagtttttgtgcacagataatcatttccttcaattgataccacactagcattggcaaaaataccactggttggcactgctccatcaaaattattgaatgataagttgagaacttgcaaagaatgtaacaacgttagaaactgtggaatttctcctgataaattgttatgagatatatccatcaccttgatgcctaccatgttcacaaatgtttgcggaatgcttcctacaaagaaattgctttgcatctcaagatactctagaaccacgcattgactaagagtggatgggatatctccagacaatctgttgtatgaaatgatgagcttattcagactgacaaggttgcctacttcatctgatatgcttccggacaagtaattgtatgacaagtctaacactattgaaagtgaagaaattttaaagatcgtctctggtattgttccatctagtgaattgtgagcaaggttgagtatttcgagttgagtacaataccctatactcacaggtatgcttccactcaagttgttccaatccaaatttagattattcagctgaacaagtttcccaatgtcatctgggatttgaccagagagtctgtttcgagcaaaggacagtttgcctaatttgcgcaaatttccgattgttagaggtattttttctgacaattgattgtaatccatgtacaattcagtgaggctcttaagattgcctatctcttgtggtataggtccggaaattttattatttgttagccacaatctttggagatcactagacagattgcctacagaacttggcagatttccttgaagattgttcccatccaacatcagcttagtcaatcttgtgcaatttgaaagtgacgagataaagccccagtcgcctgcttctagcatgttgtatgccacgtcaagatcctccaagtttgtcagtgatccaaaggatggcatgatcccagttaacttgttgtcagctaggtatagcatttgtagatgggttaaattgagaagggaagttgggattgagcccttaaacttatttgctgaaagaattaagccttcaatgtttgggagtgtatagccgatgtctagaggtaatcttccggtgagtgagttatttgccgccaccagagatgtcagggatgacatattgaagagagatggtggaactgctccagaaaagttgtttaaattcaagttcaattcttctagtgttggaatatgtcctaagctctctggtatgctcccatctaaacaattctgtgaaagacgaagataaagtagggaggaaaggttcccaacagaggaaggtattgttcctgtgagacagttttctcctaaatcaagatattgaacttgtggagacacggttttaacaggtggtatagaaccggaaaaattgttctggttgaggtaaatgctgataagtgacaacgtgttgagtagagcctttgggagttctccactgagactattgctattgagaatgagttgttgcaaagatgaact

SEQ ID NO: 19043 - DNA, 1939 bp, Oryza sativa
  ref <308>: DATABASE ACCESSION NUMBER: AK069420
  ref <309>: DATABASE ENTRY DATE: 2001-12-06
tggctggatgactggatggatccccactctccagcaatggcggcaaggttgtacttcccctatcctagcagcgatgacgtccgccacgaagtgagaaggaagccgagcgcggccggcgatggagcggccaaggaagccggcggcgacagctgcggcgccggccggatctggagacgtcggcggcagcggcggctcgggttcttcctgcaatggcggcgactgacagcaacgttctgtctgcttctttcgatccagactacatacttacacatggagacatttctgtctgcaattctgagtgatcttaccagtagatccatatctttccttgtcaacaagtgctcaaaaccaacaactccaactgtggaggagagactacaacagttgctgctccgggcacgtgtaatcgtagaggaggcagatgaacggttcatcacaaaccaagccatgctgcagaaactgaacatactaaggaaggagatgtacagagggtattacacactcatctgcttcagatgccataacaatgaagaagacaatgtcaaagatcgtgaggtgagttactattttacaccttccaagttaaatcctgccaagcgtgtccgattctgcacgggcagtggccagactttacgagatcagctgcagcaagttcttggcagcctacaagtcacccttgaagatatgcgcgagtttctcatgttcttcaacagttgtcctcatttatgccgacagccatatagcatgcacttgcttttagacaggtgcttgttcggtcgtcaaatggaaacggagcacatcatgaacttcctgctcaaagaggacattcccagtgctgaaaatctaggtgtcctgccgatcattggcccaggaaaagttgggaagagcaccctgattgagcatgcctgcgaagatgaaagagtgcgtaaccgcttctctcaaattgtgtgttttaacgacgatgatgtaggacatgcaaacatggtggctcttagagattgtggtgtaattaagcataaaaaccattctattggtggagacaggatgctaatcattatcgaattaatgggagacattgatgagggtgtatggggaagattgtactcagcttccaaaattagtgttgcagttggaagtaaaattatagtcacaagccgatctgataagattgtaagctttggaacgacacaagttctcagagtaaatttctttactcaagaagcttattggtactttttcaaggtgcgcacatttggaagcttggatgcagaggagcacccaaagctggcatcattagccatggatatcgccagggagatgaaccagtgcttcatgggttcatgcatctacagtgtgcttctgaaagcaaactttaatgctcggttttggagcatggcgctggcaagaatcagagaattcaagctgaagaacaacttaatatacaacgcgtatcttgttggtggtccttgggaggcggttaaacctgcatatgttcggacggtaaacaaaatttcctctgaatatcttgtggttcttcacgactatcagacactctctgttccaaacatggtccattgttacacaaactctgctcagagtgaaggtgaagtccccgaggtcagtatgcaagattttctcttcggaagtgttaagcctcaaggaaaattcaaggttctcgcatggagatctcaccttccacctcactacaactacattttcaactgtgaggtacggaggccacatcatatggtcaccagtaagaagagatctcataagctttgcacctgaccatctcagatagtaatccatattgttaggttgtggtaccttttagtatctaagctacgagatcttgttattgtctgaaactgttgtataaatatgagcatctgtgtacatccaagctcctatgtaaatgtgatattttcatgaggttgcc

SEQ ID NO: 19044 - DNA, 766 bp, Oryza sativa
  ref <308>: DATABASE ACCESSION NUMBER: AK069421
  ref <309>: DATABASE ENTRY DATE: 2001-12-06
gaggaggtcatactcgtacgtacgtacacatctcgaagaaccaccagctgtgagatcgttcgacgactttggatcggatggctgctggcgtgggcaaggtgggggagtggatacggaggcggatgatgccgcggaggagcaagagcaaggcggccgggagccggagccggagcgagggcgacggcggcgaggccttgccggcgccgccgcagaggaagctccgtgcgcgggcgttgccggcggcgctgcggtggcgaccgcgggggcgcttgctggcggtgctgtacgagaaggtggtgtaccacctgctgtggctggtggaatccatcgtcgtcgtcgccaggctctgcttcttcgtcatgcgcttcggcctcaagcagctctgagctctctctcattggtctggattctagggctagataaatttcgagaaaaacagttcgagatgtttggatttcgcgaaattcgttcgaattttgtcgagattgtctgctctgggatcgagaaggagaagcggggggagaacaacaaattgggagattttttgaagtgtcccgttgattctttcttcttctttctttcgcgctaatttgttttgccacttttgtgtggctttattttcagagaaactgtaagtatcctgctgtctgtgtatacgaggaattgtctttgttttttaatccccttgtgtaaatgtaaatgtttcatctgatctctgcccgtaaaatgttgtgacttgaatgaaaatacctgtgaatatttctgg

SEQ ID NO: 19045 - DNA, 2192 bp, Oryza sativa
  ref <308>: DATABASE ACCESSION NUMBER: AK069422
  ref <309>: DATABASE ENTRY DATE: 2001-12-06
gaagcggccgccgtcggggtcgcaggtgccgctcaagaagcggcaccagccggagaagggcggagggagaggtggtggtggtggtgggtggaaggagggcgacgacgatgacgacgacgacgacgacgacgagctcgacgaggggaggcgcagcggcgatgactcagacagcgcgccgtcggtcgggagcgacctgtacaaggacgaggacgacaaggagcagctggagaagatgtcggagctggacagggagatgatcctggcggagcgcggcgcgcggatcgacgactacaagctgaagcagctggcgagggcgtcgtcgtcgtcgtccaaggcggacaagtcgcggagggacagcagccctccgccgccgccgagccgcgcgcggtcgtcggccaggaccgacaggtccgccgccaagagcgcgctggacgagctgcgggccaagcggatgaggcagcaggacccggaggggtaccgtaacaggttcaaggatttgatcccgcagagcggctctccgccgaggcgcagggccggaagcccgcccagcgacggtagtaatgatggtgataacagggggaggatcaccgatgaaacccgggatgatgagtttgatgaatcgccaagcaggcttgaccctctgaagtttgacgatgtgaagagtataaccctcaggagatcaaagcttgtgaaatggttcatggagccgttctttgaggaccttgtgtctgggtgctttgtgcggcttgggattggcaagtcaaaatcagggacccctgattacaggctatgcatagttagaaacgtggatgcgaatgaccctgaccggaagtacaagttggagggctacacgacgtgcaagtacctcaatgttgtgtgggacaatgaggctaatgctgctcggtggcagatgactcaagtatcagactcctttcccagtgaagaggagttcaagaagtggctacaagtggctgagaagaatggtgtgcgagtaccgactcggcaggatgtattggagaagaaagaagccattcaacaggcctacaactttgtgtattcagcacatactgtacagaagatgctaaaagagaagaaatcagctatcagacgtcctatcaatgttgctgctgagaaggatcggttgaggaatgagttggatatggccattgccaggagggatgaagctgaagcagaaaggatccgttcaaagctcaatcagctgcagaagatgtcgaagccaatatcaaataatgagaaggctgccaagttggaggcgatgaacaagaagaaccgtgctgagaacttcaagaacgcatcagaaatgaagcccgttaacacgagtttgaaggttggagaggctggttatgatcccttttcaaggagatggacaagatcaagaaattactacgcagcaaagcctgaaggagagagcgctgaagtccccaacgggaacgatggcagcgcagtagctggcgatgaagatacgaagaacgggccgcgaggtggttcagcagccactgcagcggctctagtggcagctgctgatgccggtaagctggttgataccaatgcacctgtagatctgggaacggaatcgaatttgctgcataattttgagctcggtatatcattggccggcctggaagaattcggcggtcccaagggtctcttcgatggttacatggcgaggaagcagaagattgaagcaaccatgggttacaaggtccctgacaatgatggaaggaggcatgctctaactctgaccgtcagtgactacaaaagaagacggggtttactctgaacttctcaagttatctgtgcctctgcctgctgttcgatggattcatctgcctctttggccacaaagttcatcagctgatcggcaccatgccattgtgactacttgtccagatcaatttgcattttagccttgagtgtatgtaacatgatgagacaagcaaggttacacattttcttttcataaacaggacctgtatgcctgaattgtgttgatgacaatttccgcattaatatttgtggagtgagtccttctgttatttagtttgttacccttgttgctctgcataaaacatttatgcagcggatattgggagactagactaagaggtacaaatattctatgttgtatacttatatgccaaaaggaaaaaaaaaacatgtgtcaagttatg

SEQ ID NO: 19046 - DNA, 2350 bp, Oryza sativa
  ref <308>: DATABASE ACCESSION NUMBER: AK069423
  ref <309>: DATABASE ENTRY DATE: 2001-12-06
gctagcttcgccatccacattcttcttgcttcttgctcctctctctctctctctctctctctctctctctagcttcctgctgcatcttcctcagccatctctttcatcctcccagtcgtcccaggctgcttaattacatatatctagatatatatattattcttgttaatttcgatccatcagtgtgcaatatatatatatagttttacctctaatatttagcttcttaatttctcctcatttttctgcctgtgctactgcatacatgcgttaattcatggtcgccatggatcgcatggagatccgtttctttactactccacttgttttctctagctactagttttctcttcttcttttcatcaaacaatcaatcaatcatatcccgttctatcttcacacatcaaccccgttccctgttctccgttctctctcagctgcagctagctacctctcctcctctcttccgatctctcatcaggatcggatcgaggagggaggagggagaccaacgatcgatcgagccatccaggatttactagtcaatcaacaactttatatatcatgcagctgatgcatccacacatctagataacgagctagatagctagctagggatcgagaaggagagagaatatatacatactgcatatatatatgcacattgatcgagcaactaatccagacagggatcgacaagagaacaaaagttcattcatgtctcctagctagctactcttatctgctacctatcgagattcatctttggatttctacaaggattttgatcacatcatacactgattttaacccaaccaaccacgactgatcaaaccaaggcaagcagaggcaggctctcaaatatatagatagatagcgatcgatcgatcgaaatggatggatctagtatgagcagcagcagcacgcagcagcaggcgcaggttcctcctggatttcgtttccacccgacggacgaagagctggtggattactacttcggaagaaggtggccgcaagaaggattgatctcaatgtcatcaaggacgtcgatctctacaagattgagccatgggatctgcaagagcgttgccggatcaatggcgggtcggcggcggaggagcagaacgaatggtacttcttcagccacaaggacaagaagtacccgacggggacgaggaccaaccgtgcgacggcggccgggttctggaaggcgacggggcgagacaagcccatctacgccaccaagcagcacagcctcctcgtgggcatgaggaagacgctcgtctactaccgcggccgcgcccccaacggccacaagtccgactggatcatgcacgagtaccgcctcgagaccaccgagacggccccgccgcaggaagaagggtgggtggtatgccgggtgttcaagaagagattacccacaacaagaagagattcagaccatgacgcaccttgcggcagctggtacgttgatgaagatgcaccgggcgccttcatgtctccgatgatgatcaccagatcatcaatattgcgcccacaccaacaccacgccggcatcacgctgcaagagcaacacctccacaccacttacaagcacagagacctcactactaagattcagcagctccaagtccctgcggcaggccatcatctcctcaacaccatgccccatgacctggagagttctacttcctccttccattctcttttggtctcacctgatcaccaccaaatcaacatgcaccatgctcaggctgatcccttctttgacgacatgcatgcagtcgatcaagccactaccactgactggagagttcttgacaagtttgttgcctctcagcttagcaatgatgctacaaacaagcctgcggatcattatactgatgaaggagacattcttcaggtcagtgacaagcagtaagaggtggcagccgccgattatgcgtccacatcaacgtcaagcagccaaattgatccatggaagtgatcgatccatgcatgatcgatgccctgcacgcatttaatcaagatatattatatcttatagataaaattatctcaataatgattatgatcgtatcgtatcaattggacagatcgatacaagtggtttgagctacatattaatgccgtgtaaataagactactctagctagtacaacgtgtggtgtttgtgtgctgcttatatatatattgaccttcgtacgtgtgtttctatatgaaataaggtcatggaggacaaattaaaagcttcatgaatataatcgtggtttgtaatagataaacctcttctgctatgtgattgtaaacttctggtgtttcaacatatgtaacaagtacgccaatatgc

SEQ ID NO: 19047 - DNA, 1982 bp, Oryza sativa
  ref <308>: DATABASE ACCESSION NUMBER: AK069424
  ref <309>: DATABASE ENTRY DATE: 2001-12-06
gttccctctgccccctcgccttatccgcatccccaaccgccactacaggcagcggcgcagcaccagagagcggaggcggcgggaggagcgggattcggagggggagcgcggccacggaggggcacacgggggcgcaacagggtcgggcgctcggcgccatggatgctaagaagggctcgggggagccggagttcttcagcgagtacggcgatgcgagccggtacgaggtcaccgaggtggtcggcaagggcagctacggcgtggtggccgccgccgtcgacactcacaccggcgggcgcgtcgccatcaagaagatcaacgacgtcttcgagcacatctccgacgccacccgcatcctccgcgagatcaagctactccgcctcctgcgccacccggacatcgtcgagatcaagcacatcatgctcccaccctcccgccgcgagtttcgcgacatttacattatcttcgaactcatggagtccgatctccaccaggtcatcaaggccaacgacgacctcacccccgagcaccaccagttcttcctctaccagctgcttcgtgggatgaagtacattcatgccgccagcgtcttccaccgggacctcaagcccaagaacattcttgccaatgctgattgcaaggtcaagatttgtgacttcggccttgctcgagtgtccttcgacgacactccgtccgcgatattctggacggattacgtggcaacaagatggtatcgcgctccagagttgtgcggctctttcttttcaaagtacactcctgcaattgatatttggagcgtcggttgtatatttgctgaaatgcttatgggaaagccactttttcctggaaagaatgtggtacatcaattggatctcatgaccgacttacttggctctccttcaggagaaactatttccaggattcggaatgagaaagctcgacgatatttgggcaacatgagaaaaaagcctcgagtgcctttttctcagaaatttcctggtgcagacccaatggctctccatttgcttgaacggttacttgcttttgatcccaaggatcggccaactgctgcagaggccttaacagatccatactttactggattggcaaattcggaacgtgaacccatagcacaacccatctcaaaactcgagtttgagtttgagagaaggaagctagcaaaagatgatgtccgggaattaatttacagagagatattagagtaccatcctcagatgatgcagaaatatcttcgtggtggggatcagtcaaactttttgtaccccagtggggtggatcgttttaagaggcaatttgctcatctagaagaaggtgttgctcagggtgacaagactagcccgcagctaaggcagcatgtttctttaccaagggaaagagttgttaggaatggtgatgaacctgatccaactgcagattactgcataaagttgcatgtaggtgagcaaccggggcactcatcagtgacagatggactgaacaagccactcttaagtgctcgtaacttcctgaagagcgaaagcatcggtgcttcccagtgtgttgtcataaaagaaaagcgagaaaaagatgaagaatctatgtcagaatatatgaatgaagcagctgatggggtgccgcataagattgctcaattgaaaacataagtatctcttactgtacaggtgatcaatccatatagcagcacgtagatatagtctaaacttaagaagggcagataaatgaattagatatttaagtagccacagtttttctcggctccttgttgggatccatgttgtgttgaaatctctcccctgattttttcgaggagctaagatatatttgacttcagctcctgattttagtcgatggatttcactgtcaccctatactttattcttagccgagcataggagacttagtcactgattagatcatgtaactagtgataacaatgtatcaacatatgcatgaattaactc

SEQ ID NO: 19048 - DNA, 3386 bp, Oryza sativa
  ref <308>: DATABASE ACCESSION NUMBER: AK069425
  ref <309>: DATABASE ENTRY DATE: 2001-12-06
gctccgcccctccccgtatctctcgcgtttctggtctaagttccacgccacttgttgccgcattccttctccctccctgcaaatccaatccaatccaatcccaccccaagctcgcggaggaggaggaggaggagatggggagaggagggatcggcggcgcggggctggtggcggcggtcgcgaaggcggacgtggagaacaccgactccacccgcggcttcgtcaaggacgtgaagcgcatcatcatcaaggtcggcaccgctgttgtgactgggccgattggccggttggctatgggcaggctcggtgctctgtgtgaacaggtgaagcagctaaattttgaggggtacgaggtgattctggtcacctctggtgctgttggtgttgggaggcagaggctcaagtaccggaagctcgtcaatagcagtttcgctgatctgcagaacccacagatggacatggacgggaaggcctgcgctgccgtcggtcagagtgtgctgatggcgatctatgacacgttatttagccagcttgacgtaacatcatctcagcttcttgttacggatcgtgattttatggatccaagttttgggaaccagctccgcgagactgttaattctctgttagatctcaaggttataccagtatttaatgagaatgacgccatcagtaccaggaggcaaccatacgaggattcatctggcatattctgggataacgatagtttggccagactgttagcgcaagaacttaaagctgatctccttatcatgctcagtgatgtggaggggctctatagcggtccacctagcgatccacaatcgaagattatccacacatacgtccatgaacaacatgggaagttaattagctttggggagaaatctcgtgtgggaagaggtggaatgcaagctaaagtagcagctgcttttactgcttcatcaaaaggaatacctgttgtaattgccagtggatttgcaatcgatagcattattaaggtcatgcgaggagagaaaatcggtacgcttttccatagggaagcaaaccagtggggttgttccaaggaagcaacagcgcgtgagatggccgttgctgcaagagattgctccagacatctacagaaattgtcgtctgaggagcgtaagaagattttgctagacatcgccgatgctctagaagcaaatgaagatctaattacatccgagaaccaagctgatctggatttggcgcaagatattggttacgataaatcattggttgctcggatgaccataaagccaggaaagataaaaagcctcgcaggatcaattcgtgaaatcgctgatatggaggaccctatttcccatacactgaaaagaacagaggttgctaaagatcttgtttttgagaaaacatattgcccattgggtgttctcctaattatttttgagtcccgtcctgatgccttggtacagattgcatctttagcaatccgaagtggaaatggtcttctcttgaaaggaggaaaagaagctatgagatcaaacacaatactgcataaggtcataactggtgcaattccagatgttgttggtaaaaaacttattggcctagtgaaaaacaaagatgaaattgctgatttgctcaagcttgatgatgtgattgatcttgtaataccaagaggtagcaataagctcgtttcccagatcaaagcagcaaccaagattcctgttcttggtcatgctgacggtatctgccatgtttatattgacaaatcagctgacatggacatggcaaaacgtattgtattggacgcaaaggttgattatccagcagcgtgtaatgccatggaaacgttacttgttcataaagatctgaacaggacagaaggccttgacgatttattggtggagcttgaaaaggaaggggtagttatctatggcgggcctgttgcacatgacactttgaaactaccaaaggtagattcatttcatcatgagtataactcaatggcatgcaccctcgaatttgttgatgatgtgcagtcagcaattgaccatataaatcgctatggaagtgcacacacagattgcattatcactactgatggaaaggcagcagagacttttctacagcaagttgatagtgctgcggtattccataatgcaagcacacggttctgtgatggggctcgctttggtctaggtgctgaggttggcataagcacagggcgcatacatgctcgggggcctgttggcgttgatggactcctaacaactcgatgcattttacgaggaagtggacaagtagtgaacggcgacaagggagttgtttacacccacagggagctccctttgcagtgaggtgaagtggcttgtgaaggagctgttgtagagcaattttttgcagacgctcaccgtgctcctccttgagagctgcttctcttcatgacatgcaatgggagcacgaaagcatgtcaaagcaggaagtaatgaagggcgaagtaggtcagaaacttatagtactatgtactatggtgttgctacgtagttgtgtggtattccttattattcattgtaccatgaataatttatgccaatgtcgtagtagctacatgtaactatattggctttcatggacacgtctatggtactagatgtaaaactgctagatggctttagatgaacatctcagatttattttccatagaatgcacatatgaaagtacctgagcgtggcgacgctggtgctttccatgataaagatctggctggtgtagggcggtctgctgctgaagccggagacatgcacatcgcagaagcctaatcatcagactggagcctcaactgaaccatcccgtatctgatctgtttagataaagacagttatattagaaatcgccaataagtctcggacgaaaattcccagcatttcacaacttaagaagttcagaattctagcagctattcgtaatgcatcccattgcagtattgcataacaaattacagagatgaatatcaatctcccagctcagggcctctaaccatgacagatggtagatactctcgtatcagtgtcaacattaggtggggatattacaatattacatccatgtctggtatccacagtaccatcaccattccaaatgtgtcaggataccgttactactactgatgtgttaaacagggatccatcacaaatgtatcaaaattgtctggcagagattccaattctctccaaacaaacaactcagcaatcttttgaggtacctcctgaaagactgagtcatgatggctagtctaatcaatatgttaggctatacaacaattcctacgtcttcagtggttattctgtataaatcagtaaagctcccaaaaaacattaatagagtccgcagcatcttcacc

SEQ ID NO: 19049 - DNA, 1801 bp, Oryza sativa
  ref <308>: DATABASE ACCESSION NUMBER: AK069426
  ref <309>: DATABASE ENTRY DATE: 2001-12-06
gacgcgcttgtctctttcttcttcttcttcttcttcttcttcttcttcttcctcgcgcagcctccaaattctccaaaaccctcgcgttttcccgcggcttcgcgtccggggagaggagattttcaaaaataaattcctcatccacatcctcctcttcccctagctcctaggcagggtctcgtctcgactccgaatcttagggtttctcctccccgctccccgccgcgggcgccatggaggcggtggtcgtcgacgcggggtcgaagctgctcaaggccggcatcgccttgcccgaccagtccccatcgctggtgatgccgtcgaagatgaagttggaggtagaggacggtcagatgggcgacggcgcggtggtggaggaggtggtgcagccggtggtgcgtggcttcgtcaaggactgggacgccatggaggacctgctcaactacgtcctgtacagcaacattgggtgggagattggggatgagggccagatcctcttcacagagccgctcttcacacccaaggcacttcgggagcaactggcgcaacttatgttcgaaaaattcaatgtttcaggcttttatgactctgagcaggctgtattgtcactttatgcagttggacgcatttcgggctgtacagtggacattgggcatgggaaaatcgatattgctccagtttgtgaaggtgctgttcagcacatagcatcaaagagatttgatattggaggaactgacttgacaaacctatttgcggaagaactcaaaaaatctaactcatcggtaaacattgatatttctgatgttgagcggctgaaagagcagtatgcatgctgtgcagaagatcaaatggcctttgaagctataggaagctcatgccgaccagaaaggcacacacttccagatgggcaggttataacaattgaaaaagaacggtacattgttggtgaagctttatttcaaccccacattttgggcttagaagattatggaattgttcatcagctggttacaagcgtctcgaatgtcacaccagagtaccatcgtcagctgcttgaaaacactatgttatgtggtggcactgcatcaatgactggttttgaagacaggttccagagagaagcaaatctgtctgcttcagcaatctacccatctcttgtaaagcctccagaatatatgcccgagaacctagctaggtactcggcctggctgggcggtgcaatattggccaaggtcgttttcccgcaaaaccagcacgtcaccaagggagactacgacgagactggtccatccatcgttcacaagaagtgcttctgaataacagctcgccttggaggcatgaacaccttgcacggggcgtggatgcacgaatctacagtttactggcatgtaggggcctgcctgccctgtgcttcaactcgctgtactaacttcctctgaagctgcggttctgagcaattcattagattcggttgtgcccgcggctgccaggtccagtttagatggtgtttgttacacttgttactagccattcaggatgcagtagaatctaacattggcatctatttattacaagttgtagaggattgtacctggcaacgctcgtaggctgcattcgtttgattgtccgttcaccgagcgtacggaaatcagttcattctgtgattctcccttccaattgctctctgaattctgtgtagctgtagtgctgtgtagcaaactacaagaaaacaaagcttagctagaagcggtattgttcttccaagttgattggcaatttgagctgttctatgagtaatacc

SEQ ID NO: 19050 - DNA, 1799 bp, Oryza sativa
  ref <308>: DATABASE ACCESSION NUMBER: AK069427
  ref <309>: DATABASE ENTRY DATE: 2001-12-06
aaaaaaaaaaaaaaaactcaagaacacaagaaaaaagaagcagttttttttgcccgtctcatcttcttcttctccctctcgccgcgcttcttgcacgcagcaatctctctctctctcgccgccgtcaatcccaccacgaattctccggtggctggctgctctcgactccttcgcgcgtcgatttcatgcggccgggtggttgcccgcctcctcccgaacgatccctcgccgccgccgctgccgctcatcggcgttgtcatccaccaccgccgccgctcctccgccgcggacgtgcctcgccggcggcgagccgagcggtgagttctgccccgtgtagtgtggactcgtagagtggccgtggatctgccgcggcgacgtaatctgctccggtttttcctcgacctctcgatccctcttctaccctcgcgtccccaactcctatccgcgctcaggatcgtattccggggaatcgcagggctcgccgtcgaaaggatccaatttttttcgactgcagaatcccctcacggacgcgaggaatttcgtcgtaggtggagcacacgcggggagtgtttttgacagagcttgatttcaacggatgaacatgtgtgagaaagatcaaaatttccactggggttatgaccttttccgtgacccttttgctcctatcgggtactatggacctcctcatggttacggtgatggcaactattgtgacctccattatgctagagatgcatcacatctggatgagacgcacttgcattcttctgcactgacatatgatttgtacaacccatcagtaggcatctaccatcctggaaatgctggtgagcatgaccatgacacagtctatatagagccgactagttccaattcatgcccagacactgacgacagtttcccaatggatgaagaagtaggaaagaggttttaccccatggtgccagttccccatgttcctaaaattaatggagagatcccttcagtcgatgaagctaccatggaccatgaaaggctgacagaaaggttgaggttgtatgaactagttgagcacaaggtgaaaggagatggcaactgtcagtttcgggcactatcagatcaactgtatcaaagtcccgatcaccatgagtttgtgaggcagcagattatgagccagcttaaaagtaaccgtgatgcctacgatggatatgtccccatggcatatgacgattacttggagaaagtatcacaaaatggtgaatggggtgaccatgtgactctacaggctgctgctgacaagtatggagttaagattttcgtgatgacatcgttcaaggatacgtgctacattgagatccaaccaaaggttcagaagtccaacaaagtggtgctgttgagcttttgggcggaggttcactacaactccatatatccgcagaacgatgcgccgaggtcgcagacgacgaggaagaggagatggtggccgttctctcacaaccaccaccatcaccaccattgatgcctgggctgcaaagcttttcttccttgatcaagatgacccaggttgatcaagatgacccagaaagaaagctggtgctcattgtcttgttggtctgatgacaatcatggacatctgatagtaggaggaggacattgtggtgatgattatatatctccaaatgatatagaagatacatggaaatatggaatccatggaaggaataatttcgtcttagtccggtccggtcccgtatatagctgctgctgagctgcactgcactgcattgcattccctgaatcaattatcaatcacctcacct

SEQ ID NO: 19051 - DNA, 3120 bp, Oryza sativa
  ref <308>: DATABASE ACCESSION NUMBER: AK069428
  ref <309>: DATABASE ENTRY DATE: 2001-12-06
cagaagactcaagaaccactctcccggaggccggagcctcacctggccctctcttcctgctgccggagccgcttcaggagcttggatttcgccgcaggttgaagacattttccccgtttaagaagtcaaggctcaaggtctaataacatattaccatggcagagggtgttgttggaattataattctgaagcttggtttagccttggcaacagacacaagtagggttggtagaaactggctctgccatgaggcttctgctcttgctagaatctttagtcagatccgtgatatgaaggaggagttggagagcatgcaatccttcctacaaggagctgagaggttcaaggatactgacaataccacggccaacttcatcaagaagatccgttgcattgctttcgagattgaggatgttgttgacgagttcacctccaagatggaggtgaaacaaggtgggttggcttcaaagataaagcagaggatttgtcacattaaaacttggcaccgtctagcattcaaatttcaagatatcaaactaaagctggagaatgttgataggagaaaggtccgatatgatatgacaggattggtgaaaaatgcagaacaaagtgatgctaattgcagatatactgatcatacatcatactttccaactgaggaagatcttgttggtattgatgataataaaaagcttttgatgaattggctgaggtgtgattcgcaactgcagagtgtaattaccagtgtgtgtgggatgggaggagtaggcaaaaccacattggttgcccatgtttacaacaatgtgaaggtagactttgacagtgcagcttggataactgtttcaaaagcgtatcaggttgaggaattgttaaggcagattatcaagggattcaatagtaatgatctaaagagtgaactccgtgttgacattgttgacatggaaaagaggaccctggttgagatcattcgcgattatttaaaacggaaaaggttcctgctggttctggatgatgtctggggtgttgatatgtggttcaagattagagaggcttttcctgccaatagcattggtcgatttgttatcacctcaagagtccatgacatagcattaatagcaactggaaatcataaaattgagttgaaacccctggaagcgcaccattcttgggagttattttgtaaataagcattttggaacgaggacagaatatgcccattggatctacagaatttggcgcaaagatttgtggataaatgcaatggtttacctattgctattgcatgtataggtcgtttgctgtcatgcaaaagcccatgttactctgaatgggaaaatttatacaaagaactagagttacagctgagcaataatgcgattcttgatgttaatattgttctaaagctcagtttggacgaccttccatatattttgaaaaactgctttttacactgcacaatatttccggaggactatttgattaagagaaaaaggctgattagacattgggtcacagcgggattcatcgcagttactgaacacaagacaatggaggatgtggctgagggttatttgtatgaacttgtaaaccgaagcttattacaggtagtggagaggaatgaaagtggacgagtgcggagttgtcgaatgcatgatatcattcgtattcttgctctgaccaaatcaaatgaggaaagcttctgtagtgtttatgatggctccagaactacttcaaaacaaaatacacgtcgtctatcaatccaaagttctgatatagagaagttcactgtttctagtgaggtccatctccgtgcaatctatgctttcaatgagttggtgactagtgattcactgaagtttttcttgaaatctttcaacttgctatcaactctggatctgcaaggtacccaaatcaggaagctaccgaaagagctttttaagttgttcaatctgcattttctgtgtcttagagacactttcgttgaagatatccctgaaacagttggaagattacaaaaattagaagtcttggatgctttcaatgcgaggctagtcagtttgccacagagtatagcaaatcttcataagttgagatatctttacgtagctactgatccaaggaaaggtactaaaggagttgttccctggattggaattcaggtgcctaatggcataaggaacttgaaaagcttgcaagcattacaacttgttgaggctaactcagagactttgtgtcatcttggtgctctgacagagttaagaacttttgccatcacccaggtgaggagagaacaatgttctgatttgtgcaatgctatcatgaacatgaaccatcttgctagtctttctattatggctataaatgagacggaaacactcgaattggatggactccgtttacccccatctctttcaaagcttgaattaggagggaagctggacaaggaatcgatgcctcggattgtctcatccttttcagatcttggtaacctcacctttattgaccttagccttgtctaaacttgatgagaactcattttcttgtctcgttgctgttaaatggtctacggggaatttggcttgataaggcttatgaagggaagaaactgcatttcaatgccatgtcacttccatcgctccgactactagcaatatcagatgctccggagctgaatgatgttgtaatagaacaaagtgcattgcaaaaccttattcgattaacactcattgattgtccagagctgaagaccctccctgatggcattgaacatctcataactctagaggaattatatatgcgaggggcttcgaaagagctcacgaagaagcttaagcaaaaagaagactcaaattattccaacacatatcttatgaagatcaatcacatcagaagggttactgtttttccatgaaatatttgagaaacactctagtatcttcagcttatgtgtctatggagaggtaaatttttcacctgtagtatctaggacaaattaaagtttatctagtggttgattgtactttattcagagcctaatcaatgacattttaagctccattttgatctttctagaccagtttcagattatagaaacaataatataatgaaataaaattatat

SEQ ID NO: 19052 - DNA, 1926 bp, Oryza sativa
  ref <308>: DATABASE ACCESSION NUMBER: AK069429
  ref <309>: DATABASE ENTRY DATE: 2001-12-06
gactcgtctctgcgtgcgtttcgttccttcgttgcgttgcgttggttcatcgatagatcgttctcgatggtgatggagggcatgggcatggcggcggcgtgggcggcgggggacctgtgggtgctggcggcggcggtggtggccggcgtggtgctggtcgacgcggtggtgcggagggcgcacgactgggttcgcgtggcggcgctgggggcggagaggaggtcgaggttgccgccgggggagatggggtggccgatggtgggcagcatgtgggcgttcctccgcgccttcaagtccggcaaccccgacgccttcatcgcctccttcatccgacggtttgggcggacaggggtgtgcaggacgttcatgttcagcagcccgacgatcctggcggtgacgccggaggcgtgcaagcaggtgctcatggacgacgagggcttcgtcaccggctggcccaaggccaccgtcaccctcatcggccccaaatccttcgtcaacatgtcctacgacgaccaccgccgcatccgcaagctcaccgccgcccccatcaacggcttcgacgccctcaccacctacctctccttcatcgaccagaccgtcgtcgcctccctccgccgctggtcctcgccggagtccggccaggtcgagttcctcaccgagctcaggcgcatgaccttcaagatcatcgtccagatcttcatgagcggcgccgacgacgccaccatggaggccctggagcggagctacaccgacctcaactacggcatgcgcgccatggccatcaacctccccggcttcgcctactaccgcgcgctcagggctcgccggaagctcgtgtccgtgctgcagggtgtgctcgacggccggagggccgccgccgccaagggcttcaaacgctccggggccatggacatgatggaccgcctcatcgaggccgaggacgaacgcggccgccgcctcgccgacgacgagatcgtcgacgtcctcatcatgtacctcaacgccggccacgagtcctccggccacatcaccatgtgggccaccgtcttcctccaggagaaccccgacatcttcgcaagagcaaaggctgagcaagaggagatcatgagaagcattccagcaacgcagaacggattaaccctcagggacttcaagaagatgcacttcctctcacaggttgtcgacgagacacttcgctgcgtcaacgtctccttcgtgtccttccgtcaggccacaagagacatctttgtgaacggttatcttatccccaaggggtggaaggttcagctgtggtacagaagtgtgcacatggatgaccaagtttatcctgaccccaaaatgttcaacccttcaagatgggagggaccccctccgaaagccggaacattccttccatttggactgggagcaagactgtgccctggaaatgatcttgcaaagctggagatctctgtcttcctccatcattttctcctgggttacaagctgaagagggcaaatccaaagtgcagggtgagatatctgcctcatccccggcctgtggacaactgcttggcgacgatcaccaaagtttccgatgaacactaaaagttcagggattctttagctggaaccgaaaacagccaggctaggctacttgttcctctgggacaagtaaataaacatgattataaagtatatcacgtactctggaagaaaaaaaagagagagaagtgatgtgtattcgtcttgatatgctcgctttggtttcgcattgttcttgtttgtcctagcttaggacaaagattaaagtaaagcagttcgagttatactaacaagcttcctgaatatgggaaacacgcaagcattccccttcttttctatctatccacctcactgaatttggattgttctttatcagttaataaagatggcacgaaaagttgc

SEQ ID NO: 19053 - DNA, 1769 bp, Oryza sativa
  ref <308>: DATABASE ACCESSION NUMBER: AK069430
  ref <309>: DATABASE ENTRY DATE: 2001-12-06
ggttcgcctcgtcttctcttctccccccacttcctccgcctcctccgccgccgcgcttctcgccgccgcggcgagccatggacgccgcaggttacccgaagatgcaaggaggaggggcgtcctcctcgtcgtcgtcctcggcttcctgccgcgccgccgacgcagccgtgtgggacgcggtgcagcagcagaagcggcagcgctgccagggttcttcatccaatgatcaagttggactcagtactgaaaataattccttccaagcacctgaacctgagctgcagaattctgactgtgtggaagatgaggaagaagattactatttgtatgatgaggatgatgtctgctatgatgatgatggagactatgaatttgatgaaactgacttcaatcagcagctagctgataagtttgatggtttggatttgcctccgggagtggaggctaccgttccatggctgcaaaaaaaggatattgctgatggacctagcactttcaagtcaatggcagaactagatgctgatattactaagaaatatgaattctttaagcagtttgatgttgttgagaatttttcggaccatcattatgctgataagcctgttgggaagacagggaaagactggacaaaaaggattcagtatgactggaaacttctggagaaagatttaccagcatccatatatgtccgtgtgtctgaaaatcgaatggaccttctgagggctgtaataattggacctcaaggaacaccttaccatgatggccttttcttctttgatgctcaatttactagtacttatccatctactcctccagtggtatattatcattctggagggcttcggctcaatccaaatttatatgcttgtggaaaagtctgtcttagcctgctaggcacctggtctggtagtggttgtgagaagtggaactcagctcactcaactatgctacaggttttagtctccattcaagctctcgtattgaatgagaacccatacttcaatgagccaggatatgagacctatgccaacagtgctactggacagaagagtgccatggactataatgataccacatttcagtactcatgcaggacgatgttatactcactccgtagatctccacagcactttgatgcccttgtagctggccacttccgccaccgtggtcatgccattctggctgcatgcaaatattacatggaaggtcataaggttgggtccgtagtccctaacgaggacgaggaggatgcgaagcagcaggacgacactgatgcaggaggatccggcagcagcagcggagcaaagccgcagcctgaaaagccagacctgtgcaagggccgtgctgcatccttcaaaaccaacatggccgttctgtttgaggagctcttgatggaattcaacgtcaagggtgctgacaccaagaagttctgcgatgagaagttgaagaagaaccagcaggctgctgctgctgctcgctgaagaggccccccagctgcagctacaaaacgcacagatcttctctagttctgagggtttcataatgaagcgaaaaccgtagaaaggggttttgcttgcctaactatagaagtgctgtgtagatagtccattctcgtttttctccttttgttgtacaggttgagtgtgtggacttaaaaaatttaaatgatcatgttagatgctaactgaagtatcatcaacccacccctcgttgtggtgcgatcatgaaatagacacctgcataagtaagcaaggtggcggttccatatg

SEQ ID NO: 19054 - DNA, 2614 bp, Oryza sativa
  ref <308>: DATABASE ACCESSION NUMBER: AK069431
  ref <309>: DATABASE ENTRY DATE: 2001-12-06
gctcctcatctcgcggtctccctctctccaacactcaaattctccggcgccgccctactaactccgacggcccatctccgccgcctccgccgccggcgtgaagccatctccgcctcctgtgaagccccccaactcccgcgagctcctccacgcagcagatccggcgagctcggatggacgcggcggcgctaggggcggccgccggggcgccgaacccggcggcgcccgtaggaggggaccagcagccacggacggagcggctcagcgccggggtgcagcagcagctgaacctggaggggatgcgggcgcgcgccgtgggcctgtacaaggccatctcccgcatcctcgaggacttcgacgccatcgcccgcgccaaccccaacgcctcccccaagtggcaggatgtgcttgggcaattctcgatggtgagcatggagctcttcaatatcgtggaggacatcaagaaggtgtccaaggtgtttgtggtctacccccgaaacgttaatgccgaaaacgctgccatactgcctgtaatgctgtcgtcaaagctgttacctgagatggaagctgaagaagctacaaagagggacaacttgttgtctggaataacgaatctaacagtttctggacaaattgaaaagttaaagactaggatagatatgattggaagtgcatgtgaaaacagctgagaaagtaattgctgaaagtcgcaagaattatggtctaggagcccgtcagggggcaaatcttggtcctacattggacaaggcacaggctgcaaagatacaggagcaggaaggcctacttagagcagcggtaaattatggtgaaggattgcgtgtaccgggagaccaaaggcagatgtattcatctcttcctagccatttagtggacgtacttccttttggagatggggcacataattttggtgataattctggtctgtttctgtgacatacctacaattctccatggttcactccttgttttgagcattggaactatagcatcaatgagttgttcatctgctctagatgtttttttatataaaaataatcaataacttgctgctacccttagtgttgccatttgtgcagtctgtatgtcacacaatgcttcaacaaaagcatataactagagtctatacttgcaggtgtgtaccccaaaaatacctcaacatttgtacctaatgttgtcaacgcccagggaaatccaatgcaggtttgtctagtgccagtaataacagctttgaccattacgaaattaatagaatatgtccatattattgctagttgggctgaaagcaaaaaaagttacaaaaggcagatgttttgtttcccgtgtatcaatttgccatataatttgtaatggtatattggtattcctttctatgatcaactgtattaagtgttggttagaatgctttcccttgaactattattaagacaattgcatttcataagagcaatcaccaacctgacctcatgcaggcctttgatgtttctatcttgatgttcaaatttgggccttcattctaatagcaggtgtctggaggacagttacttggcagacctgctccatcacctggagctacaggaacgcctaattttgaaaatgtatctactcctccaatgccatatgcaaactcccctaggtcagggaccaatatgatgaacaccccttcaccccagcagcatttgacggcacaacaacataggcaaaaactgatgcaaacatctcagcaacagcagctacatgctcaacagcaactaagaccatcggctgctgggatgctagcacagagcgcaattcctcagctacaagatctgcagggccaatcccaacaaaaattacaggtccctggccaacagcagatgcagtacaatcaagccttgtcacaacagtatcagaataggcagatgcaagctgggcgcatgcaacctggcatgtcccagagtcaactgaaccaaggaaatcagctaagaagtcatattagccagttcactggagctgcaaacagtgcaatgtttactgctgcacaggcatcttcgaactcacagatgatggcaaatatacctgggtcgatgcaatcacaatcacttttgccacaaatgcaaggccttaatcggtacagtttgactggtgggcatcctcaaaggagccatccatcccaaatgctgactgaccaaatgtttggtatgggaggcgcaaattctaccagcatgatgggaatgcagcagcagcagcaatttaacatgcaagcaaatgctcagaacctgcaacaaggcatgacaggcctccagaaccagacacaaaatcccaactttccccagcagaggcagcaaaaccagcaatgattcaaacaagtagtgttttgctaggccgaggaagaattttccatatcttaagtccatgcatgccgtcagcagagggcaaaacgtcgtgtggctggccaaatagcacagcagcaactgctgctttcttccttgttacagggcatcaccaatggacacattagtttggtgatatcagctggctgtatctatcttataatgatggatgcttatgtcttatgtcttcatgcggtcctctattgatttaagggtttcatggt

SEQ ID NO: 19055 - DNA, 1891 bp, Oryza sativa
  ref <308>: DATABASE ACCESSION NUMBER: AK069432
  ref <309>: DATABASE ENTRY DATE: 2001-12-06
ggcaggcacccacagaactttcgttgccgactgcggctgcaaccggaatgtagccggcctgtgtgctacttccagccacaagcagaggccgcgacattaatctcacaggaaatctagtcgtctagtaactctactgccaaatcttgatatcttgaaagctttcaattcagcttgcaatatatcaatacctgttcccctttcctaattcctacccttcctcctcgtgctacagccctgccgttttttgggatgatgatgatggtgagattgcctgctatgttcgtgatctgcatcttggctgttccgctgctgccagcgctcggctcggagccgccgtcgacaccggtgccgaccgttggcgtgacggcggcgagcgacctcgtcggctccggtggccacagctacttggacgtcaggacagaagaggaattcaagaagggacatgtggagaattctcttaatgtgccattcctcttctttacccctcaagggaaggaaaagaacacaaagttcatagagcaggtggcattgcattatgataaggaggacaacataattgtgggttgcctaagtggagtaagatctgaactagcatctgccgatctcatagcagccgtaagacctctccccccttgagcgctcctgttgtttctaaatctgatttatatattttaacttaggactttgatattcataaaattttgtagtaactttttttagataatgggaaattgttagagcaagtaagtacgatactttttctcctgtgtccctcaatttaagtaggttaaacattgtctgacgggtgaaagacttgaataggtgaacatagcattgaatttggtggataataatagtgttttatatgcatgaaaaagatagaatttgtatgtcaggcgatttgcctaatgcaatcctaattttactcctaaaattacatttgagcaatttgtgtactgaatattagaattttgctcccaactaaactttaattccggtattgttcttattttgttatgtacaggttcttggatactgtgactgtgaccatcgtacaatcaaatcgatataaaaacactaatgttaatagtaaattagaattgaacgaaatgcacgcgaagttagcgtaggccatgagagatggattgtggtttctcacataataaagagttaatttaatccatgccattataatcagcagcacctcttaaacagtttggtaaaggaataagttcattttacacccagctttaaaatggcttatttaacatatttgtgttatgtagtactccctctgatcaagattacatgacgtttccgacagccaaaacctattaagcgcaattcattttgtttgttcaaagcatcaaataatatcgtccggaggtagtactatgacaaacataccttggagaaaatttcctacttgtattaataaaggaggaacttgagtgtgtatttacaaggtatgcccaggacacgtgcacaaaaatactgttctcacaaagtctgcttcttggtcgctgccactactctctctgtgatatccacattttttttctgaaagaataaattagggtgcacataagctttcatatttaacagtcccctttttcagattcagtatctcgatcattcccttgttagtttcctttgtttatgtctcaaacatttgatatggaaacagggattcaaaaatgtaaagaacatggaaggaggttacatggcatgggtggaaaatggccttgcggtgaataaacctctagtgcaagaagagctctagtttcagttattgtatttttagataatgactttcagttattgtatgactgggtgttaatttgatttgtagaaaggaaaggtataagaaaacaatgttatattattcccc

SEQ ID NO: 19056 - DNA, 2283 bp, Oryza sativa
  ref <308>: DATABASE ACCESSION NUMBER: AK069433
  ref <309>: DATABASE ENTRY DATE: 2001-12-06
ggcgcccccgggagttttctcagaaacatcattccccccaccccagccatcatccgtctgctccggaacccggctctgagagagtgagaggatttgagataaagaggccggctgtggccttggtgagcaacttgctactccttcctttattttgttctgtttaatttgacttgttcaaacatgccgctgggcatctttgttcggcgtattattattactcccttcggagtatagacagtgaaatatggggtatttacagacatcttactccctccgttccataatataagagattttaaatagatatgatatatttttgaataataaatctggatagatgatatgtcaaattcactgtattaggatgtatcatatccacctaaaatctcttatattatggaacgaagggaggatgttctttttcatagtgtccccatggttatcatgggatgtcttttcctgctaaggcatcgtgtgcacacgatgcgtagaggaaaacacatgatgcagattcagcttagagaacagaaaaataaaattatatgccctctgacagaaatgaaaatcaacaaatactacaagactttacaacagcgctgatataacatgctactactactagtacaacaggaaaaaaataattcatgtagccttctagcgggttctatttccttactacatctttctatttcctttttccgtgaggatcatagtatcaacattgaaattcttgattttccaaattttcattaacaaacgtattggttctaggttctgtcatatatgatgaatctttaactatcttaagtctctatgtgggaaccctcgctccccggcacacaaaacgaattagcgttttagtgcgtgattaattaagttttagcttttttttcaaaaatggattaatatgattttttaagcaactttcgtatagaaattttttttaaaaaaaacgcaccgtttagtaatttgaaaagtgtgcgcgtgaaaaacgaggagttagaaacttgtactacggaacggagctaagtacagaaatgctcccctgcttgtactgaaactgcagtactcccatactcctttatagagaactgatacccacccaaaaaataaaatatactttatacatatcttagccgtaggaagtctttggccaaactaataagatgtttcattttctgattcatttttgtgtccacatagcaaattgtttagggtttgttcggtttagagaaatttcaactcatagaaatagaaaatgggaggaatagaatgtatgaatacgttaatccatagaaattttttccaaaagatttgagtgaatggaaatttttccaaaagattctctctgcaacttggagggaaaggcaatttcttttggcttcctatatctcattcttacaaactaaatagcaaattaattcttaggaatccaaatcctttatttttccttcaaacagaataagcacttatagtagagtttttaccatcctgaagatgtacctccggacactagtactagcaggtacctttgaaatccaactgtttaatccagaggagagcatgacgatgaatggaaaaaacgagatcgctcgttcatccgattcatcgttttgttcgtcgctattattattgtcccttacatgctatgccacacgtccacaccttgcatccgctcgtcgttcttgttcactgtgggctcggaggaagtgcgacggaggcagtggcgccggctacaatagtaggcaaagtcacggcggctatagtgttgggtccgagaataggcggagccggtggcgtgccacgagaggtggatgtggcgtcctaaatgcgcggggaggtggacgcggcgtgattgggtgcagggggcaaggcggacatgatgacatgggagaaggcggcgatgtttcgattggattaccatagaggcctatgctctacacaaaagtgtaggacggccatgttccagccgtcagtaccgtctggtggcttcggcggcaagaagtcatgagctcgctgctttgtcaaattgtcatccttctcttcggcgccgcttcgatcacgctgcaacttcgtccctgtccatcaggaaagaactgaagccgaaattggctccgttcggctgcacttaatttaactgttgtacagccaacccaaacagtatgttatgtctgcagctgcaacatcagcagccgctagcgggcggctgctgcagcgcctgcactgaccagccgagtactccctccgtcccaaaaaaaaggcaaaccctgggtttccgtgtcc

SEQ ID NO: 19057 - DNA, 1882 bp, Oryza sativa
  ref <308>: DATABASE ACCESSION NUMBER: AK069434
  ref <309>: DATABASE ENTRY DATE: 2001-12-06
gtttcccttctcccttcccctcccgccgcgaagccaccagcgccaccagcttccacgcctccactgccgccacgagagccgaaccacgcagacctaagccagagagatcgcgagagggagcctccgctccttcgcttagcggcggcggagaccatggcgagctccggggaggaagggcgggtggtggtggacctccgctcggcggcggagtcggcgggcggcggcggcggcgacgaggaggcccacgccgcgccgctccacgagatcgagtccctttgcatgcgctgcggcgacaacggcaccacgaggcttctgatgaccatgattccgcacttccgggaggtggttctgatggctttcgagtgcccgcattgcggtgagaggaacaatgaggttcagtttgctggacagctccagccgaagggatgttgttaccgtttggaggtcccgcgcgggcagaacgagatactgaaccgtcaggttgtgaaatctgattcagcaactattaagattccagaactggactttgagatccctccagaagctcaacgtggatcactttcaacagtggaagggattattatgcgagctgtggatgagctgcaggcacttcaagatgaaagaaagaaagtggatcctcaaaaggccgaagctattgataaatttttagcaaaattgagatctcttggattaggagaagctgctttcacctttgttcttgatgatcctgctggaaatagcttcattgaaaaccagaatgcaccttcatcagatcctttgttatctgtgagattctatgaaaggatgcgtgagcaacaggcagcacttggttttcttgttgaaccatccacagaagaacctggggatcagcctgttaatcatgcttcaactgtggaagggaactctgaggtgttgcaggagccccacggttcggttggagctgttgcaggtcgccgtgctatagctcaaggaaaccctgatgaagttgctgcagcgctgtgcagatattcagcaccagaagaggttgatactttgccatcaacatgtggggcctgtggaactgagtgtgtcactcgtttctttgctacaaaaatcccatattttcgtgaggttattgttatggcaacaacatgcgacatgtgcggctatcgcaactcagagttgaagcctggtggtgaaatcccagccaaaggaaagaaaattacactacgtgtgcagaacggaaaagatcttacacgtgatgtcataaagtcagattcagctggcgtaaaagtacctgaactcgagttggaactagcaagtggaacattgggtggtattgttacaacagttgaaggtttaattgtgaaaatatgcgaggctctgcagagagtgcatggattccatttgggtgatagcacactggaatggaaaaagaagaaatgggaggatttcaacgatagattatccaagcttctaagtttacaagagccttggactttaattatcgatgatggattggcagcttcatttgttgctccagctaccgattctttagaagatgacaaccagctaaccattgaggagtatgtgaggagctgggagcagaatgaggagcttggcttgaatgacatggacacatcgtctgctgacgccgcctacaacaccaccaacccataatgtactcaatgttgtaacatgtgatattatcaaatatacttattgtgctccatgttgtagtaagttgcgatatttctcattttaaatcctcaagttttgtgttagccatagcttttgtttctgagacgatcgaagatattcagttgaccaaatttgctttatcagaacgtttcttgtttctttgcttaattacattgaacgccaccggcattgtagtcgtgcc

SEQ ID NO: 19058 - DNA, 1219 bp, Oryza sativa
  ref <308>: DATABASE ACCESSION NUMBER: AK069435
  ref <309>: DATABASE ENTRY DATE: 2001-12-06
ggcgggcaattcgtcgagcacctggtgcgcgcgctccgccgccatggcgtccgccgcgcgggctctgggcgcgctcgtccacaaggcctcgtcgctgtcctcctccgccgccgctctcaggagcgccgccgtcctccatgggagaggctctgctggcggcagcgccagattgttccagaggcacgcggcgaggcggaggatttcgacgttccagccgctttgcatgggacggcgctcctgcaagatcgccggaaggaaggatgctcagaatttgaaaaagatgaagcgcaacagtaaaattgggaaagaaatcgttgctgccattaagaaaggtggcccaagtccttcatcaaacacaactttagcagcaatattggagaaagcaagggaacttgatatccccaaagaaatcttggagcgcaacataaaaagggcttcagaaaagggccaagatacttacacagaaaaggtttacgaggtgtatggttttggtggagtaggtatggttgttgaggtccttacagataaaattacaagatctattgcggatataagaaatgttgtaaaggactgtggagcaaaattggctgatcctggatctgttacattcagattcagacaagctcgagtggtgaacatcaaagtaactgatgctgataaggaccaactgctcactgttgctttggatgctggcgccgatgatgtcattgaaccaaattttgatgatgatgatgatgacgacgacgactacgatgacgactcctctgaagatgtttcagaaaggttttacaagatagttactacatcagagaactatcctgttgtgctatcgaagctacaagaggaaggactaaaatttgaaactgataatggctatgaattgctgcctctgaacccgattgaggtagatgacgaggccatggaactaaacaaggtcctagtgtctaagttgcttgagcttgatgacgttgatgctgtctatactgaccaaaggtgactctgaattcatgatccaagacactcgatgccgacggttcttgggttacactgtggattggcagtggattggcagaaagctggtggatggagctgccaatggagcctgtttacttgcagccagttatattttgccaaaattgagttgataatacggcattttttgtgtaactactttgcacactcgcatctcaaacaaagagttctaaaaattttcccttcc

SEQ ID NO: 19059 - DNA, 1892 bp, Oryza sativa
  ref <308>: DATABASE ACCESSION NUMBER: AK069436
  ref <309>: DATABASE ENTRY DATE: 2001-12-06
gtggcggcggccataccgcaacaagttctcctccgccgtcgcttccacggcctccccccatcccaaacgcggtcgatcgccggcgaatccccaccggacgccgaggcgactgccccgccgctcgccaccctccatccccggcgtccccgaagtaacccaccgcctccttcttcttccctccatctctcctgcacccgagtgagggcgaccgcgatctctcagatccaccgaatccggagaccccgctcgcgatcgagtcaaacgcctccgaacccttaatcctcgccgccgccgccgccgccgacgacgacgacgaggacctccccactaggatgagcgggaggaagaatgccggcaaggcctcgccgtttctgctcctcctcatctcggtgggctgcttcttcgcgacctacaacttcctgacgatggtgggccacggccggagccgggacgccgggccgcggaagattctcggcggcgtcggcggcgtcggcggcggcggctcggacccgtcgaagaggttccacgtcgcgctcacggcgacggacgcgctctacagccagtggcagtcgcgggtgatgtactactggtacagggagatgagggatcggcctggctccgacatgggcggcttcacgcggatcctgcactccgggaagcccgacggattgatggatgagatacctaccttggtggttgatcccctccccgaaggcgcggatcgaggttacattgtcctaaacaggccttgggcatttgttcaatggctgaagaaatcaaacatcaaagaagactatgtacttatggctgagccagatcacatctttgtgaggccattgccaaacttagctcatggcgacgaacctgctgcgtttcccttcttctacatcaaaccaactgaaaatgaaataatactgaggaagttctttcctgaagaaaatggaccagtctcaaaaattgatcctattggtaattccccagtgattatcaagaaggcccagcttgagaagattgctccaacttggatgaatatttcgttgaaaatgaaagaggatgtggagacagacaaagcttttggatgggtcttggaaatgtatgcatatgctgtcgctagtgcattgcatggtgtgcactacagccttcgtaaggattttatgattcagcctccttgggacgcgaaatcggacaacacattcatcatccattacacttatgggtgtgattatacattaaagggtgagctaacttatgggaaaataggggaatggcggtttgacaaaagatcttatcttcgttcaccaccgccaagaaatcttacattacctcctccaggagttcccgaaagtgtggccacccttgtgaaaatggtcaatgaagccactgcaaacattccagggtgggacgaagaaaggtgattaaatggttttgcctcgctgatactcaattcagctgatagtgtttacattagaagccatcgaaggatctccgtggtcaataaaacaagtgaatcaacgcatgttcttcttaggcggcagacacgattggctaattcctacaaattaacctagaattagtttttggcaagtaaaacacggtagttatttggtcaagtgaggtggtccatttttggtgttgtaaagctgaaacgtgagcttttggtaatactcctagatcattcgattgtattgtaaagcagaaatattagtcaagtttgttgcacgggaatgttactcgataattgaggcttgggatccttcgcgcttgtgccattacatgaaatctttcaaaaagtagtgtttgtcatgagaggattgagagagatggtttgagagggaagcatggaattcacatgacgatcaggtgttcctagttaagttgcatacttacagtcc

SEQ ID NO: 19060 - DNA, 2127 bp, Oryza sativa
  ref <308>: DATABASE ACCESSION NUMBER: AK069437
  ref <309>: DATABASE ENTRY DATE: 2001-12-06
gggtactagtgtatttcacgataaatacaacggcggcccaccaccacctcgctccgtagtgtccgcacagcgaacgcctctcgcgcgcgtgcttactggtgactggtccaagcagcaacgcaagcaatggcgtcgcacgcgaacgcctacggcatcgccttcagcggtgggtttggcacatacttgtttggtatgagtgaaacaattgctaagcaagcaacagaggctaataatgctcagaatgtcaagaaccctcacatcgggtggatgattggattcctcttcctcgtcagttttattgggctacttgctcttgtgcctctgagaaaaattatgattgtcgactacaaactgacctatccaagtggcacggcaacagcttatcttatcaatggcttccacaccccagagggtgcaaagcttgctaagaagcaagtaaaggaactggggaaactctttttgttcagcttcgtttggggcttctttcagtggttctatactgccggagatggttgtggattccagagcttccctacattaggccttcaagcctataaaaacaggttttactttgatttctcccctacctatgttggagtagggatgatttgcccccacattgtgaacgtatctgttctattgggaggcatcctctcatggggaatcatgtggcccctgataagaaacaagaaagggagttggtatgctgcctctctctcagaaactagtcttcatggactgcaaggctacagggtgttcatatccattgccttgattcttggagacggcctgtacaacttcgtgaaggtgctcatccgcacaaccgctggcttcgtcgtgatgatgaagaagaacagcacgcttccggtctccaacaatggcagcccgatggtggccactgaagccatctccttcgacgacgagcgccgcaccgagctcttcctcaaggaccagatccccaagacggtcgcgttcggggggtacgtcgccgtcgccgccgtatcgatcggcacgctcccgcagatcttcccgcagctcaagtggtactacatcctggtcgcctacgtcttcgcgcccgtgctggccttctgcaacgcctacggcgccgggctgacggactggtcgctcgcgtccacgtacggcaagctcgccatcttcatcttcggcgcgtgggccggcgcgtcgaacggcggcgtgctggtcgggctcgccgcctgcggggtgatgatgagcatcgtgtcgacggcgtccgacctgatgcaggacttcaagacggggtacctgacgctggcgtcgccgaggtccatgttcgtcagccaggtgatcggcacggcgatggggtgcgtcatcgcgccgtgcgtcttctggctcttctacaaggccttcgccgacatcggcgtgagcggcaccgagtacccggcgccgtacgccatcgtgtaccggaacatggccatcctcggcgtcgacggcttctcctcgctgcccaagcactgcctcacgctgtgctacatcttcttcgccgcggcgatcgccatcaacctggcaagggacctggcgccaagcaaggtggcgaggttcatcccgctgcccatggcgatggcgatcccgttctacatcggctcctacttcgccatcgacatgttcatcggcaccgtcatcctcttcgtgtgggagatggtgaacaaggccaaggcggaagcgttcgcgccggcggtcgcctccggcttgatctgcggcgacggcatctggacattgccgcagtccatccttgccctcgccaaggtgaagccgccgatctgcatgaagtttctgtcgcgatcggtgaatgcgcaagtggatggtttcctgggtaactagatgtgatcagcctgaaatcatcgccaatgtgaacaaccactctgtatcatctgtgtcatcatcctgcaatctcggtttcaaaaaaaaaaaatcatcctgcaatcaggatatcgtatgttctgttagggattgtactataatctgtctctgaacacctgtatatgttagtggagtgtgacaatcatccttgaatccttgattccaaatttccagtgttgtaattgtatatatattcctgcaatcatcagtaagtggcgttctactgtctcc

SEQ ID NO: 19061 - DNA, 3590 bp, Oryza sativa
  ref <308>: DATABASE ACCESSION NUMBER: AK069438
  ref <309>: DATABASE ENTRY DATE: 2001-12-06
gaaacacacccgtcccttcttctccttccgctcgtctcgctcgtaatcggcacaggcgacctcgacacaccacttcaccctcgctcggtcggagcaatcttgcctgcgacgccgccgccgccctcgatctcggatcgtccgctacgcccctgcctccaaaccttgccgcggcgatcggagaggggaatacccaaaccctaacgttttcggcccctccccgccgtcagagctgcgccgtgcggttctgcttcttttctgggcctcgtcacctagggttccgagatgggcgatcataaggccgtcttcatctcccttcaggagctattccctcaggttgatcctcgcatactgaaggctgttgccattgagcaccacaacaatgttgattctgctgtagtcgcaatccttgatgaagtcatgccgtctgttacatctacaagtccacctacagtttcgtctgttcgtcaagaaattgcgccatgctgtattgcaacttcgtcagcttctgatggtacttctgaaacaggggattcctcttctgctgggcatggtaagcaggttgaagttgatgaaaatgtccactctacacaatgcaaatcttctatggagatcacaaatgataggcaaaggaatgtggtggatgaagtgaaatcacattcatcatacccatggatgaatgaacaacttcacctgcctatccgcaatgtcccagaacctgttgatatttcttatgttggacatgacggacatttgttaagtgaatatctagatgcaatactcaatggagaaagtggaaattctagcacacaacccaatgttgcatatgtccacaagcaagattctgacaacccaatcccagctgatggttgtgttacaaaggataattcaatcactttacctcttgattatgtggacataaatgatgtgaattattccttgaagtcttctgctggtgtttccaacagtgaagattcatttggaacctgtggaacatatcagtttgcccatgtgctgaacattccgattccagacgctagaaaatcctctaaggggcttggcggagaacaggacaccaacagcatcggcaaagctgacttgctccctgatcttaatttgaatcaccttgctaccattgcttcaactcattctgttagtattgaatccctcgatgattccatttctgatgccaaaagcaataaggtactccaattattgacttgccagagacaattgttttctgtaacactgcatatgctctttgctgtgcatttacacttatagatatacacttgctcctgttggtatgtgcttttccattttgtcttctgacatttcacggtttgggttaatttttgtttctatgttaatctcaaagctcgcttactgggtaggtgaaaagaaaagctttttgggtggttgttctggtgtgttgatgttgtgtactttgaaaatctggattgaatggcataacaaaattgggacttcagggtgctatgagctttctacgtttcagtagtggttcatctataggaatgaagcgaagaactattgactaaaaataaatttacttttgttgactactttgatgggtataggagatgagtagttattttattgaataataaagagatggaagatttgacatatttaaccttcatccgaaaaggagttcacttttgtacatgaatctggataagtgcatgtccagattcgtgttggcaaaaaacaactccttttggcatggaggtaataccaaataatcatatagttgtaggagagtacgctgattggatttcaattggctcattggctattaacttttagctggcttgtcatgttgctaatcaggcaatcagacctggctaaacagattatgataagtcgttcagggctatgggtagtgtattctttgcgtgccattctcatggctagcatctatattacaaggatgactgacagtaaattgacgagtcactcagtgttcttgaagtcggccttaggcactgcttaggtgtctattaggtgctcggtgccatgtagccagagtgataggcattagatggtgaattaggcacctaatctgccttgggagcctgttgcttttgagtgttctatctagcttttatgtaatagcaccaattgttcgggatttactgttcactagtcgagttggtcgtaggcacccctaggttctgttcgccctgccaactatttagcgtctagcaccttaaagcatggatcgactttgagttcctgggttaaatgcaagctgtactatcactaaaattactagtacatattttaggctgtaacagtttctcttttcattcacaacactaatgtagttactgccctgtacattgtatattataatggttggtttagattgttgctgaagtgcttggacattatgcagaatgatctgttaccttctctagagttggtctctaagatgatacaggatgtagaagttctggaagaaaaggctgaagtggccaagcatgaatcatctattgctgggacaagcattctcaccaaagtggggaagctgaaggaaatgttaaatcatgcgaaggaagcaaatgatatgcatgcttgtgaggtttttggtgagaaatctattttaaccacagaggcacgggagctccaatcgcgacttcagaggctgtcagatgagaggaagaactatctagtggtaattgaggagatacgccaaacacttgagcacagattggttgctgcacaacaagaaatcgatgcggctgaggagaagaagattcaaaaggaagcttctgctcaggcactgcttgatgagcaggaaaaggagatgaacttagccgttgaagaatcaagaaagctgcagaaagaagctgaggagaatttaaagctgaaggcattcttggttgagcggggtcaaatcgttgatacattgcaaggtgagatgactgtgatctgtgaggatgtgtcccaactcaaacaaatagtggatgagcgcttatcgttctgcaagttacagcggtcaaaaatgtcgagcctctcctcttcgctgcaatcttcgcttcacaagagtgggagttctgctgatagggctattgaagcagttgagtctacagataaacatacagtagccgagggtgctaatgcagcggttggtgatgatccaaatggcagcaaaagaatcatccatgtgtggaatggcagtggcatggctgacaaagacaatggcacagggggggataccaacgaggatggctgggaattttgctgacctgaatggctttaaaagtgcagggttgtgtaaggatcgttgatatgtagcaaaccggacgtcataattatgcataagcggtctatttacccttgttttctcatttaggagaccaaataaaaattaattggtgaattgacgactagaacacataatctcatggttcataacaaactctcctaaccaattcacctcatgacactatgtggtttgagatcattatttgctttctctatatatctgttcaaatttggtgaacacgaacccgttatgttattttaggaaatatacattgttactatggtttggtagtaacattatc

SEQ ID NO: 19062 - DNA, 1251 bp, Oryza sativa
  ref <308>: DATABASE ACCESSION NUMBER: AK069439
  ref <309>: DATABASE ENTRY DATE: 2001-12-06
gacaccgatccagtaatcgagctccagacatccatcaatggccatggagctctctaacctgacgaggtgccatctgccactgctcctgctcttcctgctggcaggatcctcctccatggctttgccagtgcatcctgcaatggacagggtgagatggcaggtcgacaaggtcaaccggcggggccattccatcgggctcgtcatgtcgtacatcgatgaggccactgctcttgaatcctccggctgcttcagaccttggcatgtcctccccttcgttgacctctacggacgaaggtatcacatcgggagtattagaggtgtcaatgttatatatgcactgacaggacaacgcaggttaaatgcggctgtgactgtacagactctcatcgacgtctttactgtgtctggcattgttcattatggcacagcaggaagttctaatgattcaatgtcatttggcgatgtcagtgtccccaaatttgttgcttatacaagtgcttggacatggaagaagttcaagtcaccaaaagagtcggatacagaacttagctttggagattttactgtcccaaatggaggagagaatcttctaggagctctgaaattcagaaatgaggagctatactcagtgggtaagcctatgaaagaagttttctggttacctgtagattcagcatggttcaaaatcgcagaaggacttaaggtttcacttgaaagatgtaacgacactttctgcttgccaacaactccaaaagtagtctgtgggctaaaaggatcgtcagctgatatgtttctagacaatgcagaatataggaagttccttttcagagaatttggtgtatcaacagtagatgaggagagtgcagcagtggtgatgacaacaacatctcctggcatacctgtgattgtattccggggagtttctgatttggctggaggggagccaacatggtcgtcaacaagcctgatgaacctggcatctattaatgcactcaaagtggcagtggagtttattgctacagtcgggaaacagaagtcaacaatgtcagcaggaagtgctaataactgaaggaaaaagatcacatccatgctgatccaataatgccctggaataacattttacagcagtagctgcattcagaataagatgctttcctgagcttcaagtgcatgtcctctcccataaaggatattagtgttgaattattttgttgaaacttgtaagcatgcatgtgcgatcattttattgcg

SEQ ID NO: 19063 - DNA, 1458 bp, Oryza sativa
  ref <308>: DATABASE ACCESSION NUMBER: AK069440
  ref <309>: DATABASE ENTRY DATE: 2001-12-06
gtaagcgtaacacctctcctctggtcttgctccgcccgccccgccccgcccgtgcctggattggacctgacgagaggagctcgcgccctgccctgtggtgccagtgccactcacttcgaggcgtgcttttttttttcctttttagggttcgtcggccggcgcggcggcgggcgcgtgtgctggtccagagctgcatcggcggctggcgcgctcttcgctcggaacatggccgggaggcacaccatcattctcatgcaaccatcgcagaacagagcgacaagaacatttatggacttcaattcagttaaccatgcactggatggtcggtattttctctcatgcttgcttgaaatgttagtgcagttatgggaataacctttccccttttgtgcctgtatgttcccggttatgaacttatcacaaaagtggtgcattaataaattgcatgagcatttgttgcttgcttcagctatataagcagtggcatagtattttcttcatttactccttatctgttagtactttggactgaaattcaggaaattcatcagatttttgttcactgtcttttagtttaaccttgtaggaatatataacagaacgtgtacagattgctttaataaactaacatgatatgctatagctaatgtacagaaaacccaacaagctactctttaaagctcaaatatcattgaggaatatgcgtagtgcttctatttgaatcaacatgataacagtcatacgttttctttaaccattaaatgaatgtctgtaaatttcacatagtttgggagtcacgcagtcaagtatcagctaaccataggaccatgccaacggctgtacgattgttgctgttttccattctaagtcttgggaaaagcatctctattatccccattatgttcttaatcatgcccaggacaagcattgcgtgctcttccttgtttcttaatccattttctatgtttatatgtgtgttcttcccttgaggaacttggtacttacagtttgctgtatggaatgacaggaatctgtggcctttacgaaaggaaaatcagggatatcaaccctatggccagggacttaacttatgatataaatgacctgtacaatttcatcgatggcctaaccgacataagtgcactagtgttcgaccggtcgcttcatgccttcctgccatacgaccgtcggtggataaagcaggagatgtttcagcacctgaagaggttagcacagcagtaaagcgtgatcgatcgccgttggcaggtgaatcagcaaacaagcgtgatcgccgtggtatcctgttgcggtttgtttcgtggtgtgagatatctgggatttgtttcttgtaagaaaaacgcgaggttttgggtcgccagcctcctgtcgtatccgatgcagtattctggctttgaatggaatggtttgcctctgtctgtctgtgtctatgacagtatc

SEQ ID NO: 19064 - DNA, 4090 bp, Oryza sativa
  ref <308>: DATABASE ACCESSION NUMBER: AK069441
  ref <309>: DATABASE ENTRY DATE: 2001-12-06
gggcggtgccgcggcgaactgacgctcctctcctcccggcgacggcggagccctctcgatctgctcatccctactcgatctccgcgccgccgtctcccaccttcccctctctctcctccccgcccttcccacgctccaccacgcgcccgccctggcgctcgagccggcgaagcctacgccgtcggctgccgccctctccaccacctccatgtcggccgtggcccggtggcgcggcgcaaatgcagctagccgcagcgcgctgcttcgacgggagagggccggcggagggcgccgatgccggcgaggctaccaagaggaagggctgaggccgatgggagcggagatcgatcgagcctcttatttaagcagaagttagagttgaaataagagttgttgggacagggggtatccacttttaaagagaatccaacttttagtagtgcacatatgctgaataccttccaagacaactcatactggcaaaagagaagaaagcaagagggaagaagatgtgcataccacaaggattacaaaggcagcaaggggtcaacattgattgcctgcaaaaccatctgatgagatgggaaaagcagctcgggaaagatgataaaatctgtgacaacaattttaattacagagccgtgcagctgtcggggattggaagcgttccagcataagggtgcatagatgttgtatggatcaatgactcccttttcagtatcagcttctgctaaagcatttcggcattgtgccatgtatgttccattgaagctgcaatttcgctgaactgcaagcattcgcaagctgtggtatgtagtggccgccgtaactttcacctgttatgaagaagtcgcggcccttgtactctgggaacctctcgagccagttggtgaggaaagtgtatgcatctgctgccgtgctcgtgtcaccagtgttgtcgtagtctgatgttgtgttggagtatgagaagccaacaccagctgggctctcaaggaagagcatgtttgccactgccatccaagaacgatcattagtgcaactgtgcgaagtgtcctgttatcgccattgactaagaatggtccaatttcaagcatagctccatctcccagagaagaacatccaggccctgaaatctcaaggattttgagaaagcaatctgaaatttggtgcatcgtcaattttctgttgaaggaccagtgccagttggaacaaaaggctgaaactttaaatgtatcaaaatcagttgacccacgcctaaattgccttggaatctttgaattggtaaaagatctcaaattaatcaagcaacatcaggtatcttgttctcttctccttttcttgaacactgttctggctccacacatcttgaagaagacctcaatcaagtataggacataggaagggaggtgtatatgctttgtaaattgattttttttttttggcaacattcttgtctgatgcttccagtaaggccaaactgtgctccacggccggcatttgagcttggactgaacaatgatattgcaaatgccatgattagcagcgggctgttcactttattgtcaaaattaaccctgcaaagttaatgattcaaacattgccaattctcgaatctctctctcacaaaaacatgacaaaggtagcagatcgaatacaacccacacatctcaaccttactaaatattagcaacattaaaatttgacaccactaaaatttagtaaggttgatttaggcatcagtctcgtaaattatctatcgagatttttcttatggcattacaaactttgtgaagagtgctaggaacacatggctaaatgttgaaaatgtgattttttttttgttgcaataaggtctgggggcaatagtatttccatgagcataatgaaagcaaacctaaggtggttggtaccattaacaaaacaattttattgccggcattaaacagatttaggcctgtcttgctcaaaatcaaaatgggggcagaatgtcaggttttcttctggcctgtctttgggccggcttgttagcacttagattgagcctttgtgctgtaagcaggccggctgtttccaattcttgtgcttcccttgtataattgagaagaaaacgtacaatttgttcatggcctgatgggctttgcaattttgtatgttctccttacgttttctttggtaccaaccggtttttctttatgacataatagtggtctaagttggtacattcatgcataaatcatgctggtatagtggtatatacgaatggtcaaataagtcatttccttaatattgaaatcctccattagcattctgatgtttgattttaatgtcctctggtactcttttatcttttcttataccgaaagcttcactccaactaacatgtgtatcaggaaattaaagtccatctagaaaaaaaaggaggaaattaaagttcatctagaaaaggaggaaattcaaggaaaaggaatgaaaagagctgcaagttattggtttgatccagtataatcagtttcatccttacctttgcactttgcataaagctggccaaaggagaagctgaaagcatttgaaccactcatcagtactttctacctagctagtttagaattttagatcgattaatgataacacaggtaaagaacatgtgtaactattggctgtcaaaacatttgtcattatttaaacatgttgcaagattcctcgcgcaaacgtaagagagaaaataaaagcaacttgtttgcaagatctttggagcttaacctgctggtggattggttgagagccttcaagtgttagttgcttaagtgaagcaaattaattaaatacatatctttttgtttgaaaggactagcgatgcatatatagtggcaatgttagtgtatagttggatatcaacggaagcttgtgcttttttacaaatgcttagtggaattgaaatgcattgcggttggggtgaattctcatgtcattttaatcagcagacttggccgtgcgcacccgcttccggatgcagaggctgggcattatatattgcccattatctaaaaaagttttaatcagcagataatcattgatgagtatgagtgtaaaaattactcataaaaatacccatgattggggtgagtaccttagttaaagcccggatagtttgtctacaatacccataaaaattaatggttagattcaaattctatcgtataatacaccttttagaacttataaattattatcaataatttgcatatttaatcaatatgttacaagtatatatggcacacttatcaggtatatatagagagttagagactcttttctttaaaaaggtaccaggtgcaacaccattttagccctatagtatctgactgtaaactgttctccaacctatacttcttcagttctacaaagcatatagtgctccatgcatgcagaatctgaagttctgaacaaccaccaccataaattaatagtcatattggcagattaaagcatgcatgaactttcttcttcttcttcttcttcttcttcttcttcttcttcttcttcttcttcttcttcttcttcttctgattttgcagttaattcttgcaggcgggtagacgataagtgtacttaacctcaaggcaacaagtaattgcatgcaacccccagaaaattttttaaaaaagaggctcttctctcttcacatgttactatcagctactggaaatgctgtcacacagcaagcacagattatccaggcgaccaggatgatcacgctctagaagccttcatgttatgatggctgtgtatcttcattcgagcactgaaccaccgatcgagcctcgaaggctggcccgccaaattaaaggaaaacatgtcagtattttcagcctgtgtttaatcttcatcctcccttttctggcctcttccatctagaagtagtgcaaatagagattgttttttatcctacgactatatataagagggatgtcctcttgttttttcacgtgtcgtcgtagaaatgtatccctccatttcaaaatgtttgacaccgttgactttttagcatatgtttgaccatttgtcttattaaaaaaattgtgaaatatgt

SEQ ID NO: 19065 - DNA, 3116 bp, Oryza sativa
  ref <308>: DATABASE ACCESSION NUMBER: AK069442
  ref <309>: DATABASE ENTRY DATE: 2001-12-06
tggggaaacccctccggaatctacaaagcctactcctctccctgtcctgaaacgccgtgacggcttctccttctccctcctccccccgatccagccatgtcgtccgcgccgccgccgcagcaatccaaaccctcctacaaccaccgccgccacaacaacgccgccccgaggcaccaccacggccagcagcagcagcagccgcagccgcagccgcagccgcagcagcgctacgtccccaagcccgccgcacctaaaccctcgcccccgccgacgctcaccaccgccctccgatcatcggcttccccgtctgcatctggcgccggcagggtgggcggagaggccgatgggttcgtggcgtacctgccgcacgacgaggtggtcgcggccgggctcggcgggcccgacgcccaggagtcgcaggccgtcgtcgacctcctcaacgatgccctcgccgcgctcctccgcgctaagccccgcgagttctggcgccaggtggcacagaatacttccctgcatgagttcctggacagttacctacaattcaggcatcggtggtatgacttgcctcatcgtgcacccaaagggacagttgctggcttagttgtcggggagcttgagctttgccgtcgagtctttatggtcctgtaccgcatatcttcaaacaaggatcctggagcattcaggggtgaatcccttagcatgaaggagcatgcagccctcctgcaggagaaaagattgcttgatttacccaagttgttggacatttgtgctatttatgggcatgacaattgcaaattgacaagttcactggttgaaaacgctatcaatgtccagccaaatattctggatggcattaatattgtccttccccaattcctgggcattttccacacaatgcaggagaggtgcatgaaatcattacaggcgctcacttcatctggaccgaatgatagtggatatacccaacttcagaaagatttctcagaggtgttggattttgtaaacgatgcaattgtcactctggatgcctttgtcgatgcttatcaacctgctgctttattattttgtacctcttttgagacgagctatggagttgaggaactactgaacactcttccaagattgtatgactcattgttgccatctttgcttcatgggtttcaagttatgtccagttcccaaagcaatggagagactgcatctgacattatactgagtgacatagttcttggtataaggatgctgtcaaggagaactgtcagtttcggatggagattattggagttctgctatttgaacaatcaacttgtggagcgtgatgttgaagcttgtacaaagatgtttccagctaaagtcgaagatcctatgatcaggggtgacatcataattcaaacactcaaggatatcaatagagaagccacattttcacaagatcatcctggaaagacattcctccaagctcttgaaaaggagttcaagttgatgaaccggattggagatattcgaaagaaaggatggatacacatggatgatgagcagttccagttcattgcacgcttgtgtggatctactctgacatcttggaatagtgtgcctgatttgcctgtctcttcctatggtggtgaactacaacataagaatgaggatactgccatcactgagtccaagattactcaaataagggacctctttcctgattatgggaagggtttcctcgctgcatgcctggaagcctacaaccagaacccagaggaagttatccaaaggattttagatggaaccctccatcaagatcttctagctctggatacttcattagaagagatgccgcagctaaagcctgcagccactgttgggaaagataagggcaaaggaatacttgtggagactgagcctcaaattatgaacaaaccccataaggttaatactgagatgcatcgctatgttgaacattcttcatcttcttcagttccatcagcatcccagggaccatcctcatctgtaccatcagtcccgcaaggtagatttacaaggaagaccaatgacgacgtgcctgactctgcaactctagactcacagaaagcaaaagatgctgttagatcagctgtgcttgaatcccagtatgaatatgatgatgagtatgatgactcgttcgatgatcttggcttcagtgtggtagaatcaagttatgaggaaactgatggtgccaatgatgccgagagttcctcacagggcccacggtggagctcacaaaagaagacacagttttatgttaaggacgggaagaactacagctacaaggttgctggttcagttgctgtatctagtgcccgagaagcggctgtcctgcgcaatgttcagaaagataccattcatggtcttggccgtggtggaaatgtacctcttggagttcccaacaggcaacaacacagagacatggaggaagaggagggtagcaatgcaaacaacttcggcagaggaggctccaacataggcagaggaggctcatatccccgtggcgatcatggcagaagaggtggaagggatcacggcgacccaccgccggagggcgagaacccaaacgggccaccaggatttggccgtggtggaagaagagggggcagaaatcacggcaaccagccagaggcaaacgagaacccgaatggccaacgtggatttggccgtggcgcaacaagaggaggcaggaaccatgaccatccagcggaggaccatgaagatccagatgcagcacagggcttcgctcgaggagggcctgcacctcgtggaggcagaggtggaaggagaggtggtggccgggataaccatcaccggagagaccgtgcgatgaagaagcatatgcaaggattgacagggctttagttgatggttttcaccatcgtttttcattgcgggaactgtaaatgtgacagtatttttttttgacgtggtctagactcggccaaagcatacgatgccttgaagcatccttatgattactactcgtatattttacccatagcatgtggaatcaaactattgatgatcatatttcttgtagcttcggacagaatacaaagtttgaatctcataaatgaaagttaaatctgtgttgctct

SEQ ID NO: 19066 - DNA, 1104 bp, Oryza sativa
  ref <308>: DATABASE ACCESSION NUMBER: AK069443
  ref <309>: DATABASE ENTRY DATE: 2001-12-06
ttggagagagagagagagagagagagagagagagaggggggagcggtcgcaggaggaggaggacggcggcgtctgctgcgaccgacggggagcggcgaggatgagcgcgtccaggttcataaagtgcgtcaccgtcggggacggcgccgtcggcaagacctgcatgctcatctcctacacctccaacaccttccccactgattatgttccgacggtgtttgacaacttcagtgccaacgtcgtggttgatggtaacaccgtcaacctcgggctatgggacactgcaggtcaggaggattacaacagactgagaccactgagttatcgtggagctgatgttttccttctggccttctcgctaatcagcaaggccagctatgagaatgtttcaaagaagtggatacctgagctgaagcattatgcacctggtgtgcctatcatccttgtgggaacaaagcttgatcttcgagatgacaagcagttttttgtggaccatcctggtgctgttcctatcaccactgctcagggagaggaactaagaaagcaaataggcgccccatactacatcgaatgcagctcaaagacccaactaaacgtcaagggcgttttcgatgcggcaataaaggtggtgctgcagccacccaaggcgaagaagaagaaaaaggcgcaaaggggggcgtgctccattttgtgatctaatcatcagtagacgacgaagaagaagaacgatgaagttgccaggctttattattgttgcgtcttgcttcagcgaaacagcattcatggtccggggatcctagtttactggcagctgcagcaaggcctctttgtcgaggcaatgagcgatccgtttgtttcattttctcctttctgccttgtgattatctcgtgtgactgacaagtcgtggcaattaggtaactttcctagatggtatttcctgtgtttgagaaaaaaaattcttgttatccctgtttcataagtagacatgatgtaatcgcactcagtttattcttttccttcttatttcacttcaatggaaaattatgtttccccttcatattctgttctgcaaatggagcaagatctgtgatgttcttctgact

SEQ ID NO: 19067 - DNA, 3594 bp, Oryza sativa
  ref <308>: DATABASE ACCESSION NUMBER: AK069444
  ref <309>: DATABASE ENTRY DATE: 2001-12-06
agaaccatggcggcgaccaccaccgttcctctacgagactgatcccgtcgtcgccatggcctctgtggcggcgcagctggtcggcgcggccctcacgctgctgctcctctccgtcgccgcagcacccgcgcgggccaacgaagtgccacgcctcttcctccaggagatcgccagcgactacgacgatgggatcggaggcacggcgggggataaaggggcgaagaccatcgccgggagtcccatcgtagccggggtcatgaacgaccgtctcaaggcgcttacctcctcctttgccaaggctattggcgacaagctcgactactgcatcaaggacaccgacaaggagtggaatgctgcgttcaatttctccaaggacaccaccttcctcaccaattgcatgaagcagaccaacggagacctgcagcagcgtgtctgcacagccgcagagatgaagttctacttcaacagtttgatcgacgccggggagaagagcggggagattaattatgtcaggcccaacaaaaactgcaatctgtcatcctggatggacggctgcgagccgggctgggcatgcactgttggaaaagagcagaaaatcaatctgcaggatgctaaggatatcccttacagagctcttgactgccaagcttgttgccctggcttcttctgcccccatggtctcacttgcatgataccttgccctctgggtgcatactgcccgctgtccagcttgaacaaaactacaggcatctgtgacccatacaactatcaaccacccgctggaaatccgaatcattcttgcggtggtgctgacaattgggcagacgtggttagcactgacgatattttctgcccacctggattctactgcccgagcacgacacagaaactcccttgtagtagtgggttttactgcaggaagggatcaacctcacaaactagatgctacaagaagagctcttgtccaccaaactctgctacacaggacattacaatatttggtgcattgttagtggttgcctcctgtttagtgctcctgatcatctacaacttctccggccaaattttgacgaaccgcgagaagaagcaagcaaaatcccgagaggctgctgcaaggtatgcgagagagactgcgcaagctcgagagaggtggaaatcagcaaaggatgtcgccaagaaagccggaacgggtcttcagtcacaattgtctcgcaccttctcacggaagaaggctgcccagacaccgaaaggtggtggcggcggcggcagcagcctgcctccaagcggagaagatgggggcgggaggaagaagaacctgaccgacatgatgcagtcgctcgaggacaacccggataacgatgaaggatttaacctggagataggagacaagggcctgaggaagaacatgccgaaagggaagcagatgcacagccggagccagatcttcaagtatgcgtatggccagatcgagaaggagaaggcgatgcagcaggagaaccacaacctgaccttctcaggcgtgatcagcatggccaaggagcacgacgtcagcacgaggcccgtcatcgagatcgccttcaaggaccttacgctgacgctgaaggggagcaagaagaagctcttgaggtccgtgacagggaagctcaggcctggccgtgtggccgccgtgatgggcccatctggcgcggggaagaccacgtttctcagcgccattgccgggaaggcgactggctgcgagacgtcaggcatggtgctcatcaatgggaaggtagaacccatccgcgcgtataagaggatcattggctttgtcccccaggatgatatcgttcatggaaacctcaccgtccaagaaaatctctggttcaatgcaagatgcaggctttcagcagacatgtcgaaagctgacaaggtgctggtcgtggagagggtgattgagtcactgggactgcaggctgttcgagattctctggtcgggacagtggaacagcgcggcatctccggtgggcagcgcaagcgagtcaatgttggcctggaaatggtgatggagccatcggtgctgattctggatgagccaacgtccggtctggacagcgcctcctccctcctcctgctccgcgcccttcgccgtgaagctctcgagggcgtcaacatctccatggttgttcatcaacccagctacactctgtacaggatgttcgacgacctgatacttctagccaagggagggatgacggtgtaccatgggcctgtgaagaaggtggaggagtacttcacggggctgggcatcaccgtgccggagcgagtgaatccgccggactactacatcgacatcctggagggcatcgtcaagcccaccatgagcgccggcgtcagcgtcaaggacctgccgctcaggtggatgctgcacaatggctacgacgtcccccgggacatgctgcagagctcctccgactctgagtcctccttccgagggagcacgagcccggccctccggcgatgcctccgtcgcggccgaggtatggggcaacgtcaaggacatcgtcggccagaagaaggacgagtatgactacaacaagagcactgaagatttgtcgaaccgctgcactcctggcattcttaggcagtacaggtacttcctcggaaggtgtggcaagcaaaggctccgtgaagcgagaatacaaggggttgattacctcatactctgccttgccgggatatgcctggggacactggccaaagtcagtgacgagacgtttggagcgcttggatacacatacacagtcattgctgtttctctgctgtgcaaaattggagccttgagatcattcgcgcttgacaagatatactattggagggagagggcctccgggatgagctctctcgcctacttcatgtccaaggacaccatagaccacctcaacaccatcgtcaagcccatagtctacctctctatgttctacttcttcaacaaccccaggtcatccatctgggagaactacgtcattcttgttgccctcgtctactgcgtcactggcatcggctacactttcgccatcttctttcagccaggctctgcacagttgtggtctgcgctgcttccggtcgttttgactctgatagcaactcagcggaagaacactttctttgctgacctgtgctacacaaagtgggctctagaagggtttgtgatggcaaatgctcaaaactactccggggtgtggctgattacacggtgcggttcgctggtcaagagcggctatgacatcaacgacaaggctctttgcatagtggttcttattgccaatggtatagttttccgctgcgtggcattcttctgcatggtgaccttccagaagcactagaatcgtccatgacaagagaaaaacaaccccataattctccttctttgtctatccatgtagctgatacgttcattcattgatttatgtgcaatagaaatgtacattataacctcttctgtcgggcgccaggtgtagatgagagcagactcttcaatagtagtaaaaaactgatcaggattcatgaataccctaaatctctatctattataaaaattgaaaatgtttttgctgt

SEQ ID NO: 19068 - DNA, 2307 bp, Oryza sativa
  ref <308>: DATABASE ACCESSION NUMBER: AK069445
  ref <309>: DATABASE ENTRY DATE: 2001-12-06
gtggctcgtcacttcactccactggcggcggcggcggcggcgacaggactcccgccgccgctcagctccggcgtcgccctcccggaggtcctcgtcgtctgggacatcctggtacggcttccccccaaacccctcctccgctgccgcctggtgtgccgcgcatggcgccgcctcacctccacccgcgacttcctcctcgcccaccaccgccaccagccctccctccccctcgtcaccggctgcagaaacggcgacgtcctcgccgtcgaccgccggcgccggctcctccaccccgtcgcccggttcgacagctccgtcttctgcgtgaaggaggcctcctgcgacggcatccttgtcctctggaggaagagggccatcggtgcccattccagtgtccgcttctcgatctgtaacccgaccacgcgtcagtccggtgacatcccgctgccgctgctcaccgggttcatgctcatgggcttgtactggcaccgccccaccggcgagtatcggcttctgctctacaggatagagctacctgcttcggagcggctcgttgatgttctgatccccggcgatagaaacgcctgctacgtctacacattgggctctggcgatttgccgaggtgcattgggtggccagaggcggaggcaaacggcgcatctgtgctgctgcatgggagcctgcattggtataagagaatcgaagatatgattttggcgtttgacattacagccgagtcgttccggtggatgcggtctccattcggcaaggcggtgtggagagcgtttcatggcctgtttgagattaattgtatgctcggcatgtactgctgtgacgatggtgcgacatttgtagatatctgggtgctggaggattatgagagagaggtctggtctctcaagtaccgggttgaattgccagttctagagatcaggagagagcttgatgtgaagcgtgatctttacagtgtgatggtttcttccgaggatggggatgtgcttgtgctggttaactgcaaacgagccatgctctacattggtactgatggcaagctgttggcgagtttgccacatgataatgacggcctcagtattactccagtgaagcttagagcaagccttgttccgcatgcattctttccatctctgctggactatgtcgtgaatgcttcgcctttcgtgtgatgcctgctgaatgagtgtaagacccatctgttatctgatgaagtcagttgggtggaactcttgtcttcagcgctacatgatgccatgaaaagcttggcgattaccacattctggagttggctgacctgatactagtcttgctggatgtagctgcttggtgttttatctttgctggagttgtacattgtgtctattagttccttgctttgctttcaatgaaaagcaaggtcctatgacctttatctaaaaggactactctgaatgatttgtgatggacaataccgctcctatggtttcatctacaaaattttgaaattcatttggtgctgcagcatgaacttttgacaagacacaatctcacttttgcatctattttcttgaactggttgtttaactgttgaggttgagctgcttgtagtggtggaagtggtaatgatgatggtcatcatggaagagggataaccagcagttgaagaatcaacaaattcaggtgtcaccttgtccatggtttcagatatggcttcatggattctgtaatcaaatcatctttgtcaaaacctcaaagaagacaaggccgccctcaccggcgatgtctactgtctggatgagaggagggagtctgcagtggtggcggagatgccccgatgtttctggtttctggactcgccaccttcatctaaatacctaaggtggaccatatgctggatgttgtttggcagaacaccagcaggatggcggagcactaatacccgtacttttggagtggcagtattgtcgtggttgaattgcagataccctctgtatgaaccaatgatagttcgatgtggaaactacttggaagctggaacatgccaaaaaattgcaggttggttctaggcagaattgcagataccctctgaaccaattatagctcgccgaggaaattacttggaacatgcctaatttaatggcaggacgaccttccttgctctgcgtgtttttgccgcttaaataccatgacagtataattcatgtttgctagctcaatacgctagctgtgtcctttcattaaacctggattgtagcgttcgttttctgtacaataagagcatgtttagttcgcgaaataaaaatttttatgtc

SEQ ID NO: 19069 - DNA, 1898 bp, Oryza sativa
  ref <308>: DATABASE ACCESSION NUMBER: AK069446
  ref <309>: DATABASE ENTRY DATE: 2001-12-06
ccttctctcctcgtccttatcaccaccaatccgatcctcttctcttctcttctcttcttccccacatccagttcgattctcatctctcccacaacaaatcacgccatggatccctacaagcatcggccgtccagcgggagcaattccaccttctggaccaccaactccggcgcccccgtctggaacaacaactccgccctcaccgtcggagagcgaggccctatcctccttgaggactatcatctgattgaaaagcttgcacagtttgacagggagcgtatccctgaacgtgtcgttcatgcaaggggagccagtgccaagggattttttgaggttactcatgatatttctcacctcacatgtgctgattttctccgtgctcctggtgttcagaccccagttattgttcggttctccacagtcgtgcatgagcgtggaagccctgagacattgagggatccacgtggttttgctgtcaagttttacactagagagggtaattttgatcttgttgggaacaatatgcctgtcttttttatccgagatgggatgaaattccctgacatggtccatgctttcaagccaagtccaaagaccaatatgcaggagaactggagaatagttgatttcttttcacaccacccagagagcctgcacatgttctccttcctctttgacgatgtaggcatcccactcaactacaggcacatggagggttttggtgtcaacacctacaccctaatcaataaggatggaaagcctcaccttgtcaaattccactggaagcctacctgtggtgtcaaatgcctgttggatgatgaagctgtgactgttggcggcacctgccacagccatgccacgaaggacttgactgattctattgcagcagggaattacccagagtggaagctttacatccagactattgatcctgatcatgaggacagatttgacttcgatcctcttgatgtcaccaagacatggccagaggatatcatccccctgcagccagttggacggatggtcctgaacaaaaacattgataacttctttgcagaaaatgaacagcttgctttctgcccagcgataattgtccctggaatccattactctgatgataagctgctccagacaagaattttctcctatgctgatacccaaaggcaccgtcttggcccaaactatttgatgcttcctgtgaatgcaccaaaatgtgcataccacaacaaccaccacgatggctccatgaatttcatgcacagggatgaagaggttaactacttcccttcaaggtttgatgctgcacgtcatgctgagaaggtccctattcctcctcgtgttctaacaggctgtcgggaaaagtgtgtcattgacaaggagaacaatttccaacaggctggtgagagataccggtcatttgaccctgccaggcaagatcgttttctccagcggtgggttgatgctctctcagatcctcgtattacacatgaactccgtggcatctggatctcctactggtcgcagtgtgatgcgtcccttgggcagaagctggcttcacgtctcaacctgaaaccaaacatgtagatcggccaggaggaatccagtggtggtgctatgttggacagtcaaacatgaactgtaatgtgtcgaccagccgtagtcgtgaataaaatgtgatacggtgatatgtatactggtgacgcaagttgtgaaactgtatctggaatcctgaaaatatgccttgctgtgtcttgggaaagagataataaagactgatacagtgggtgctatatgtttgaacttgtttatacatctgccatctcttgtttgcctttgtgttaagatggctttagagactggaacgaacaaccagctgtttgcctttgtgcctttgtgtt

SEQ ID NO: 19070 - DNA, 2558 bp, Oryza sativa
  ref <308>: DATABASE ACCESSION NUMBER: AK069447
  ref <309>: DATABASE ENTRY DATE: 2001-12-06
gactccacactcctcgactttcgtagcagcaagccacgcgtgaccgagaagcctcgcggccatggcgacggcgacgcaagctcccacctcgcccgccgccgcgtccgggcgtggctccgttctccccctcctccgtggccgcccctccacccgcgtccgcctcgccgttggccggcgaccgcagaccgccctccgcgcgcagccgccgggggcggcggaggtggtggagcagtcggtgaacaccatccggttcctcgccgtggactccgtggagaaggccaagtccggccacccgggactccccatggggtgcgcgccgctgggccacgtcctattcgacgagttcctccggttcaaccccaagaacccctactggttcgaccgcgaccgcttcatcctctccgccggccatggatgcatgctccagtacgcactgcttcacctcgccggatacgacagcgtcacgatggatgatctgaaagctttccggcagtggggaagcagaactcctggtcacccagaaaacttcgaaacacctggtgttgaagtcactactggtcctctggggcagggttttgcaaatgctgttggcctagcgcttgctgagaaacatctagctgcccgtttcaataagcctgatttgaaaatcgtggatcatcacacgtatgttatacttggggatggctgccaaatggaaggtgtgtcaaatgaggcatcctcccttgctggtcactggggtctcgggaaactaattgccttctacgatgacaatcatatatcaattgatggtagcacaggcattgctttcactgaagatgcacttgcccgatatgaggcactaggttggcatactatctgggtgaaaaatggtaacacagggtatgatgacatccgtgctgcaattaaggaagcaaaggcagtcaaagacaagccaactcttatcaaggtgactactactattggttatggatccccaaacaaagcaaacacttatagtgttcatggtagcgctctaggtaccaaagaagtagaggcaaccaaaaacaatctttcttggcatcatgaacctttccatgttcctgatgaggtgaaaaggcactggagtcaccatattgatgagggtgcttctctggaagctgaatggaataaaaaaattgttgaatatgaaaagaaatatcgccaggaggctgctgagttaaagagcataatttcaggagaactgccttccgggtgggacaattctcttccaaaatatactcctgaaaatcctgctgatgctacaaggaacttatctcaacaatgcttgaatgctcttgctaaagcaatacctggatttcttggaggtagtgccgatctcgcaacatcaaatatgacattactaaaaatgtttggtgattttcaaaaagacacacctgaagaaagaaacatccgttttggtgtgagagagcatgcaatgggtgccatttccaacggcattgcattgcacagtcctggactaataccttactgtgcaacattctttgtgtttactgactatatgagagctgccattcgtctttcggccttatgtggatcaagggtgatctttgtaatgactcatgattcaattggccttggagaagatgggccaacacatcagcctgttgaacagttattcagcctccgcgccatgccaaacatactaatgcttcgacctgcagatggaaacgagacttctggagcttacaagattgcagttcttaataggcaaaggccctctgtccttgccctttctaggcagaagcttcaacagctgaaaggaacatcagcggaaggcgttgccaagggaggatacattatttctgataattcatcaggaaacaaaccagatatcattctcatcggcactggttctgaacttgagattgtagaaaaagccgcagatgagctgaggaaagatgggaagactgtacgagtagtttcactggtttgctgggaattgtttgaggagcagtcggagaaatacaaggagagtgtttttccaagtgaagtaacttctaggatcagcgtcgaggctggggtcacatttggatgggagaaatatatcggagaaaaaggtaaagctattggtgttgaccgttttggttctagtgcgcctgctgggaaaatatacaaggagcttggtttgacagtggaaaatgtcattgcaacggccaagtcactgtgaagtatcgtttgctttaatgagcatatatataggaatgccagtttcaataatatattggatttgaataaagcggcaggctttcaagtagtttgtgcttgaggagtccgtgtttaggctttctgagtgtaaggcactttttttttgaacgaaccagtcagtgtaaggcactttacatgctgtttcaattcactcttgaattttgccgtcgcacttgggagcattgagagtttattagtcggggccggcccatgaactgccattactatgttgttgcagaataaaatgttgatggcattatcagattcattatcggctttttatcaagttataatggtatggttctgatttttcc

SEQ ID NO: 19071 - DNA, 890 bp, Oryza sativa
  ref <308>: DATABASE ACCESSION NUMBER: AK069448
  ref <309>: DATABASE ENTRY DATE: 2001-12-06
gactgccccgcggccgggcttgcagatcggcgccgccgggaatggcttccgggcatgctccctgcggcgtctcaggtatcgtgtctgcggcggggatagggtcagggcacctccagtagacactcacgcacatgatctccatgcctctgactgcttacacgaactccggccaggcgataacattgagatccaatggagaaggaacaaggaattcccctatggctggtggtatggagttgttggccacttggagtcatgtgatggaagtgagcacttttgtcggtgtcatcttagtgacactgttgttctggagttcaaccaatacacacctggttcaagatggaggcaggcgctggtgaaccggaaggaccacagggaagagggcaatgagggcgacggtttctacggtggaatcaggaagctccgcagcaaggatgagatctcaaagtggagacagttgtggccaacagacattcttgagtagcaagggcagagattattattccactgttgttattcatcaagttgccaaattgatgctctccaattgctcattctgtattctgaaacctgacgaaaacgccacccatctcctccactcaagttgtatacacaaaggattggaacatggggtgacaaaatttggtagcttgggacacaattgtgaaacttactgtaaggcacggatgcacagattgcttctgtaaacgggcgttaactgaacatgtatcaagtctacagcattgtatgtgactgctgcagcctgtgcctctgcatgttgttgtagctgtagagcagaaagatcaaatgtaaattacattgttagctccaatttaatttacggcatttcaggatgccgtctcacggttaccctatccatgcgctttttc

SEQ ID NO: 19072 - DNA, 1169 bp, Oryza sativa
  ref <308>: DATABASE ACCESSION NUMBER: AK069449
  ref <309>: DATABASE ENTRY DATE: 2001-12-06
gagttgcttttgcttcgtctacctctcgccgccgttttccccccaaaacccgcgacgacgaaaaccctagccgtcgccggaatgtcgaaggccgaggccgccgccgccggcgacgccgccaagcccgacccggagatgggagtcgcgggggagaaggaggtggttgcggagaaggcaccggcgaggaggaaggtagcggcggaggaggaggacccgcggctgcggtgggcgttcgtgcggaaggtgtactgtatcctggcgctgcagttcgccgtcacggcggcgatcgccgtcgtggcgtgggccgtccgccccatcccgcgcttcttcgcggcgggctccctcgcctcgtggctcgtctacctcgccatcctcctctgccccttcatcgtgctgtggccgatgctcaagtacagggagaagcaccccgtgaacctgctgctgctgggcctcttcacgctctgcgagagcctcaccatcgccgtctgctcctcgaccttcctcggtaaagtggttctgcaagcagcaatcctaacggcggttgctgtcatcggcctcaccattttcacattctgggcagcccacaggggccatgatttcaccttcatgtatcccttcctggccgccagccttctggtgcttctggcatacctcatcattcagatctgtttccctctggggagggctggcatgacgatctacggctgcctcgccaccgtgctgttctccgccttcatcgtcttcgacaccaatcagctgatcaagcgccacacctacaacgagtacgtcatcgccgccatctcgctgtacctcgacgtcatcaacctcttcatggctcagctctcgttctccatctaagtggcacgcctgttcttacgcccttcaacggttgtccagtacatggtggttcttacagctgaagaaacttagttacatttaccttacctaccatatcctacactactatatatgcagcgagaagtcttgcagagctggagactctggacctgtaattacttaatcatctctagctatgttgcactgtcgttgcgctgatagcacgatagatatattctggtacctttgagacatgtttgcagtgatctgcactacatcggtttagatctaatcagtggagcgaaaaacttcaatggagatgttaatttctc

SEQ ID NO: 19073 - DNA, 591 bp, Oryza sativa
  ref <308>: DATABASE ACCESSION NUMBER: AK069450
  ref <309>: DATABASE ENTRY DATE: 2001-12-06
gtttttctctcttcttttttttttcacccggcctctctccctcgccttcctctcctcctcgccttcctcccattcctctcgattccggcgtccaatagccaggcgcgccggccgccggtacccgcggcggcggcggcggcggtgcctccccttccttcgcggcgtcttcctcctttgcgccggcatccttcgtcgcgcacgcagggaaatcaacgcctctcccgggtgattgcgccgagaggggtagggagaagggagggagatccggccaccctgcaaggcatcgtcaccgccgtgatctggaagcactatatacaactacatagtgaatctgaggccattgtttggtgcatgccttcatcggaagttctgccttttttttttaacttgagttgtatggactacttatgaacgtggaacttctctatccttttgtaataaaacactataattcagatggttggagtgtaatgcttgtgataaagcaaaatgcttttactcttatttggagtttacagactgagttgcctgtaaatttgtaaaaaataggttggaaaattggtatgaaaaatctgactatctgagagtact

SEQ ID NO: 19074 - DNA, 963 bp, Oryza sativa
  ref <308>: DATABASE ACCESSION NUMBER: AK069451
  ref <309>: DATABASE ENTRY DATE: 2001-12-06
agccgccccccaaacacaccaccacccaacactatcggaattggttcgggagcaggtcaagcaggaggcatggcggcggcggcggcggcgaagatagcgccgtcgatgctctcgtcggacttcgccaacctcgccgcggaggccgaccgcatggtccgcctcggcgccgactggctccacatggacatcatggacgggcactttgttcctaatcttactattggagctccagtgattcagagcttgaggaagcacaccaaggcatatttggactgccatcttatggtgaccaatccttcggattatgtagaaccattagcaaaagctggtgcctcaggtttcacattccatatagaagtatccagagacaattggcaagaactcatccaaagtatcaaagcaaagggtatgcgaccgggtgtatcattgaggccaggcactcctgtggaggaagtttttcccctggtggaggcagaaaatcctgttgaattggttcttgttatgacagttgaacctggctttggtggtcagaagtttatgccagaaatgatggaaaaggtgcgtgccctgagaaagaagtacccatcccttgacatcgaggttgatggtggtctgggtccttccaccattgatgtggctgcatctgctggggctaactgcattgtcgctggaagctcaatatttggagcagctgaaccaggagaggtcatatcggcactaaggaagagcgttgaaggatctcagaacaaaagctgatctgtggttttgtactcggtttctattgtaaactagggccactctgcacgtcttctttacagagatccccagattgcactacgtgagctgttgagagataataaaatgtgcccttggcagttggcactgattccagtgttactaaatgttaaaactcttgggtccgtttttgatggacaagtcacaagtaaagcttaatgatacttt

SEQ ID NO: 19075 - DNA, 766 bp, Oryza sativa
  ref <308>: DATABASE ACCESSION NUMBER: AK069452
  ref <309>: DATABASE ENTRY DATE: 2001-12-06
gacttgtttgtttctcctctctctctctctctcatttctctctcgttttcttctctcttcaagtggaggcggcggcaggcgggtgaaaggcggcaggcggcggtgcaagaggggaggcggcgggcgacgggtggcggcggcaggtggagatggtgcagcggcggcagcaacgggaggcagcatcggcggcgatggccgcgccctcccctccgccagatttggtgggaggggaggcagcagcggcgagcggcgcctcccctccgctagatctagcaggaggggagacggtgggctcccgtggcccctgcggcgagctctccatgggcggggaggcagtaggctcccgcacccagcggcgagcttccccacgacagcgacagcgggatctccacaacagcagcggcaggctccccacggcggcggtgcttttgagtaatttttgtgattgttttgtgtgatttttgttggtgatgattgtgattgcggtaagtgggtgatgtgaatgtatgatttgtgatttttttattgattttttttttttggcttggaggcatcggctcgaattgagccgagccgagccttttttttttttggcgatccatacacctcaaaggtgccggttcttgaagtcggcacctttgagagaactcaaaggtgctgcctgcgaggtgccggttgccaaatccggcacctatatggggtttggaactggcaccaaatagcctttatgtagtagtgttattctctagcctgagcattccgcgtg

SEQ ID NO: 19076 - DNA, 1412 bp, Oryza sativa
  ref <308>: DATABASE ACCESSION NUMBER: AK069453
  ref <309>: DATABASE ENTRY DATE: 2001-12-06
ggtgcgcgggcggcgaggcgagggcgtcgcgattcctcctctttcaaatactcccacggcgaggaccgcggcgagggcgcgcgggccattgctgctgcttcttctgctgctgcgtgtgtgtgggtgagacctgagaggatgggagcggaggcggtgagggtgctggtggtggacgactcgccggtggacaggcgggtcgtggagctgcttctccgggcgcactgcggcggcggcggcggcgccgccgccggcgaggcggctccgttccacgtcaccgccgtggacagcggcaagaaggcgatggagctgctcggccggcggcggggggaccgggaccacctcaccccatcctctccggcggcggcggcggcggccaacgatcaagcgatcgacatcgtgctgaccgactactgcatgccggagatgacaggatacgatcttctcaaagccatcaaggcgttggggtcgccgaatccgatcccggtggtggtcatgtcgtcggagaatgagccccagaggatcagcagatgcttgacagccggtgccgaggatttcatccttaagcctctcaagatgaacgatgtccagcgcctccggaaatgctccggcgccaccaggccgaggtccgccgtcgccggagacgatgaccggtgctgcaacacggccaagaaggcggcggcggcggccgcagccacaccggagcagcagcagcagcagcagagatcgtcgcacctggcaggactagccatggtgatgaatgcatccagcttcgaggtgtcgcactacttccagctcatcttcaagctcatcctgctcgcctacgccgtgctgtgcctcagccagctcctgcacagatggtccaatggcagcagcctcctctccctgtggtgcgcatgaattcaagaaattaaatcaaatcgacgatccagaaggctggattgattaatttcccattatcgatgaaaaaaattgaaaaaaaaagagagatggatgaagactcagtggcatagcgtggatttatccgaaactgaaacctcttcatcaagcaagagtgcagctaaggtggactaattggatgcatgatgatctccatcccagctaagcatgggggttcttaattaattcagctataatataattttcaacagccatgcatgcagcagcagctaagatgtgatctttctaggggtagatttgttacttatttgttcttaaattctcaagaggattctaaccaggttattaattattttcagaggtttttaagtggtactatactactactgctacttagattattttgctgagagagaaaagagtagcagtacagtagcaccacaatttgctcatttgtataaaggggaacgcatgatttgagtgggcatctggtgtcgtttttaatcctgatctcg

SEQ ID NO: 19077 - DNA, 927 bp, Oryza sativa
  ref <308>: DATABASE ACCESSION NUMBER: AK069454
  ref <309>: DATABASE ENTRY DATE: 2001-12-06
aatcgatcgtggcagggaagtccggagttggaagcgatcgatggcggctactacgacgggacgagttgttgcactcggcgcggtggccgtggtggtggcgctgacattcctcgccggcggcgcggacgccgactgctacgacttctgcttcaaggactgcatggccagggagaacaacatggtcgactactgcagctacgcctgcgacaagacgtgccagccggacaagcccacgctgtactcgtcgtcgtcgtcgtcccgcctcgccggcgacatggagtgccaactctcctgcgccttgggctcctgccaccgcctccttccggacggcaagggcgccgtggaggcctgcttcgggcagtgctacgacggctgcaagaccacggcggcggccagactgccgaggcctctccgcgccggccactacgtgctctctagtccccctgatgacgtagaccatgatccggaccaccgctacgtgttctctagcccccatgatgacgtagaccatgatccggaccaagtgttcgctagtccacctgacgacatagaccgccatgtattcgctgctcctcctgatgttctcgctgctcttcctggtgagccggaccacgcctgacaaaactgatcacacaacttcgctacctgctgcgaacgaataatctagcgctgcatgcagcagcagcatgcacacatgtgcacactaattatatgtcatatgcacttctatgtcgcaatatatgtatatgttctccatgtaaagatagcgtagtagcgtgtgagtgactgtatgcgtgcagaaggccggattggtccactactagactgcttgctatctatgtgtaagcgaaagttcagagatatcactgctcatttgttttcttctccttctctgcattgacaacaaattgtgttctgaacgagacc

SEQ ID NO: 19078 - DNA, 1726 bp, Oryza sativa
  ref <308>: DATABASE ACCESSION NUMBER: AK069455
  ref <309>: DATABASE ENTRY DATE: 2001-12-06
gagaggaacgccaccgaacccaaaccccatccaatcaaaaattcgtacgggagagctctcgatttgatcgccgcgaccgcgaggatgtacaagtcgcggctgcaggagctgtgccagcagcggcggtgggcgccgccggagtacacccaccggtgcgcgggccccgcccacgccccgctcttcggcgccaccgtctccgtcaacggcgtggagttccgcacgccggaagacgccgcgcggtcggccaaggaggcgcacaacatcgccgccaaggccgccttcgaccacctctcctccctcccgctgccgccgcctccccctccctccgaaaaccaatcttcttacaaaagtcagttgcaaatttatgctcagaagaagggcaaactgttgccttcgtaccaaacaattcgggaaggtccaggtcatgcatctcggttcaagtcagtagtgactgtagatggcaaagcatttgaaagtccggaatactttcacacagttaaggaggctgaatccgctgcagcaaaacttgctcttatgtccttacctcaagaagcaagctcatcggagcgagtgccggtccagccattgtcatacaagaatcttctacaagaattagctcagaaacatggcttttccttgcctgtctacagcacaacttcagatggatcagtgcaggtacctatgttcaaatcaactgtggtatttcaggatggaagttttcagggagaaccagcaaatactaagaagcaagcagagatgaatgctgctagggttgcttttcaacattttgaagacagaagaaaaaatgctctttcttccactgttctaagaggaccgcatttgggacaaggaacagtgcacatatctgctggacaagtcaagattgcagaacctgttttttcagttcccctagcatcaacagctacaagccacagtgcaactggtgctacagatcgtgattatcactcccttggctccactaatccccttccaattgctaagtctacaaactgcgctgatgtacatatccaaccttgtgagttcaaagatgagaaaccggcctttccagagccaaagaccgtgcttgaagtaatggactcgtctccggagctcacaccgttggaagatgcctactcagcccctgtagcctcaaccagtactgtcagttctagtggatgcggctctgaccccttagcctcagccagtactgtcaattctactggatgcggctctgtccccttagcctcagccagtactgtcagttctactggatgcggctgctccttgttaactaaccgagtccaggtctatccacgccgtcctgacctggtattgccggagggcgcgaccgttcttcctttcagtgacgatgtttgggtggcagtcagcctacctactctcaaccattaaggcagaagaaaactacgccttaggaacgttgcggtagacaagaactggagccggtgcttttgtgaagttgtagcttctgccaagtttaatttacctcaggcgtagtgctagctggcaaacggaacatgtccatgctgcaggaaccatggttattagcttcgatgtttagacggatgaactcttgtatcgtatctacctaattagttgcccaactatcttagcagcaacgtgaattgaacttctattatagttcccaaccttaattaaccgtgttatatgttttttttatataaaaaaaacaacttaactttgttgg

SEQ ID NO: 19079 - DNA, 1319 bp, Oryza sativa
  ref <308>: DATABASE ACCESSION NUMBER: AK069456
  ref <309>: DATABASE ENTRY DATE: 2001-12-06
gatctccaggcactggtgcactcaccaaatcaacaagctagctaactaagcttaccacactcacatactcctatatattttggcacgcattgattacctgctagctccttgagcaatatcaatatggctcagccgacttggtcagcaaggcgcgtcactgccgccctggtcgtgatggtggtggtggtgctcgcggtcgccggcgggtcgtgggcgcagctgtcgccgagcttctactcgtactcgtgcccgggagtgttcaacgcggtgaagcgggggatgcagtcggccatcgccagggagaagcgcatcggcgcctccatcgtccgcctcttcttccacgactgcttcgtccaaggttgcgacgcatcgctgctgctggacgacacggcgagcttcaccggcgagaagacggcgaaccccaacaacggctccgtcagagggtttgaggtgatcgacgccatcaagtcggcggtggagaccatctgccccggcgtcgtctcctgcgccgacatcctcgccatcgctgccagggacagcgtcgccatcctgggtgggccgagctgggacgtgaaggttggtcggagagactcgcgcacggcgagcctcagcggcgcaaacaacaacatcccgccgccgacgtcgggactcgccaacctcacctccctcttcgccgcgcaggccctctcccagaaggacatggtcgccctctccggatctcacaccattgggcaagcacgatgcacaaacttcagagctcatatatacaacgaaaccaacatcgacagtggctttgcgatgaggaggcaatcaggttgccctcgtaactcaggatcaggtgacaataacctggcacctctggatcttcagacgccaaccgtgttcgagaacaactactacaagaacctcgtcgtcaagaaggggctcctgcattctgatcaggagctcttcaatggcggagccactgatgctcttgttcagtcttacataagtagccagagcacattctttgcggattttgtgacgggcatgatcaagatgggggacatcacaccgttgacgggatcaaacggggagatcaggaagaactgcagaaggattaattaagaaatgattaagaggcaagctgtgttcatgtccagtagtgcaaacgcacattgtgtcgtgtttcttgcggatatgtttgcaacatctcccttaatttctttcatgtgtttatgtatcattatgttcgtttgaaataatgaaagtactatgtgatttgttttaatgtaacatatgcttagtttatgtggtggtaaatgatcggttaggtttgg

SEQ ID NO: 19080 - DNA, 1508 bp, Oryza sativa
  ref <308>: DATABASE ACCESSION NUMBER: AK069457
  ref <309>: DATABASE ENTRY DATE: 2001-12-06
ggtctctccctccccctctctctctctcttccgccgcctccgccttgcgccgtctccgcctcccgctcacgccgccgcatccgccttccgctcgcgccgccgctgccgccgtcgtcgcatcggcgtccccgaacgcctcccccaaccctagccgcctccgccgctcacgccctctcctccctgtccctctcccaccgccaccgctccgcgccgccgtccccgcctccgcctcgcgccgccgccgtcgtcatctccgcctccgccgtgcgccgacgtctccgcctccatgtcgcgccgtcgccgtcgtcatctccgtctgcgcgtcgcgccgccgtcgtcgtcatctccacctccgccgtcacatccattgcgtccccgtcgccgcctccacctccgttgcgctccggttcggtcaccgccatcgccgcattgccggatctggcggggggtggtcaaatccgtgtcccccgaccatggaaggggcggcatcgggtggagcaggtcgacgctggccacgaaggtgcaaagcttggatggagcagttcgtgcagccgtcgccatcctcctcctcatccctcgaagccaagggttcggcaagcatcggcgttgcagagtgaggatgtcgagttggtcgccatcaacgactccttcatcaccgctgagtacatgacaagaacaagacgcagcaccgcggagcaagcagagcaagtgttagtagcaagaagcagtgacaattcggaggccatcgttgggagcaggagggaaagagagagagagagagagagagagagagagagagttgttgtggaggagagagaatccaggtgcagggaagggaagggtgggcaggccaagatggcaagaagaggaggaggaggaggaggaggttggtgggggtgggggggggatcaatggagatggagagcccgcggagcccggaggcggagatcgggcacagggtggaggacctgtgggaggtggcggagccgcagctgtcaccgtccgagaagctcaactcctgcttcgaggacatcaccgtcgcctccttccaccgcccgcttggctcgcaaggctggctggcatacatggtgatatatacgcctctcccagggaccatatatgtgcttctctgcataactgggctctgccaatagctgacccactattcaagacaagtttgcagttgcagaggatgcatatgctttggttttgcaatggcgatgcatgcacaaatgggcatgcaggtcagagattggagttggtctcttttcaagtgactttgatgagtctgatgacccagggcaggtcttacaacaaagatatgatctggtggtctactgaaggaaccattattcagtgttgcctacaaactgaaactgggcagcattaggaaaggaatcaaacatgagaaggcggctctattttttgacataatagttttcagtgaggtagatgtcgatgtcaaagagagcagcaagtgcctatggatctacctacatgtttactgg

SEQ ID NO: 19081 - DNA, 1188 bp, Oryza sativa
  ref <308>: DATABASE ACCESSION NUMBER: AK069458
  ref <309>: DATABASE ENTRY DATE: 2001-12-06
tgcgcactcctcccatctatcaagtgcgggcacgactggcgatagatagatccatggggtgggcggtcgcgctgcacggcggcgccggggacatcccgcgctcgctgccgcccgaccgcagggagccccgcctcgccacgctccgccgctgcctcgacctcgccaccgccgcgctccgttccggccgcgctgccctcgacgtcgtcgagctcgtcgtgagggagctggagaactgcccgcactacaacgccggcgtgggctccgtgctcaccgccgacggcaccgtcgagatggaggccgccgtcatggacggcaacaccttgcgctgcggcgccgtctccggactctccaccgtcgtcaacgccgtctccctcgccaggctcgtcatggagaagacgccgcacatctacctcgccttcgatggcgccgaggccttcgccagggagcagggagtggagactaaagacccaagccactttattacggaggcaaacaaagagaggctcagacaagcaaaagaagccaacagggtgcaggtggattacacccaaccaattcccaaggacgacaacagccgggtcggcacggtgggctgcgtggccatcgactccgccggcaacctcgcgacggcgacgtccaccggcgggctggtgaacaagatggccggcaggatcggcgacacgccggtgatcggcgccgggacgtacgccaacgcgctgtgcgccgtgtcggcaacgggcgtgggcgaggccatcatccggcacacggtggcgcgcgacgtcgcggccctgctggagcacgccccgccggccggcctctccctgggggacgccgccgcgcgcgtcgtggccggcgtgccgccgggcaaggtcgggctggtggccgtgtcggccgccggcgaggtggccatggcgtacaacaccaccggcatgttcagggcgtgcgccacggagggcggccgccacgaggtggccatctggcctgacgacgctgatggtgctaattgatcttcgttcagcaatcttcattggacgatttgaagcaaagaagctatatttccattgtgtgctgctagtagtaatttgtatgatgtttcggtttgatttggttttaggacattatatacaatggcttttggcttggtgtgtcagacaatcagctcaatttatatccaaattcaattaagtt

SEQ ID NO: 19082 - DNA, 1714 bp, Oryza sativa
  ref <308>: DATABASE ACCESSION NUMBER: AK069459
  ref <309>: DATABASE ENTRY DATE: 2001-12-06
gacaaggttgagatatctctttccaccgcagcagccatggctgagggcgagacgcccccctcctcctccgccgccgccgcggcccccgtcctcgccgcgctcgcctcgctccagacctactcctccgcgctctccgcattcacctccgcatggcgggctctctactccgacgccaccgcgctcgactcaaccctcgcgtcccgcctcgagggcttctccgagctcgacctgctgtgctccgccatggacgggccaggcctccgcgcgtacctcaccgagcacagggacgcgctgcaggactcgtccctgccggccctcgacgccgccctcctggtggcccccgacccggggcgcctggtgctctccgcggcggcgggcttctgccgcgcgccgcctacggaaggtgcggccaaggtggcgtgccgcctgctcgtcgacctgctcgaccggctgcgcgcgctcggcgtgaagccctcgccggaggcgcgcgacgaggccagggctatcgcggccgactggaagcggagcaagcggatcgggccgcaggccgtgcttaagaaggagacgatcgccttcctgctcctcgtgggggcgtttgggttggtggatgatgtcggcgacgcgagcgaggtgctcgatctggtcgtgtcggtgtctggccgggagcgcgccgttgaggctttcgtcggccttgggctcgatcttgagaagcacatgccagttttcattcatacaatgataaagaaaggcaaacagctggaggcggttaaattcattcaagctcttaatttggtggaaaaatatcctttattgcctgttctgaggtcgtacatcagtgatgctgcaaaagctgggaacatgatccgcatcagaggagatgattctgcttgtcagactgaagccgatgcaaaagagcgcatgctgctcggagtattgcagaagttcatcaaagaccagaagctagaagaactacctattttggaaatagttaaacagcggctggcacatttggagaagaaaagtgtggagagaaagcgagcagctagtgctgctattgaagcagctcatgaagtaagtaagaagattcagaagcaagagaagcaacagcagcaggtgcagtcagctatgcgatcacgggttccaggtaaagcagcacaaaattccttaagccaaaacatccattcggttgattccctcagtcgaccgctcatgtcgagccagagcatgggtatctcaggagtattaaatttgtaccaagctgcttcaagccagaatataattccggctattagtccgagcccactgagccaacatcccgttggcatcaagaatcagaccctgaatacaccgcctgttcagactcggtatggtggcttggctgactactatggactgtcctccggcagacctaggcccgactctgtatctcctggatcaagtgttacgagtgcacacacatcttccagatcaaagctctattctgcagatcccctggctgctgtctcccgagcatcagataagaagggttcgtcttacaactattcgttgtcaagtatgtcgacatataatcctaatccataaataacctcgatatggttcttatgccccctccctctgggggactaacatgtaaattttagtttgaggccaagcagaggctgctgatcctgtgtaaattccaaatattcatatagattaatataaatgcttggct

SEQ ID NO: 19083 - DNA, 1496 bp, Oryza sativa
  ref <308>: DATABASE ACCESSION NUMBER: AK069460
  ref <309>: DATABASE ENTRY DATE: 2001-12-06
gggcggccacccatggacatcgacctcgaccgggcgcgcgccctgcgcgtcctcggccgaggcgccatgggcaccgtcttcctcgtcgaggcccggtacggcggcttccgctacgccctcaaggtgttcgacaagcggtccgctgcggcgaccaggcacgacgccgagcgccgcgcgcggtgggagctgtccgtgctctcccgcctcgcgcacccgcacctcccgtgcctcctcggctccgccgagacgcccggcctcctcgcgtgggccgtcccctactgccccggcggcgacctcaacgagctccgctacgcgctccccgaccgcgtcttctccccggcggcgatacgcttctacgtcgccgagatcgtgtccgcgctgtgcgagctccacgcgtcgggcgtggcgtaccgcgacctcaagcccgagaacgtgctcctccgcgccgacggccatgtcaccctcaccgacttcgacctctcccgcctcctccctcccaagacggcggcgccgtcgtccgcgtcgccgccgccgcgcatgttccagggcggcggccaccgcccgcgcgtctcggcgaggagcgagatccctctcttcagccatgccaccaagcccgacccctcgccgccggcggcgaacccgtcggcgaagcagcagctccagagcctggtccggttcatcatgaagggcgacaggagcgagctgtccaagaaggccaagtcggcgcgggtgtcgccggtgagccggaagccagcgagcttcgcgtcgtcgtgggggaagtcgttctcgttcgtgggcacggaggagtacgtggcgccggagatggtgaggggcgagggccacgggctcgccgtcgactggtgggccgtcggcgtgctcgcctacgagatggcgtacgggcggacgccgttcaagggcaagaaccggaaggagacgttccggaacgtgctcctcaaggacgtggagttcgccggcgacagccgccgccggctgccggagctcaccgacctcatctcgcggctgctggagagggaccccaggaagaggctggggtaccaaggcggcgccgacgaggtccgagctcacccgttcttcgccggcgtggcgtgggacatgctcgacgtggtgtcccggccgccctacatcccgccgccggctgacgacggcgacgaggtagtcggcgacggagaagacttcagcataagagaatacttcgataagcttcaccagccgccgccgccggagtcggagagctcctcgtcggagttctcgtcggagttctaatctatctaacgtggctgctgcctctgtactcctcctaccttttctttgggtcatttttcggtttggtcctcgttaggttactattttgtaacgaaggggctgagggtgcgtgtatatacgtggagaggggcggcaatgtaaattcggtgtagaggctgtggagatgtgcaaaacaacatttttggagggctgtcgcacgtgcacgtttctgt

SEQ ID NO: 19084 - DNA, 3632 bp, Oryza sativa
  ref <308>: DATABASE ACCESSION NUMBER: AK069461
  ref <309>: DATABASE ENTRY DATE: 2001-12-06
gagcttctccactctctctctctatctttcgcgcgcgtggctgcgttgacggcccatgcatcgccgcgccgtcgcactgccgctgcgcctcgcgccgccgcatcatggccggcgcgccatggccggtgacctcgcgctgtggcgcgcccacttttctgttctcctcccaccgtctctaatcctccacctgtgaagtgaaggagagagagagagcggcgatgcgccgccacgggccacctcgccggcgcgcgcgtgcacctgcgggtgcgcacacggccatcgagaggctccttggcggtgccctgtgccctccccctttcacccctttgccggcgtcaacgttcggccggcgacaaggtaaggttcaagggttaaggtttcgatcttttgatccgagcggatcattgctttttctttcctttttctttgtggatttctctccccaaaccgatctatgcgctagggtagctctgataccattgttagtattctctctaggatcacctaggtttagatctagtcaggttggttctatttggttgaatgattgaacaacaatagagattaagggaaaagggtttagggatgtgaccggttgacacgttggatgaggaggaagtgccggccatcgtcgttgccgtcgctcagccttgacgaggacggcggcgacagtgtgctcgacgacgacggtggtcgtagcagtgggagtcgtaggtggcgatgagggcgtggcgcggcggtggcgttttcccgtcactggttgcgccccctctcgatcggatcagggtttgtgggtggagttggcggcggtagcgaacctgatgtcgtgcgccgccccggcctccacccctctttatatggcgcagggtgataggggcccaccagccattgggctgggcgcccctgatcagggcgcgggtcaagtcccccttgagcccaacggctcaacgggagggagatcaatctaacaagtactactgttactattcggtcttcaaaattatattatacacacacacctacaaatataataatgggacatcaagtctatatgcaatttcatatgttgcctcttgccactcggaatttatagtaagccaccattcaagccttttttatatgtagctttaagaaaatatataaaatgctgtcaatgatgtcaattttataaattttatatgctcggtactgaaaaacataacggcatctggcattcaccatggtactcatgaaacatgcccatgaattcatgagaaattcagcacaaatagacagtggcgcaactacaacgacacattatataaatataaatgaagacatgtaggcacttaattagagtcgcgcaatgcgacttggtggctactagtaatatagaggcaattagcggtatttataaatgctaaaggcagaattgatttgacatatcatctagcttctatttcaataaatagaccaaactgtatcaatcaatccgtacacgatttaacatgtgcactcccggggtgcccaagaataaaaaaaatacttttttttccatatttccagaaccaactgtggtgataatagtttgagccctttgtcctttatttatagtgtacgtcgtgcatcaactcatttgaaacgaaaaggaaaacgaaaccagtagtgccatggtgctcactgagagcaatgtgcatctcatgccacaagctcgctagccagatgctctcacattcgccattttcaagaccatggccacaatgattcattcatgattaattatggttattaatgaaagatcacgatgacggttgtggttgttcataatttcaactaaaacttaactaatggtgagttgtgagcacatggttatgttgatcgtgctcataacaattaaagatcgattcgtgagctactgttatgaagtattaatcgtactaaccataagccaacatggttaatagttggatctgtagtatgacatgtcccaacggaaggtgtcacggtgtgtgtttgagcttgacagataataagtcaacaagcggtagataatatgttcacagttgtttaggtgctaagtagtctccctgtctaggtatctggctatccctaccggagacagataattagtgggtatatattttgtttgacgtgttatgcaaagagtcttgtcacaatttcttcctttgtagtactatgggggtatttcaggacatgaaaagatgtgtggaatcatgtattgtgggtaaatttgtacacctctggtcagagttaaaaaaaacgatcaaatagccatggcagtggttatgggagagcctaacaatatttttcgtgattgctctcacaataactcattaatgagaaataaattggtaatagtaatttattagctctttgagtggggttagatctgtgcaaccgggcttggttgttcaaaatggttggaactgtgcaacattgttgtgatgtgcaatgtgatataatattgtttaattactcaactattttagtattgtcaaatatttgctaaatactgcttttgcgaatgaacccccatatgatgtccttttgtcatactattacacttgcataattgttatgtggcttgtggaagtattgcatgtacatttcttgcaataattatcaacctcagttgaagaatgattatgaacgagaagacgcttggcttataatctagttgagttgcccatgggagttgagctgaatccaccgctagattgtatttctgtcgctgttttcttttttgtgaggactaagttcctcttatataagaatttaatgtttttattatcttggatctatattgaattatcgatttgtgtatacctcagttgatggttggacgatgattaattgtatgtgcaaattagtgatgaaattgctattgaatttccggaggtgacataatgagcctaactaaatgatgcgcaaacagtaaattactataaaccaaccaaagaaggcacaagtagctatgaactttcattgtttccaaataggaagtatatatacatgattgaaccttcagaacacatacagtggaaggaggagaagcttggctatgctgctatatgcacatttatatttttcatagttggttttcaccaggaataatgcggatctttgggttcttactatcactgcaagtaggacatgtttagttgacgatgttcccttacttttgctaagagccaggcggtgcctggcatgatgctgcggcaaggaggtctaatggaagaagaattagctgacacactgctctcacttgatttaagttccgcaaacaccaatttgtgagttctcaaactcacaattttgtaattttttgacttgcaggtcatgggacaatgtcacttggttcacagaacgactaaaagttagacacgattgcatattttttctaacaattcatactatgtatactttaattgtgtaattcaaaatcctttttatggacctttgatacatacatacatacactcacacatatgtatataatatgtaagcaaatgaattatccacatagctgtgtggctagttagctagcatatcttggaattatatttatactttttcatctgcttgtttattttttaactatgtaatataattcctatgtgcggagcaattgt

SEQ ID NO: 19085 - DNA, 2517 bp, Oryza sativa
  ref <308>: DATABASE ACCESSION NUMBER: AK069462
  ref <309>: DATABASE ENTRY DATE: 2001-12-06
gctcgtcccctcctcccttctctcctaccgagtccagtgtcgaatagctagaggcgccggccgccattgctggcccctgcacgcgccgccccccctgcgccacggccgtcgccgccggcgggaagtgtagctcgccgccgccactctgcgcgcacccccttcgccttgctccgcccgccgccgccgccgccgccgccgccgccgacctcgactccggccagtgcagcaatggcgctgggaatgggaacccgatacagcgcaccagcagctgcggcagcatcccatctggccgctccacttccaccatcaagcgcatgtcatccgccatcttcccgtccagcgtcgtggctggtattgagccacttgtctcgttcaaggatgtccccaactcggagaagcagaatctgttcgtcagcaagctgaatctgtgctgtgctgtctttgacttctcggatccgaacaagagctcggcggagaaggatatcaagaggcagacgttgttggatctcatagattacgtggattccagcagttcccgtttctccgaggcggtgattgctgctagctctaggatgtttgctgtcaacttgttccgggtgtttcctccaaattacaggtccagttcatctggcggcggcgagggtgaagaggaggagccaatgtttgagcctgcatggtgccatctgcagcttgtttatgagctgctactgaaatttattggatcctcgtccctcgatgcaaaggtagggaaaaagtactttgatcactccttcattgtgaaactgctgaatcttcttgattcagaggatccaagggaaagggattgtttgaaaactattctgcacaggatttatgggaagttcatggttcaccgtccttttatccggaaagcagtaagcaatatattctaccactttgtgtttgagactgaccggcataacggaattgctgagctgctggaggtatttggcagtgttattagtggctttgcgttgcctctgaaggaagaacacaaaatctttctttggagagttttggttcctttacacaaaccaaaatcagttggtgtgtatctccagcagttgacatattgtgtgacacagttcatagaaaaggatcccaagcttgctagctcagtaattattggtttgctaagatattggccaataacaaatagtcagaaggaggtgatgtttctgagtgagattgaagagatcttggagacaatcagcacggcggaattccagaaatgtatggtacctttgtttaggcggattgctcaatgcatcaagagctctcacttcaggtaacttgcccaaataaatataacctatcgatgtttattttctgtttttgccactatgcatttccctcacctaagaaaaataatatataggtggtaaaaataatatatcggagtactacatatgaaagtagttgtggccctgtttgattgatcaattgccacgctgatgaattactatactagtcgctaactctaccgcttcacctagacattttattatataggtggtaaaattttatgtaaacatcactcagttgaaatggatcatgatcgtaaagctcacatggtatatagggtttttttggttgcatcatttatgtaaggtatgaaagcattacctgttgacttgccaaatggatgagataatagatgtctgatggtccgaaataaatgtggacaacaatagtgggccattatgttatcaactaatcatgctttgggcatggggttgctctgtactgttaatatcacaaatgtgagatatttggaccagcattaagaattgaagacatttgtctgccatgacagactaatgctttttatccaagtaattgcctcaacgagatgggttttttcaggttgctgaacgggcgcttttcatatggaacaacgataacgttattagcttgattgcacaaaaccgccaaatgatcatgcctatcattgttccagcattggaacataatagccagaatcattggaaccaagctgtcctgaatctcacagataatgtaaagaagatgttttctgagatggatgacgtgctcttttcggcgtgcctggtcaagtacaaggaggacgaagaaaggcaagcttcactggaatcaaagaggaggttaacatgggagaagctagaatcagctgcttctttccagccagtgacgggccatacagccgtcctggtaggccgccaaccctcagcaaatttgattgccacccttattagcatgtgttcagtggaggtgaaaaattagcatgtgttcagtgaaggtgaaaatggggttcttcactttctggtgatgctcaccaactgaacgacttcagacttcactattttccccttatttcttttttatgtctgtattagtaagcagtgctgtaagttgtaactattttcgtatgtttatgctctgaaggcaaagcatgtatcgagtgcttaaactccttacctgtatctttgcctgtttatttatgagcaatttcctacgcct

SEQ ID NO: 19086 - DNA, 2825 bp, Oryza sativa
  ref <308>: DATABASE ACCESSION NUMBER: AK069463
  ref <309>: DATABASE ENTRY DATE: 2001-12-06
ggttaagcgctgcacaaaatttgctctgtttcctctgttctgcgaatttgcaggtttagccacagtacgcgtgagttgtgttcgtctggtttcctgctagcgatcgctggggaaattcctaacaattggtatcagagcacggtttaggaagtggactcgtgaccgcgcattggaaggcgtcttcatgccgcgtcgtcgctcgtcgtcaccgatcgtgcgcactcctcatgactccggcggccgcgccacgggcagcggcgggggtgaccgcgggctggtgatccaccgcgtggtgaaagaaggaggcggctcggtgaactacccgctgctgaccaagaccaactacaacgactgggcgctactgatgaagatcaagctgcaggctcgctgcctgtgggcggcgatcgagcccgacggcgtggacgtccctctacatgaggaccggatggctcttgacgctatctgcagtgccgtgccgccggagatgattggcaccctggcgaccaaagcgtcggcccgggaagcctgggaatgcatcaagacaatgcgagtcggcaacgaccggattcgcaaggcgagtgcacagaaagtgcgctctgagtatgaatcgcttgcgttccgcggtgacgagaccgtggaagatttcgctctacggctcacaaccatcgtcaaccaacttgcaaccctcggtgatcctgaacctgctgataaagtcgtcgaaaagtaccttcgggtagctcgtcccaggttcaatcaactcatcttgtctattgaaactcttctcgatatctctactctgtccatggaggaagttactggcagactgaaagccgctgaggattctgggcaatcctcgttgcacaccgccgatgggaagctgtacctaactgaggaggagtgggctgaacgtcagaagaagaaggatcaagaggcaaagcggggtgactcgggcagctctggcggccgcggcaagcgccgtggcgggagagggcgcactggtggcggcgggactgcgagccccgagagcacgaactctggttcggcgcgcaagggagacaaatgccgaaattgcggcaaacttgggcactgggcgaaggactgcaggagcaagtccaagcgcgaagaacaggctcacgtcgcccaggaggatgaagaagagcacaccttgatgttgctcaccggcggctgcgttgacacggtcgacgaggcggcgccggagggcgacacgcccacaccgccccaccaagccgtggtggaactcgtggagatgaaagtatttgcagcgctcgacgacgcggctgaccatgatcccgggcgctggattatggattccggagcgtcaaaccatatgacgggcagcaggatggcgttcgccgacctcgacacgaacatcaccgggaacgtgcgactcggcgatggatccgtggtccggatcgcaggacggggcacaattctctttgcctgcaagaatggtgagcaccgcactctgtcgaacacctattatcttccccgtcttactgccaatattatcagcattgggcaattggatgagaccggcttcaaagtgctggcggaggatggcgtcatgcgggtctgggatgagcagcggcgtctgcttgcccggatccctcgcaccccagggcgactgtacatgcttgacatcaacctggcgcgcccggtctgtttggcggcacacgccgacgaagacgcgtggcgctggcatgctcgcctcgggcacataaacttcagggcgctctgcaagatgggcaaggaggagctggtacgtggtctaccatgtttgtcgcaggttgatcaggtttgtgaggcctgtctcgccgggaaacaccggaggtcgccgttcccgcggcaggcactttgccggtctgacgagccgctggcgctgctacatggagatctctgtggaccgatcacgccggcgacacccagtggcaaccgctatttccttctactcgtcgacgactacagccggtacatgtgggtcgccctcctctccaccaaagatgcggcgccggctgccatcaagcgtattcaggcggcggcagaaaggaagagtggacgcaagctccgcgcgttgcggacggatcgcgggggagaattcacgtctacacagttcgccgagtactgcgccgagctgggaatgcggcgcgagctcacggcgccctactctccgcaacagaacggcgttgtcgagcggcgaaaccaatccgtggtgggcacggcgcggagtatgctcaaggcgaaggggctgccaggtatgttttggggagaggcgataaataccgccgtgtatctgctcaacaggtcgtcgtccaagggtatcggcggcaagaccccgtacgcgctgtggaacggcgttccgccggccgtgcaccatctgcgcacgtttgggtgtgtggcacacgtgaagacgaccaccccgaacctgaagaaactggatgacaggagtcgtccaatgatctttgtcggctacaagccggggtccaaggcgtatcgcgcctatgatccggctactcggcgtgttcacatctcccgtgacatcgtcttcgacgaagtggcccagtgggactgggatgctgaggcggccgctgatctcgacaccgacttcgtcgttgagtacaccacggtgtaccatcctggctcgctgtcaggaacacgccaagacgctggggagccgcctgctcgatcttcatcatcgccgcgaacgccatcagactcaccgacagccggccgaacaccttcggtgcatggcgatgcgctggcggttgaatttgtgtcgccaccaactggagcagctgctaatcttg

SEQ ID NO: 19087 - DNA, 3048 bp, Oryza sativa
  ref <308>: DATABASE ACCESSION NUMBER: AK069464
  ref <309>: DATABASE ENTRY DATE: 2001-12-06
gtggagccgagcatccatccaaattcccaaaagaggaaactacgctgcgccaccgactctctcgccgccgcaccctcctccctccctccctcgctcgcctccgccgccgcctccgctgcctctccggtgggggccatggcgagcgcggcgccgctgccccccacgccgccgccatcgcagcagcagcagccgcagccgcagggcaaggagcagcagcagcagatggcggtggcgatgaacgcgcgccgcctggtgatgatcggggaccgcctcaggacccacttccgcggcggcggcgggaccgtcctcgagccgcccgacctcgcgcacctcgtctacgccttcgccagagggatcgatttcgctctttctagcggcgatgttcctaccgtggccagtgaaatacccagcattttgaagaaggtgtatctggtaggaaaagatcaatttctgcaatcttctgttatggtgctaatgatatcatgcaagaatgcttgttctgaaaaatggtttcaacccacagattgtactgaaattctcaggatggctaatgagctctctggcaaattctgcacgcctgtcagccagccagataatgacagcactgtgatccaaattatttcaacaataatgccaaggtactatcctcaattgaagtttgaacgtctagtcacttcgctggaagcaaaggttggatatgatgttttaatggccgattttttcatccataagaatgtgcctcgagaggaaaagattaatctaattgttgtgcaaaaggaagacttaaatgcctcatcatgtattgcaaacccgccacatgtgagctttttagtcaatggaaaaggcgtggacaagaggacaaatgtttcaatggaaacaggaccccagttccccactgatattactaggatgctcaaatacggggcaaacatcatccaagctataggatattttaatgctaactatatcatagctgttgcatttctgaataaattggagtcctttgacgctccaaacctaaatgattatgcacaaccagtcgctgctgatcctcctgattctgatttactcgaagggccatctagagtttccctgaagtgccccataagttttaggcgcataaaaactcccatcaaagggcgcctatgcaaacactatcagtgttttgattatgataattacatggagttgaacttgaggaagccgacttggcgctgtccattttgtaatacaccttcaaacttcactgacctacggattgatcaaaagatggtcaagatattacaagagactggagaagatactattgatgtccttgtgtttgctgatggatcttggaaagccatttcaactaatgatgagagatctgatagacattccagtgacgtcattcagcagagtagagatactatggacactgatgcgactgctgatgatgtcatagatctgataaatgaagacaatgatggtgatgtgccaatgagttttacctctgcatcagaagatgtgaagcctttcttgaattgtcaggatctatctgtggcagactatctttcggatttgcctatgaacacagtttcgcaggcagaagatctatatgcaggcggtgcaagccgtggaaacaatgaacgtggaaatgccacttcaacttctggccaaaattcatcactgccttctactggcggtctgggctctagttcattcgggactttggagtctattctgcctcataacattctgcaccctgttatcacagatgcagtctctccttctcttgatacctctaattctgtagttctgagacagcatgtagcacaaggaacacgttctgatattgtgccgtcgcaaccacgaatagatccacagcttagattagaaattgcaagacctcctataccaaggaatgtcgcgagagaacctacaggaattcaggctctgccagtgcaaccacagagagtgcgaccaaatatctacaattgtccacctcctttcccacaatccagtccagcttcagcatatcaagtacatcaggtgacaaacgcagatagtgtcattactgctatgagcactggtattggatcactatcaagggctccagatgctgctacgttattgcaacaccagtcaacacagcaggagattcgagccacgcaaaactatcatcaaggccagttcattgggcttactgctcctcaaaatttcatgggtacaagaccgccgccaggagtcccaggacaggctataggtgctaatgcccatggagctccccccgcacaacagtcccatcacgttcatcggctagtgagcaatctaatgaatcaacttggacaagctacagtggctcaaccttccacagctccacaggtcttgccatctcaaccaggcggcacaagtgcagtcaacccgcagatccgcggtcatcttttccctgcgcaacaacgcagccaagcaatgagaccacaagcagtgccccgacctacaatttctcaggcaccacctcgtgcacagtctcccttcttgccagctactgctcggcctccgagcacacctccccctatcggaacttccgatgatcttcaggagcttcctgtggatgaaagctggcgtcccacagggcagatgagagggagcctgactggtgaagcttacagcgtagcgattggacgctacaaccccagtgtgaacattgctggtcagcagacaagtcatgtgacaagtcaggctcggccagctggtccggatgcgcgcaggtaatggtaagtcagataactatgcattgctcatcaagaagattttgttggtggctctgaactctgaatctgctaagatagatgatctctctccctagctatgttagattgtcgttaatctgtttagctttaggaggttgcgagagcctagtgagggtgctaacgcgctaaactgacttgcaatgctggaacaccgttttgtagcagttcctgtgctgctcaacttacaagttagttatacaacccgcgctgcatatgtacaaagccttattatgttgtgtattgcggctatcttatt

SEQ ID NO: 19088 - DNA, 1078 bp, Oryza sativa
  ref <308>: DATABASE ACCESSION NUMBER: AK069465
  ref <309>: DATABASE ENTRY DATE: 2001-12-06
gtctcaaaaaccctagccctcgcgccgccgccgccgccgctcccccgcgcactcgccgctcgccgcccgcgagctcgcgccgcttcgcaaccatgaagttcaacatcgcgaacccgaccaccgggtgccagaagaagctcgagatcgatgacgaccagaagctgcgtgcattttttgacaagaggatctctcaggaggtcagtggcgatgctctgggcgaggaattcaagggctatgtcttcaagatcatggggggttgtgacaagcagggtttccctatgaagcagggagtgctcactgctggacgtgtccgccttcttcttcacaggggcacaccttgcttccgtgggtatggcaggcgtgatggtgagcgcaggaggaagtctgtccgtggttgcatcgtcagccaggacctatctgttattaacttggtgattgtcaagaagggtgagaatgacctgcctggccttactgacactgagaagcccaggatgaggggacccaagagggcctccaagatcaggaagctcttcaacctttccaaggatgatgatgtccgcaaatatgtcaacacctaccgcaggacattcactaccaagaatggcaagaaggtgagcaaggctcctaagatccagcgtcttgtgactcccctcaccctccagaggaagcgtgccagaatcgctgacaagaagaagaggatcgccaagaagaagtcggaggctgctgagtaccagaagcttcttgcccagaggctcaaggagcagagggaacgccggagcgagagcttggcaaagaggaggtccaagctttcttctgctgccaaggctgctgctaccaccgcctaagttggtttagagcttgagatgttttaaaatcgttcactcctgagttataatagcccaagaacctcttgcactatgttcgatcaatccaccccagctactttcagatttctcgagtaattggtgcaattttgcatgaacatgctgccttgtttggaattcttttttgagtaccggagaattaccatgttagtgtgttggtttatgttttgaaggtggccttgttattctgttgc

SEQ ID NO: 19089 - DNA, 1341 bp, Oryza sativa
  ref <308>: DATABASE ACCESSION NUMBER: AK069466
  ref <309>: DATABASE ENTRY DATE: 2001-12-06
gggcggacgcggagggcggcggcggcagcagcagcaaaccgccgctttggcagaagaggaatccgggatggccggcggcggcggcggcgggaatcgcctggacctccccgtggtggacctcgcgtcctccgacccccgagccgccgccgagtccatccgaaaggcgtgcgtggagtccggattcttctacgtggtcaaccatggggtggaggagggattgctgaagaggttgttcgcggagagctcgaagttcttcgagctgccgatggaggagaagatagcgctgcggaggaacagcaaccaccggggatacaccccgccctacgccgagaagctcgatccctcgtccaaattcgaaggagacctcaaggaaagtttctatattgggcctattggagatgaaggtttgcagaatgatgctaaccagtggccttctgaagagcgcttaccaagtcggagggagacaattaagatgtaccatgcaagtgcactgtctactggcaaaaggatactctctctaatcgctctgagtttgaatcttgacgctgaattctttgagaacattggtgccttcagctgcccatcagcatttcttcgattattgcactacccaggtgaagtagacgactctgatgatggcaattatggtgcatcagctcactctgattatggaatgataaccctcctagcaacagacggcactcctgggctacagatatgcagggaaaagaataggaatccccagctctgggaagatgttcatcacattgatggggccctgattgttaacattggcgatttgctagaaaggtggacgaattgtatttacaggtctacagtgcaccgtgttgttgcagttggtaaagagcgatattctgcggctttttttcttgacccaaaccctgatttagtggttcagtgtttggaaagctgttgcagcgagtcatgcccaccgaggttctcacctataaagagtggcgactatttgaaagagcgattgagcgctacatacaaatagtcctatgctttttcatgtgtaaaaggaggctaacatgtgctacacggccggccatcgttctccattgtccatttttcttctgcgtttagacatcacagtagtccagaaggttgtttgtgttgttttactgtaacgctgtaaagaaaaagtctgcagtgatgtgctatgcttgatttctctctccactgctcgacaccaacctgaactttttattgtttgtcgttcaaaaaaaaaactttttattgtcacctgcgagctgactggtgtttggactagtattcttgttgacttggtaaagaaactccagtttgatcctgggagcc

SEQ ID NO: 19090 - DNA, 2018 bp, Oryza sativa
  ref <308>: DATABASE ACCESSION NUMBER: AK069467
  ref <309>: DATABASE ENTRY DATE: 2001-12-06
ttgggaccaaggaaagccatggcaatggcattgccaggtttgtggtgaggcagataattggaattctctgcggcttcatgaacgaaccattatcgggctgtgttctctgtcaacaatttgatgttatggcaccgtacactcaagtcacaaatgggcagtggcgtaatcttgatcctttgggtcatgggagctgatcgaaatgcaggtgcgaggaacaatgatttctaccaggccctgaacatggcaaaagaggaggtctgtgtaggtgcagaagaggagttttgtgtaggggctgctgaggagggagtaagttgcactttgagaatcattctgcccataatacctgaacatcacagctctgcaggagcaattcttcaagcaggcttccttgcaatcatctctgttttttgcattggcaataatttggccttcatcaaagtaagaaacatccgtaagactcaagaattgatggtattgcatttcttgacaagatattggagtcactggtgcacaaccaagattagccttccgctcatcaactggatggaagtaacttgaactagaattagcctgaagaggacagatgcattggccacttgtgcatatcccgtaatccccacacactgttgggaaagcacaatcatcagggaatttctggattacatcagataccatggtccaatttgatcctgcatcaaaccactcatacaacctcaagtgtccatcagactctaaccttatgtattgggtggactttgcttctggcagtgcaataatggcttcaggctttcctgcctgggtggtacgtataaagatgctgaggctgccattcatgaaggtaaaccttgtcggatattttcctctcttgtttgttgtctgctcatagtagagttgaggcggtgtggattcaacgtaaccatataaaccatctgaaagaacagtcatatacaacttactctcagtccaatttgtgttggaggtatttgctctcagcctcatgccctgcagcaaagactgcccagggaccaatgcatcagttggatgatcaaatgactgccacactgtcacattcctctgatcaaacagcaccaggtttccttgctctgtgatctgcatgcctacaacagatcggcctgaagtgccgctcgaccagacgagtctgccatcggcttcacggaggaccaggatcccatctccagtcagctccagggtagcattctctcaacagggtgtgcccggttggccgaccagacaacctgcggaataccgtttcgtaccgaggtgatactggcaccaccgtcagtgtagacaatgaagatggcgaagaggaacgctttgcagggtggagcgcagaagaaccccgcggcgaaggaggggccaaatatggtttctggtgagcggaggatgatggagcgcacggctgacccgtcggtgaagtcgacgctgtgttggagcaccgcggcgttgttgacccaccgcgtcgagaggtttgccgtcggatagtcgtagagctgctgcacggagatggccggtgctgcagttgcaagcatcagcaccaccaccaccgccgcagcaacgatgtcgaaggacaagagatttgcaggacacatggttcttggatgggaaaagcgatgagaagcctgcaaggaactgtggccaatttcagaggttggcaagatgtcctgacctggtgatatgtcaatacatgttgaaagttcagggatatataccacacggtgctttgaatttggttttggaagcttgaattggtttctccaatcaccagttctaattctaaaggttcaagaattggctgtgccgcattacattgtcgagtggcttgaccagtgaggcagtgactaccaccatggactcagcgtaatttccgtgtgctatctcattgttttcttgtcaagaaaaagggcaagtgctgatgcatcaccgttaacaatttcatcatttaagcattgtcggagtagataatggtatggttttaagcaatttcgtaattgagcgcc

SEQ ID NO: 19091 - DNA, 1993 bp, Oryza sativa
  ref <308>: DATABASE ACCESSION NUMBER: AK069468
  ref <309>: DATABASE ENTRY DATE: 2001-12-06
gtagcccaacgtcattcccggcgccgaatccccccgaaacacacgatccttcccgcgccgccgctgaggcgccctaacgccgccgtctccggccgcgcgaccacctccgatcaccgcctctctctctctctctctccactgctcccccgcgcatcgcctccaccatcgggcctacctgcccgcgccggcgccgccgatcaatcgccgccgccgtcagtcctgctcctgcgggcgatacctagctgctccggggcggccatttcctccgattgcccgcgctgcctcgtaccctctccgccaccgaccagtcccttccttgagttcgttggctgccgtcgttagaaaattatttggccatgctattattattatttttgttcttagccactagtagtacttttcattcactaagtttcggtcattgcagtagctaaatctgaatagaagaaagaccaaattgagacaactggggaaacaagtgatcgaatcagatcatcgatccctctttttggcccaagctcccgagacggactattagtccctgttcttggattgaccaagtctgaatagagacaatgcaaaatgaagcaagcggtgtacagtggtcagagtgtacatttctcttgaaccaccattgagctccccatatcctttgatgtctccatatctgaagagtgtataggaatgtgagaaaaccggactgcagagatgaatagtaccatccttgatgtatttaagtcaagaaatattaatggagaattttctggaactgtcatacatttttattcattcagttatgagggtaaagatgatacatggtataagggtgaaatttttcctgtcatgagcttgaagacaccattagagaaggggaaaggaattagagtttctatatggacattcccagctgagaaagaaaaagaattgaaggaaatgattctggatctattgccgttggaaagtaccgcactgctgaagccaagttttgccgcgtacaattctcatattgaccgtgcaatactttgttgcacaccatgcacctcaaatatgacttcttggatcgccaagcaggttcaaataccttccgattcttatctccaggaggattcaaaaaacatgatacgctccatattaaatctgtcaaaggtgatgtgggacttgggctatgcttgtgatgggttagatgacccccaaagctttattatgatggattctaatgtcaaacttctcccttttgggatacgaaagagacaattctgatagtgaaatgatgcaccgcataaagttttcaaatcttttagaaaatcatctcagccaaagatggagtgatgttgaagtggatgaatttatcaagctcatgagaaatccttcagcaagtttggaacatttgctaaatcatccactcttgctgccccctgagattcgtatgtcctcataccttaacttgtggattgagaatttgacaccagaccaacataatctgtacaactcaatcacaagttataaggaaaaagtacccaataataaaactttcatgtatggggatacaactcgagaagctcatcgtttttcacgtaacacagcatcgcactacataagtcattggagacgacttatcccgagcagtaataggacaaaagctccattcgacatggtcgacaaagaactcaagaggtgctttccagggttgccgtgtaagatttatgctatgacattagacccactttggaacaaatgattggggtgtgaggagttttctaacatttgcaagtccaatttttacagtgggaagtgaagtttctcccccaacgatattcttgtggctgtcgattagccctgcgatattttgtactcaatccagaatgaaaatgtatgcactcaatccagaatgaaaatgcatgtagcatgttgtcgtgctcaattgagaatatgtaatgtaacgtctgttagcaacctggttccgtgaacttattataacttggacaaatggcgc

SEQ ID NO: 19092 - DNA, 4066 bp, Oryza sativa
  ref <308>: DATABASE ACCESSION NUMBER: AK069469
  ref <309>: DATABASE ENTRY DATE: 2001-12-06
aaagggaagaaccccactggtgcatcggacaataaggcattgtctgaagtagagcacttgttaatgaggaaaacattcacaagggttgagtttgaccgccttacagacttactgcgtgcaagaactgtggagtctgatttgtctgcaccggcagataaccttgataataagaatgaagcaaggaatacaatggatggtataggaggctccacatcacatgggatggctgcagatcattctattgctgctgatgatccggtttgtggtgctagttcacccgcagagctcgcaaagcaatatatgaattcccgttattcgaaagaaaaccgaccaaacagtttgcggagccaagtactcctgaagaacaaggcagaagcaagcaacattgcctatgatagaaggagacctggaggaccatttgtgcaagaactgagtcaatttagcaatgaaaactctgagcttcctgtgaatggctatgtaactccaggattacatgggcggtcagcaatatatagaatgtcctgttccccattctttaagggaccaagctcttccaatgatataaatatgtcaccattttcatcatctcagacacgggctaatagtttggtttctggctgcaggcaggtcttgaaacgaagaggtgccgaattggagaatgagcttggatctattggtcccatacgcaggattcgccaaaagtcaaatatgatgtctacttttagagatgctcgctcgagcccgcgaggaaactttcttcccagccgtacaattggttcagatttgaccgatggcggttcacccattcgggattcacctagttcgaaaagactattgctggggacgggtcaatctgtggaacctgcagaagcacgtaggaatgatgaagatggtaaaatttcaagtgataatgttcttgctgcgtcacctcaatcaaacaagatggctgaaaagatatttgagcagcttaatataatagtcccatcaccaaaagagaagctgtctcttccacaatttgctgctgggaatgcaagttgctccatgtcaaaacaacctgttaggcaaggcaatgagccaaacgggacgagtgaccctagtagttcccagaaatttctacctatggatagtgttaagcattcccttgatccagaactgaatggttcaccatcgagtaaagacaagctgagaaaagatggatcatcaaaacttctgtcacattcatttaaggatttaggcaacaaagacattaggtctgataatgttgctctatcttcagttgccgctactacatcaagcaaaccgggctttaaaatggctgtttttgaggatctaccagagtttgatgatgaccaggaggctcctatcccatcgaaaaattcaatgggcaagactgaggtgaagacaactgataaaaaattgatctgaagaaggagcagaaagttgaaccaattttattcaaacaaaaagttgagtcaaattcagtgcagaaggctgtcagttctccagttagtgaaaagcctatagcatccgcattgaaagatgcccgtccattaggcttattttcacctaatgaccctgaaaacagggctactcatgatgttccttcagacaacaacaatggtttcaaatttccacatgtaccttctggcacccttctggagagttctgtgtcacaattgccacttgcttcaaataaagacgataagctgatcagtgcatcatcttctatatttggtctcaagcagtccagtacaccagattcagaacaaacaaacactgctgatgtaaaaacagaagcaagacttggggagagtgtcaccaagcccacaacattggacatcactaatttggagggaggtaatgaaagagaaagaacagaagatgtccataaatcatcagataaggtattaccctcggctgctcctttccactttgcatctgctgcatcaactacagcaagcctgagcaatggtttctcactgccatcatcatcaaagttatcaaatgtaacaccaattgataagcctgaagttagcttggctccatccactgtatcgaccacatttgctccatccagtaccagcccacctgtttcatctccaatccctgcaattccgacattcaattttggttcaagcacttcaatggtggcagcaactaaatcagatagtacaaatacagtggcaaagccagctagcagtttattgttcggtactggggatgctatagctgaagccaaatctactgcccaggatacagccaacaaggcatcatcaaatctaacttcaaatgatggaattgcctcaactacttctgcctcaacagcaccttttacattttcgagctcaggaaacaacacttttgggttcaattccccagctcaacctgctggtttcagtacatctgttgatggcagtaccacccaaccatctgccaccagcacgatctttggtagcaaactgccacagtcagagggcacaatgtcgcagccatcgaagagttcacctgttcagtttagttcaccgtttcaaactgtgaccactaccacaggagcttcctcgtctgggtctggatctgtagctttcggagtaggaacagcctcaactggttctgggatcacatcttttggaaccggagcatcctcatcttggcctagcacagtgtctttcggattaggagcttcctcatctggaactggtgctctgttatttggagcgggggcttcctcatctggaactggggctctgcctttcggagcgggagcttcctcatctggaactggggctttatcttttggagcaggagcaggaacctcctcatctgggcctggaactgtgtcttttggagctggaacctcgtctgggcctggaactgtgtcttttggagtgacaacttcctcatccgggtctttgtttggtaattcaccatttggatcaggaactactttctctggccctggaagcggattcgcattttcatctcctagctcttctgctgggtcatctttaactatggccagcacaagtatgttcagcaccagttctacggcttcatcatcccctgctttcagtaacccattcggttcaagttcatcacctcccagcatgtttacatttggccaatcggcttcttcaggaggaggtttttcatttggagcacagtcatctccagctttctcctcacaagctccagttttttcatttacctcagcaagcatgaattcatctactccgcagcctgcttttgggatgacaaatgccaacacatccttcggcatgggatctcctggaaatgatcagatgaatgtcgaagacagcatggcagatgacactaaccaagcagcaccagcaccagcaccgatatttggttcctcaccatttgggcagcctgctagttcacccgctgctccagtatttggtgctccagcagtcccgtccgccggagttttccagttcgggggccaacaaggttccatgcagcagaatgcggcattcccgcctgccggtggtagcctagagtttcagggtgggaacttctctttgggaagtggtggcggaggcggcgacaaatctagcagaagggtgatcaaggtcaaaaggaacccaaagaaaagataagacgctctgttcaaatgtgcatttcatggtgccattttggatctgcctggcaacatgtcgtgatcatcagagcgggactacgaccatggttcgtatggtcatacaaattttccagcgtcagcacagttttcgcagcatcacccggctggcttgtaaaccccaaggtcagtagtgtattaccactcaattattcctttcattggcaaagccggattgcatgttgttgtatgcctgtgctattggagtgtaaaatagaacaaaaaagaagtgtatcccgaggtgtaattttgttctcttttccctgcgcatctgctgtcttatttgcctccgatatatttggctcggagtgtaatgtacactgttgtatttgttctttttgtttacatccgacatgcccagaactccctagtatagaatctccctagtttatcaatcttcgaatcccactg

SEQ ID NO: 19093 - DNA, 2347 bp, Oryza sativa
  ref <308>: DATABASE ACCESSION NUMBER: AK069470
  ref <309>: DATABASE ENTRY DATE: 2001-12-06
gccaatgtgcttgctgcacagcttattttttttcaagaatgaccaaaagaattacatgttaatatattataagaagagagcaaagtttagttacgcaacgcaaacggtcagaaaagccgttgtcaggggccaaggaaaaaaaaaagaaaccaaaaacaaatacagaaaagattagccactgagaaagaaaaactcgtttctggacatctgcagatgcattctttctttgaaggacaggtttttctggcaaaaaataaaaagaacttcagttggatgaactaattaagcagaagccctaatgtacaattcctggcttaacctgcccataattgaggtaaataatcgtcgccactacattgtctcggcctaatggaagttaaaaatgtcttgactgaatatgagaagctgtagctgcaaagttcagaaatcgaataccctgatgaatgctgcatgccatcctggctttccagtgctccctttctgagctgagcccctagctgctcatgtctttctggtgcctgccatctgccattgtcacactgcctcatgggccccacctgtcagtgacacatgggagtggcagtgtgtgcgtgtcatctgaagaacccattatatcctgtggccatgttagagtcttcagtttagccggtcccttccatcttctccttgcagatgatgatggatgctttgcttctgctgcatgctatcctgcctgcttgatccaacgtcgcctgcgaccatgtcggaagcttacgagacaccggctgccgctctaacctaattccactgcagatgagaggggccctgcaagctttgtgtacgtccatgtctgtgcctgatggcatcctgttcctgtccatgcctgtgcataccacagatgcaggctgagaagagaagaaactgctcacaagatacacagaaacttggggctaagtacaggacagaatgtgcacagcacacacacattgtgaaggaaattgaactaattgcatttaatagtattctgaagcacagttctcagttggaatgtatgcaacttcctttccaggctttcagcaattcactggagtagtggtttcttgatgacactttgacaattgacagagttaattcaggacagaaatgggctgtatatatatatatatatatatgtgtgtgtgtgtgtgtgtgtgtgtgactcagcaatgtgttcaggctcagtgaatggggatgatgcaaattctacataaagatcatgcaagcacaaaaaatgaagataatatcgtctacgctacggttttcctctacacaactttacactttcagaaagagacccatcagtcgcggtccgatatggcggtgaccgtgatggaggtgcgcgtcgtctcctgagacgacgagggagttgagcgcgccatgatggaggtcaacagtgaggaggaggatgtggccttgctcctgagcttgaggtccctgaaatccctgattacatcaggcttgctgatcttctctttgtcgacctccatctcgcctgtcagcatgctgatgaccattgacatggtgggtcgacgtttcgagatgtcctgggtgcacaaaagaccgactttcaagaatctgcaggcttcgtcgacatccacgtcatcgaccatagagctgtctatggccttctccaaacacccctgatcataacatttccatgtctgcaaagggaagaccatgtggtcatcaacatttgggtaacatacgtaccgttggatgacaaaacccaaagttatagcaagatttgtccctgaataacacatgggaatcatgacatttgtggtactgtgatgcatacaatggtagctaagcatggaagacttgccctagagtgagctaatttagaactcttaacatcatcattgaactcttaaaataaaaattaagttgcagtaacaagccaacagctgtacaacatttagcctcaaactgaaaagttcggtacatcatatcttgtccaagaagcgagatgcttgtatttcaaatagaaaaaagcataccttctcaagaaggatctggtcttcgtagggcaattttgtgtcagtgttgcatcttccactaactatttccacaagaagaacaccaaagctgtaaacatctgacttgcgtgtcacttgtcctcggatggcatattcaggagccaagtaacctctgaaagcaaaaccacaatataaagaaaggaagagaagggtatagcagggtgtacatatagttcttaagttatcacagactagtttatttttttactccatttcatttgcactctttattttgatacacagcaggtttcaagacatatggagagcaaaatccgatgaccatagtgagt

SEQ ID NO: 19094 - DNA, 1382 bp, Oryza sativa
  ref <308>: DATABASE ACCESSION NUMBER: AK069471
  ref <309>: DATABASE ENTRY DATE: 2001-12-06
ggtgtgtttcactcgaaggctcgctccactcgaagaccgaggcgtccaccaccaccaccaccactcgagttcccccacgatccccaacccttcctcctccgattcgccgccggtagctgccagcgtctgctccccggctcgccgcgcgccggccggcgagtgcaccgcgcgcgggcgcttggtcgacgctatctccggagtactccgcgtggatttgggtgaatagtggctcgtttcgacagggtgacttgtgctgtgctcgatcgcggtcgtcgcttgctgttgatcgaccggtccagatccgcgtcgtttacacggtgcgtggctgttcctcaatctacggatcggacctcggactcatggagaaccgcgtcggtgagtcgtcggcgaccgccgtcgatggcggcggcggcgccaaggactcgggcagcttcgagtgcaacatctgcctggagctagcccaggaccccgtcgtcaccctctgcggccacctcttctgctggccgtgcctctacgagtggctccacgtccacgcgcactcccgcgagtgccccgtctgcaaggccggcctcgaggaggagaagctcgtccccctctacggccgcggcaaggcctccaccgatccccgctccaggtcggtggccggcgtccagatccccagccggccggccgggcagcggccggcgacggcttcccagcctgatcatcaccacgaccatttgccgcaccacgacccgtggttcatgggcggcgccggcgcccctgtggccggcggtcgctgggggaactacactttctcggcggccattggggggcttttcccattgctgagcttccaggttcatgggttcccgcaggcggcggcgtatggacctgccgctgggtttccttacgggtatggacattcgttccatggctggcatggccatggtttcccgcaccaggcaccgcagggccagcatgttgatgtgttcttgaaggtattgcttgttctggttggtgttcttgtgattgccagcttgattgtgttttagatgtgtgcagttagctatggccaatcctcggtgatgagcctgtatgaaacggttttattgtgtcaatattaggtagtagctcccacgggttgatcagtgtggagagatagtacaaagatgatgcttcagtagttactagtaggattctgtgataatgagtggtagctgataatgttgtcgtgcttctcgatatattacttgtgcagttgcaagtcttgtttgtagtttttaagtgaagtttgaatccttgttatcttttcataatgcatttgcattccaaccttgtcctgtggctgtcgcaaggataatatcttgcattatttgtgtcatatatggattcttgattgt

SEQ ID NO: 19095 - DNA, 1714 bp, Oryza sativa
  ref <308>: DATABASE ACCESSION NUMBER: AK069472
  ref <309>: DATABASE ENTRY DATE: 2001-12-06
gtcacgcgacgacctcgccgtcgccgtcgccgccgccgccgccgccatggggaggcgatccggggggaggaagctgcccttcttcgcctcgaacgcctccacgtcgtcctccaccaagcggacccgctcggcgcgccgcctcccctcgctcaccaggccgcgcgcgtcgagctccccatccccggcgtcgccgtccccgccgccgccgtccgcgtcgcaccccgcccctccgtcccctcccctcgccgtatctcccgccggcgccggtaaggtcgggaagaagaaggccggggcgcgcctctggatgcggctcgaccggtggggcgtctccgaaaccctccatctcgacaagggctccatcatccgacgcgccggcctgccgccgcgggacctccggatcctcggccccgtcttctccgactcctccagcatcctcggtgagctcgaccacgcccccattagtatcgattgctgcttagggggtcgcttttgttgtgacaatacacaatgtttaattgtgcagctagagagaaggcgatggtgatcaacctagaattcatcagggcgatcgttacggccgatgagatccttctactggatcctctcacgatcgatgtgatcccttttgttgagcaattgacacatcatctccctctcaagaacctggtgtgtgggaatggtcaacctggtggtgatgaccatggggaaaagcatgatgactcgcatggagatcaggtgccccgccttaacgaggccaccggagcagagcacgagttgccatttgaattccaggtgctggagctcgcactcgagaccgtgtgctcatcattcgacgttaacgtgtctggtcttgaaaggcgcgccactccggtacttgaggaactgaccaagaatgtcagcacaaggaatctcgatcgtgtgcgaactctcaagagtgatcttacccgtttgcttgcccatgtgcagaaggtcagagatgaaatagaacatcttctggatgataatgaagacatggcacatctgtatctaacaaggaagcaattacaaaaccagcaagttgaggctttaatatcatcggctgcttccaatagcattgttcctggaggaacaagtctgtccaggttgaacaatagttttcggcgcagcgtgagcatcgctacaagcatgcatttggataatgacgtggaagacctagaaatgttgcttgaggcttacttcatgcaattggatggaattcgcaacagaattttgtcggttcgagagtatattgatgatacagaagactatgtcaatattcaacttgacaaccagcgtaatgaacttattcagcttcagcttacactgactattgcatccttcggcatagctgtcaacaccttcatagctggggcttttgcgatgaacatccagagcaaattgtacagcattgatgatggtagcttcttttggccatttgttgggggcacctcatcgggctgcttcatgatctgcatcgtcttattatggtatgcccggtggaagaagttgctcggtccttgaacacaatgtaacaagtcacgactcatgagaactgtctcgctgtaaagggcatgcattttgacttgtaacgtctgcagaaaggagcagtcatttgaaacataaaagagaatcctaggattagggagaaactctaatgcatttatgtttcactggtaaataagatacattttctgtt

SEQ ID NO: 19096 - DNA, 3136 bp, Oryza sativa
  ref <308>: DATABASE ACCESSION NUMBER: AK069473
  ref <309>: DATABASE ENTRY DATE: 2001-12-06
ggttcttggggtggggttggcggattggggaatcggcttcgagctgattggttttgactgcgccatccgatttcttcgcttttgtggaggggggcagcacggctgtgcatttcgttctcttgtcgtggatgcccccggaatttatccccaattctcgctatacttgctcgtctacatcggtgtgtttcttggagcatttcaagcacttctcgtcttcatcgatgcatttcttggagcatttcaagtgtccagcgtctaaatcgctcaggcgaatttggaggagcctttaggcgcattccgctcaaaatcaagtggaattgttgcatgaatcttcagattgttttggctggattgccaggtttcttcgatcatttttctctacggggctgaggaatttttcgccccatgcccggaaagctccaaaggggatgtttgccacaattttcagagtatctgtgttgagatgatcggtgtggtgtagaaggaagcacgcaaatgatgaggcattgtaggagagaatggctcctcgccctgtgcctcatctctgtgcagctcctcattccaacaggctgcgagggggttctcgtcgcggcaagcaacatgtcgccacctgctttgacaccactcctcatcaatcaagtataccaattggtagaacatgcatgggtcaagtgtggattggacaagagaactcttgaagatgttagacgccacttcaactacaaccatgtattggcaattctccgtagaatgtctgggcaagacattaaggacacctctcctgacattgatggagggaccagtgtattatcactagaaaggagggacgctatactgaactgtttaagcaagcagaatttcatgagtatcgctggacaggatggtttaaaaatcttgtccgctgattatatcaaagcacttattgcctcacttagaacagaccttgctcaggaatcttcaactacaaagtcaatacctgaacaagcaggaaaacctgtcccagggaaaacttctacaccaaaacctgtaaacaaaccaaccgacagtgtatcatctccaccagatcgttcatataaatcagctcctacagaaaaggaaaaccctcctactaaatcagtagcggaaaagaaaaaggacagcagtggcatgccaaatgctttcattggtttgtccattgctggcatagctcttatggctcatctctgtttgtgctgcttcatgtgccatgggacttcctcatctgacttgagggatgataaaccacttctgactctaaatccgagcaacttgtccgctgcttctaaatcgtcccaaggaaatccaattgatgtcaataagcttggggtagtgtcgttgaaatcagaggctggtcaaaatggagatgtgaaactaatttcgaaggaaggcacaaacaatgtgaatgtggtgcacccagtgagttctgtgtcagaatcaacattgatgccacctccggaaggcgcaaacaacgtgaatatggtgcacccggaaggcgcaaacaacatgaatgtggtgcacccggaaggcgcaaacaacgtgaatatggtgcacccggaaggcgcaaacaacgtgaatgtgaatatggtgcacccagtgggttctctgtcagaatcaacaccgatgcagcctcctgtgatgccacctccaattccgaagcttctttctccaccagcaccccaagctcccatgccaccattaaaggcttctcctgttcctcccccagaaccttcaccacctcctgctccaaaagctgcacctccaccgccaccaccaaaatctactggccctggcccacctcgcccgccaccgccagccatgcctggttcttcgaaaacacgcccaccgccacctcttaagccaggcgctaaggtgggtgctgttgaaaattctaatgaagctaaaacaaagctcaaaccattcttttgggataaagtaactgccaatcctgcacgatcgatggtgtgggaccaccttaaatcaggatcattccagtttaatgagcagttgatggaaaacctttttggttataattcaactgacaagagcagtgacaccaagaaagatttatcatcgaaagatgccactcaactcataaggatacttgaccccaaaaaggcgcagaacctagctatatcattgagggcgcttggtgtttcacctcaggaagtatgtagtgcagttaaggaaggaagtgaacttccatctgatttgatacagaccttaataagatggtccccaagtaatgatgaggagctcaggcttcgattatacagtggggaactctttcaacttggtcctgcagagcaattcttaagagtaatcatagatattccttatattttccagcgcttagatgcattgcttttcatggccaatttaccagaagaagcttcaaatgtgaagcaatcctttgccactttggaggtggcttgccaggagcttagaaacagccgtctttttatgaagttactagaagctgtcctcaaaaccggaaatcggatgaatgttggcactttccgtggtggagctcaggcttttagactcgacacgctcctcaagttgtctgatgtcaaaggaactgacggaaagacaacactattgcattttgttgttcaggaaatcattcgttccgaaggtgtccgtgctgaacgggctgcaaaggagcagaacagtggcgtttccagtgtgaagactgatgatctaggtgacaaaagtgagcaaactgaagacggttacaaacaactggggctgaaagttatctccagcttaggagatgaacttcaagatgttagaaaggcagctatcctagacgcggatcaattgactatgtcggtagcaagtcttggccacaagctcatgaaaaccaatgaattcttgaacatggacatgaaaagtttggacgaagacagtgggtttcaccgcaagcttacgcacttcgtacagcagtctcagactgatattactttcttgctggaggaagagaagaaaatgcggttattggttaaagacaccgtcgactatttccatggaagtgcaggaaaggatgagggcctccggttatttgtgatagtaagagatttccttgcaatgctggacaaggtgtgcaaggaggtgaagg

SEQ ID NO: 19097 - DNA, 1825 bp, Oryza sativa
  ref <308>: DATABASE ACCESSION NUMBER: AK069474
  ref <309>: DATABASE ENTRY DATE: 2001-12-06
gacctcacctgcttcctctctgtttctctcttcttctccaactccacctcgtcacttccagaccaagggagaaattaaaaaaaatatatacagtgagagatttttctctctccggtctggagcacaaatgggcatcttcagtggagcgggagcacatcgccctagctgcccgtcggccgcgaattgcgcaaaatgggctcaaacctacctgaagtactgcctttgtagcacgagggatggcatggcactgacgcttggactgttaagcgtcatcagctggggagttgctgaggtgccacagatcataactaattacaagcataagtcaacagaaggcctttcccttgcttttctaatgacatggattgttggggacttttttaaccttattggctgcttcttggaacctgagacgctgccaacacaattttacatggctctgctatacaccatcacaactgttattctcactggacagacagtatactatagccacatatatcaccgtcttaaagcaaaaaaagccagggcaacaagcaagcctcagaggcatcagcgtgctgatgcttcattgagagaaaagcttttggggcccaaggttattggggaaatcagaaacaatagccacctaggtgcaaccgtccctattccaacaagttctccaattacagttaatacagaaatagtacggcaacgacatggcccaagcagcctcagtgaatactactacacgtcagcaagatctctctcaagcagcccagtgccaatgtcaggcacatggtcggctaattatcatcaaacaaattctccaccagaaatagatgaccaaaaggaatccttggtcagtgagttttccccagcacaatatgcagcatctcctttaataaagaattctctctcagtggtaccatggatgtcccttctcttgggtatgagtgttttgcattttttagttggaacaacccatcaagaggtgccaaatggtattgtcatacctgtcgggagaaggcttttactgttggcggatgaccatgcagattcatctgtcagcaatggcagtggaagtggaattggaagcttccttggttgggctatggcggtaatctatatgggtggacgacttccccagatctggttaaatatgaaaagagggaatgctgagggactcaatccactaatgtttacttttgcattagtgggaaatgtgacatacgttggaagtatacttgtgaaaagcatggattggtcaaaacttaagccgaatctaccgtggcttgtagatgctggaggatgtgttttgcttgatacttttattattcttcagtttctttatttccattatcggaagcgacacgttcctgatgagcctgacagtgctgataaagtttaatggatagcaactgagaatattattaccttcttcgacataacagacctgaagggaggtgtttcctacgttgagctccatgaatttgtgaaacggcatttttgcgtcggaggccgtcttatacagtccgcatgcagctgtagagcctaccacacgctgtttcatatgcgtcttgctctgtgtcgtggcaaagccatcttcagaacagagtgggtgtcatatggagaagctatagcttatcgcaattgtttggtggtatcaaagcgtgccaagtatcatatatggtttacccttttttttttgcatcattctctcctttcccctttctctgttgtggtgataagtagtattattatttgtcagttttgaagtgtgtaaagattatctcggtttaactgctcgccagttttgaaatagtataaatatcccagttttcgg

SEQ ID NO: 19098 - DNA, 2198 bp, Oryza sativa
  ref <308>: DATABASE ACCESSION NUMBER: AK069475
  ref <309>: DATABASE ENTRY DATE: 2001-12-06
gacacccacaccaaccccatccctaatcaccaccacccccccatcccaccatcgaaccgccaccaaaaaaagccgaagctcgctcgccgccgccgccgccgccggggacttcgccggagggaggagaagccaacccgcccgcccgcgcgcgcgtacgtacgaggcctgctccttccgtcggaagggaagcatcgggatggcgtcgatttcgccgacgtcttcatcggtcgccgccctccgcggccacccggtgcagttcgtgaaaggcggtgcagtctccaaggaagcaaagggatcaatttccttctcacccgttgcgaattcaaataatgccaatgtgaaatttacgggcttgagggtagcagcatcattgaaaagggatggtgcttttccaggcgacggttactcagggaatgataacacggtgttaccaaagagcacttctgttcgtggccaggactatccaactgctgactctgtactcccaacggaatccatcatcgtgccagaaatcagtaatgctggtttgaaatgtgttgcggacatgttctcagatgaggacaaagacactgaacaagatttggatagcccaactgagggcttctcgtctatttccgaggccatcaaagatattcaacaaggaaaacttgtgattgttgttgacgatgaatcaagagaaaatgagggagatcttataatggctgcttctttggttaccccagaggccatggcgtttgttgtaagatatggcacaggaatagtgtgtgttagcatgaaagaagaggatcttgaaagattgaaccttcctttgatggttgcaacaaaggaaaatgaggagaagctctgtactgcattcactgttacagtggatgctaaagagggaacaacaactggggtatctgcaaaggatagggcaaagacagttatgactcttgcatcccctgactctaagcctgaagacttcaatcggcctggtcatattttccctctgaaatacagagagggtggtgttctgaaacgagctggacatactgaagcatctgtagatcttgctatgttagctgggttacctcctgctgcggtcttatgtgagattgtggatgaggatgggtccatggctcgcctaccaaagctgcgcgtgtttgctgaaagggagaatttgaagattgtatccattgctgacttgattagatataggagaaaaagagacaggctagttgaacgttcatctgttgcacgcttacctttgagatggggtaatgtccgcgcttactgctacagatctgttattgatgggatagagcatattgcaatggtgaaaggggagattggagatggtcaaggcgttttagtgagggtgcactccgaatgcctcacaggggacatttttggatcagcaagatgtgattgtggtgatcagcttgccatggcaatggagatgattgagaaggctggaaggggtgtactagtttatcttcgtggacatgaagggaggggtattggtctcggtcacaagctccgtgcttataacctgcaagatgacgggcgcgacactgtggaggctaatgaagacctaggactgcctgtggattcacgggaatatggcattggtgcacagatattacgtgatctgggggtccgttcaatgaagttgatgactaataacccagcaaagtatggtggtctcaagggttatggattgagcattgtgggcagggttcccttggtaactccaatcacctcagagaatcggagatacctggaaacaaagagaacaaagatggggcatgtatatggattggccaatggccaagctagccatcagacgggcagcaatggtgccaaaggggagcattaggccaatcggactcaggttcacattctaatccacgacaatcttatgtgatggagtttgtcaaattatgctacaacatatgttcgtggtgaaccaatttttttttagctgacagtaggttgaaagatgggcgtaataaaagtatccctttatttgttgtaatccacagccacacaactgggttattactgtaaatatatacacacacataaactgctccctagcgggtacagactccagccttacctgaattgagaagactggcgataaaaatatcgactgagatccaaggcaatactagtatgaatctaactcccaatattgaaagaatttttgttctggg

SEQ ID NO: 19099 - DNA, 2240 bp, Oryza sativa
  ref <308>: DATABASE ACCESSION NUMBER: AK069476
  ref <309>: DATABASE ENTRY DATE: 2001-12-06
gggcgggggtgggggcggtggtggcagtgccgtcgccgtcacggtcgccgctgccggcttccgcggagggcggggcgccgaggaaatggaggtcgaggcgggaggtcgtggactggctgtcctccctcgtttccggatgtaattacggatcttcttcaatgtctaataggttcaatgaaaatccatatgatgacattgagttcactgatgttgctgcttcaaaggatgtttcacatacatcatcagtaaggaataactcaaaagagttcacatggttaggtcctgcatggctttgcgaaaagcgatggaagcactacagatctttctgccgtaaggggattactatttcggtgcataattttgtctacatcctgagtgaggaaaagaagaggctcatcgcccaagtggaggatctgtatgaagatactaattcaaccaacgttgtcatggtacgatggttcgacaaagttgatgaggttggtgtcgaattgccacctgatgttggtgacagagagattttcttttcccctggtctgcaagatctcagtgttgaatgcattgatggattggctgcagtcctgagtgctcaacacttcgagaagttccagagtagtccaaaacatagctattggcagccttatatttgtcgccgacagattgatgaagatggcgtcaaaccttttgatgtaacccaattgcaaggttattggagtcaagaagtgcttaggacaatgttcaatgcagcttcttctcttaaggtacgtttcaaggtcactaaaggtgcttctagttcagatggggcacaaaagaggaagcgtgatgcattcagtgaaaccgatccacagcagtgtgttccttccgctgcattcggttctgatagtctcaagaatgatttggaacataaaactcaaaagcagctatatcctggtagccgtgctgaagtcctatcacaggacagcggtataaggggctgctggtttagatgctttgtattaaagaggcgcggagacaaaatcaaggtgcgatatgaagatcttcaggatgctgatgagacaggaaatctggaggagtgggttttgctaacaaggattgctaaacctgatcagttgggtatacgcatccctgaaagaccaatggtgcggccatatcatgtacatagcaaggatccatgctctttcgatgctggttccattgttgatgcatggtggaatagtgggtggtgggaggggattgtattgcagcagggaaatgacagacgccttcaagtttattttcctggagaaaagcagattgctgatttttgtgaagatgatttgaggcattcacgtgagtgggctggtggcaaatggaattccttgggggaaagaaaagatatcacacacctgttgccccccacttcagttcatgaagagggaggtttgcttagcaaacctgtttcacaagaaggcaatccctcttcaaaattagaatctgacgagaggtgtgatgacaaatcattgggcaccaagatttcacatgatcagaagcatcagaagcgtgttctggctgatctcacaaatgctctgaaattcgataacctgaaatggaggccaagaaagcggagcagaagatctggttccaaaaggcagtcagacactagcagtggcagtggcagcagcagccagggcgacatggaggagtccagcccctgcggaagttttgcagtgcttaattcagcgcccgatgaagaagtatgcaagagcagtggagaacctcttttcatgagggtttccaacctggtgatgtccagatgaagtcactccacgactgacatgttttagccttttctttccggatttcaacagccttggcgagatgtgagtttgatgcatccccaggttatttagtcacaactcacaactggtatcctgatcatcttgagagctctgaatgcttattcgctcggatgtccaggatgcaagcatggaggagcacactgttgtatttatgactgatctagatgagttttaccattttgtctcactttagggtcttgtagggtgttttaaccgtcttgttgtttagttggtgttacaaagatagctggctcattccacctcggcagtttccagagtcccttttttgtctttgtttcagcagtccaatatccaatttaatttgttcatcagctgttatagatgttcttatagtatactctctgaaatgataatatttacatcgtcatacgagttttttgttct

SEQ ID NO: 19100 - DNA, 3232 bp, Oryza sativa
  ref <308>: DATABASE ACCESSION NUMBER: AK069477
  ref <309>: DATABASE ENTRY DATE: 2001-12-06
gttcgactccgactcctcgtgagttcgttcgccttcgccgccgccgacgccgccgatccccacccatcccgcgagcggagcggaggagggggggcgccgccgttcgtcctgctgcttccgccgcatcctgcgtcttcataacggaaattcaagacaggtggcaagacaaaatccaattggacataatggacaatatattagtggtatgcaagtccacattagctgacgatgaatcagctagtgaggtatcttcagggagtgacagtgacagtgattgcattcttggagatgattgcccatcagatgatgatgaagaggctgcacagatacacaagcgttttaaagaactgaaggagaagttaaagacaggaaaagtagataagttggatgatgttgtttttgaagctggtgctgaacaagatggtaatgacaccccatcttttgatagcgatgatgaagagtcggtagaagaggttgcaagcgatgaagaggtttctgctagaaaactcatcaagtatccaaggttcaaggagaagcctggtgttccaacatttgaattaggaatgacgtttagctgcaagaagcagttcaagaaagctattacagcatatggtttagctgagaggaaggcgatcaactttgtcaaagatgatcctaagagggtgagggcaagatgtgactggcctagctgcccttgggtttgcctactgtcaaaaaactcaaggactgacggttggcagatagcaacactagaaaattctcatctatgcccctctagaagagataacaagctggtgacttcttctaggattgctgaggagtatggcaagtttatagttgcaaatccctcatggaaattagcacacatgaaggcaaccgtacaagaagagatgtttgctgatgttaacatctccaagctgaagagagccaaatccattacgatgaagaaagctataaatgcagctaagtggcagtatcaaaagttgtataattatcagctggagctacttagaagtaaccctggaagcactgttgtggtggatagagaggtagatatggatccacctgttttcaaaaggatctacatatgcttagatgcatgtaagaaaggcttcctagctgggtgcagaaaagtgataggacttgatggctgcttcttcaagggagcaaaaaatggagagctcctttgtgccataggaaaggatgccaacaatcagatgtatccaattgcatgggcagtggtgcacaaggcgaacaaggaagaatggcactggttctgtggattgttgtgcagtgacttgcaagttggtgatggatctggctgggtgttcatatcaaaccaacagaaggaaattattaatgctatggataaatgggctccacaagctgaacacaggatctgtgctaggcacatatatgctaacttgaagagacacttctatgacaatgaacaccagaagttttggaagtgtgccaaggctccgtgcataacgttgttcgacttggcaatggcagagctggtacaacttacaactcctgcagtacaaaccatcttgaataaccatccgcagcattggagccgagcgtggttcaggtcaggctctaactgtgacttagttgacaacagtatgtgtgagtccttcaataaatggattctagaggctaggttctttccaataataacaatgcttgaaacaattagaaggaaagtaatggttaggatccatgatcagagaactatatcaggtagatggaccacatcagtttgcccaaacattctgaaaaaaatgaatgtatatatcaccgagtcagctttttgtcatgcaacatgtaatggaggtgatagctttgaagtaaaacaccatgacaataggttcacagtacacctagacaagaaggagtgttcttgtagatattggcagctgtcaggattaccatgccctcatgcaatatcatgcattttcttcaagactaagactaattcactggatgagtacattgctgagtgttattcagtgaaagagtttaagaaaatctatagtcaatgcctggaaccagtagagggcatgagcagctggccagaagatgacaaagagccacttaatgctcctgggtatatcaagatgccaggagagaccagaagagaatccaatgaaccattaaaagccaccaaactgtcaaggattggctcaatcatcagatgcagcaagtgcaagcaaattggccacaacaaatccacttgtaataagcatcatggaggaggctctagcacaccagattctctccaagttgtaaatccagctgataatttaatgctctcaaacacacaacaaagctctaaacaaagcaggaaaagaaagtcacgtacagctgctaacaccaattctgcaagtcagtcaaggaaaacagtgtcttcaaagcaaaaggcactagtggaattgcatgcccattctcagggttctacaagtgcaacaattaaggtcacttctgggcaagcttttgtcaatgtttcaacctcaagaatcagcaaagttcaagccaaagaagcttacacctggtctactgctgcttatgcctccatgggaatctgacaaactgtgatgtaatgttagatcaagttatctgttattaaacttgtgtgtgatgtaacgccagacaattaggccatctattagacttatctgtgatgtaatgcaagactttatggcctgtcattgtagttgccagacttaatggcatattgatgcagtcaagaaaaccatctgggagttttggctccagctgttccagcatcaacaattttctgaagtcctctgcaggttattagcagttttttgcttcctctgtccagcgcagagacatcgagttgcttaatgggatgatggctcctattgtgatggatgaggtatctgctgagaacgacaaaaatgaaaatgaagatgaataatctggtgaaggaaaaatgggcaattggggagctccagggtcaacaaaggaactctacaacaaacagaagaagaatacacaagagtgaagggagacatggaacattgatgtgggcaactagagctaacaaccagctaacagcagtcagcacctgccgtgttagtatgtttcttctttttttttatttgtaattgttcattgcaattccatttttgaagatattgaaaagaaagaaaacaatagttattacaatatcggaatcatgggcaatattttctttggattc

SEQ ID NO: 19101 - DNA, 1495 bp, Oryza sativa
  ref <308>: DATABASE ACCESSION NUMBER: AK069478
  ref <309>: DATABASE ENTRY DATE: 2001-12-06
ggaagaagttcttgaagttgaagcagccgcctcgctcgcctcgcggccctcgcttgcctaatcaggaggggggctatctctttctctctcttttttcctttcctttcctgcgtccttgggatccgcccgtgcgatctcgccgtgggtggagcgccgccgtccatccgtccccatggatccccgcagtcgcgcggatcgcggcgagtagggagggaggaggggaggggagggggaagcgggttccgggaggagaggcgtcctgctcgagcaaggagcttgtggggggaggtagatggacgcgaacgcgggctcattcgtcgccgtccgccggctcgccggctccgagcgcgccgcgggagcggccgccttccaccactcgtcttcggcggaggtcgtgacggggtcgacggcgtggatcgggaaggggctgtcttgcgtgtgcgcccagaggagggacagcgacgcgcgcctctccttcgatttgacgccagttcaggaagagtgcctacagaggttacagaaccggttagaagttcagtatgatagttcaaacagtgatcatcaggaagcattgaaggacctctggcgtgcttcttttcctggagctgagcttcggggactaatatcagaacaatggaaagagatgggctggcaagggaaagatccatctacagattttagaggtggaggcttcatctccttggagaacttagtgtacttctccaagaacttcccaaaatcttttcaggaacttcttcggaagcagaatggtgaccgtgcaatttgggagtatccatttgctgtggctggtgtaaatataacattcatgctcatccagatgcttgatcttcaatcagttaaaccaaggtcgttcatcggagcagtttttctaaagctactttctgaaaatgatcaggcttttgacattctctactgcataaccttcaagttgatggatcagcaatggcttgacatgcatgccacttacatggacttcaatacggtcatgaagtccacacgacgtcagctagaaagggagctcttgcttgaagatattcagcggattgaggacatgccatcatacaagcttttggcccgctagctagtaactgaaccataacatggctacgtgctgcaaggcttgagttgcataagggttgcaactagtgcccacaaacagtgtgaattccaaaacgcagatgcacttgtttcctctcaagtttaggtactctgttaacctgtctccaaattacaagatagaggtctcttggtcatagcacgccacgtagggtaactgaagtgtccgatcagctgccagggcagagtgtttgtaggttgggtgttttgttgcagtttggttgatgcccgtcataccacgaaatgaagtgcttctaggttttcctttttcctttataaacaagaggctcttgtgaaagctaatctgagtgtcttctgtagtgtaccatatttgcataattgatagtgttcagttccc

SEQ ID NO: 19102 - DNA, 1573 bp, Oryza sativa
  ref <308>: DATABASE ACCESSION NUMBER: AK069479
  ref <309>: DATABASE ENTRY DATE: 2001-12-06
gtccgtgcgtggctttgccttttgagggatttgacgtgtaggcaaaagctatagctcggagcagtggagtggcttggcttggcttggcttgctgctcggtcgatcgatcgagagatggacgggctgcacacggagctcgcgctggggctgatcgggtgctgcggcggtgacgggcagcagcagacggcgccgttcgtggcgaagacgtaccagatggtgtgcgacccgcggacggacgcgctcgtccggtgggggagggacaacaacagcttcgtcgtcgtcgaccccgccgccttctcgcagctcctcctcccctgcttcttcaagcacggcaacttctccagcttcgttcgccaactcaacacctacggattccggaaggttcaccctgaccggtgggagttcgcgcacgagtcgttcctgcgcggccagacgcacctgctgccgcgcatcgtgcgccgcaagaagcgtggcgagggcggcggtggcggtggcggcgcgtcctgctctttcggtggcggcgccggcgagcaccaggtggctgctgctgcggccagcgtgggaatgtcgggagaggaggaggatgcggcggaggacgtgctggccaaggaggccgcgctgttcgaggaggtgcagaggctgcggcacgagcagacggccatcggggaggagctggcgcggatgagccagcggctgcaggcgacggagcggcggcccgaccagctcatgtccttcctcgccaagctcgccgacgaccccaacgccgtcacgggcctcctcctcgagcaggccgccgagaggaagcgccggcgccagcacctcccttcccacgagcccaccgtctgtcccctcccgccggcgccgccgccacaacctccgcagccgctcctggctctcgccggcgccgcggccatggacggcacctactggtggacgacggagcatcatcatcatcatcatcatcagatgaagcccatgacggtgttgccatccttggagccgcccaccgctagctgcggcgtgcaccaagtgccggagctcgggggtggcggcgtgatgggcttaacgacggacggtgaggccaaggtggagccgccattcccattctgtctacttggtcaagctttcttttaattaacctgccgaatcatgcccatgcacgtagtaattcttccattccacttactgattcagtcactcgatcctacgtacacactgccaagaaaaaaaaaaacagatgttagttctggtgcaatgcatgcagtaacaccagcatcgatcagtacgtgttgatctgattattcttacagggtacagattagattacagacgatggtgtaaaaccttaattactactgtgtacttatgtacaacgcatcaaacaatagtggtacggtgttgattactagtacttttttgattgctagctgatagttaattagtactactattattagtaagtagtgttttcattaggtggatgcatggacatttcttcttgccctccaagtttgtagggttcatgatttcatcaaagtgcttatattaatctctgctgcataacttttgctgg

SEQ ID NO: 19103 - DNA, 1694 bp, Oryza sativa
  ref <308>: DATABASE ACCESSION NUMBER: AK069480
  ref <309>: DATABASE ENTRY DATE: 2001-12-06
gaacctatctctcatgaagtcatgagtcccaccatttcacctgtcctggttttcctcctcctatcacttcatcagagcatatgctccagtgctcatgatgctgcaagtgcaagcagcttctcctcctgccttgccacccatggtgtcagcaacttctccctccctgcatcaccaagctacaataccaccctcaacttctccatcagaaatctccggttcacgctccccgatgtcaccaggccggcagccatcgtccttccctggtcaaaggaggatctccggcgagccatactatgtgcacgcaacagttcgctggcgatccgtgtacgcagcggcgggcacagctacgagggcttgtcatacaccacggagaaccatgtccccttcgttgtgatcgacctcatgaacctgaaccgtgtccaggttgactcggtctcggccacagcctgggccgaggccggtgcgactctaggtgagctctactacgccgtgggacggtcgagccagtccttggccttctcaggcgggtcgtgttccaccatcggcttaggtggtgtcatctccggtggcggctttgggttgctgtcacggaaatttgggctcgccgctgataacgtattggatgcggtgctcgttgacccgaatggaagagtccttgaccggaattcgatgggcgaagacatcttttgggcaatttgcggtggcggtggcgggagctggggtgtggtgtatgcttggaagctccggctcgtgccggttcctcacaacgtcaccgtattcatcgttgaccgtactggaccggtcgagtacgtagctgggttggttcattggtggcagcatgtagggcccaatctacctgacgagttctatctctcagtgtattttcctactggatcatcagatggtaatgtctctgtctcatttgagggccaggttttaggaacaaaacaacaaaccctgtcagtgttgagccaaagctttccaatgttaggtgtcactgagtctgacctaagtgagatgagttgggtcgagtcaacagccaagttcgccaatgttggcacagtctctgacctatcgaatcggtcgcctggaacaaactcatacactaagagtaagtctgattatgtgaaggcaccaatctcgaggcatgacatggttgagatcgcccgatacctatcagctggaccaccagggtccatcatacttgacccttatggaggtgccatggctcgaatcgggagtgacgcgacaccattcccacatcgagctggcatcctctacagtattcagtatactgtatattggggacaatcggatcaagctagggctaatgagtacatcatatggctccgatcgttgtacacatacatgaccccccatgtgtcaaaggatccccgtggtgcgtatgtcaactacctagatctagacttgggcgccaacaactggacgcaccccataggtggatcatctatggaagcagtggcgcgtgcgagatcttcttggggtgcagcatattttgggaacaatttcaatcggttggtcagcaccaagacgacaattgatccaagcaatgtgttcaataacgctcaaagcattccccctttgaattagttctagtgaaaatgtcaaatagaaatgaaactggctgtgttcggcagcaatggattgggagaataactgctatgtttttttgc

SEQ ID NO: 19104 - DNA, 2086 bp, Oryza sativa
  ref <308>: DATABASE ACCESSION NUMBER: AK069481
  ref <309>: DATABASE ENTRY DATE: 2001-12-06
gacatccgtctcccacctgactcgttctaatcggcgaagagaaacccacacaagaggaagatggcggcgccggcgaccggcggcgggatctccgccgacgtccccatcctccactcggagaacctcaccagcaacgtcaaatccatctactacaggttccgctcgttctcttcccccccccccccccccccccaaccaaagtttagaattcgatctgatctgataagtagggtcatgcttatgtctgttcgattggatctgggatttatgcgacgacatggtttgatctgctcagattagccctaattctttcgattcaatccggaaccgtgcgacctggtagtttcactgtaggcatgcttccgctcttcttgcggcaatttcgaaatctcggggtgcagtttaggatcaaaatctaagtactatgaataataagaaaaggatcaagtaattctgtgggccagttcatactgccagaaactgtgggtcaaattgcacacttacactaggatctactaaaattagagtaatcaggcttcatgaatcaactgaaagttttcaatgtttacatgcttttctacttcatgctcagatagatgctagatacctcccattaactattaactcttttcgtaaccctttcagcaattctagtcattgatgattatttttgactgcttcacttttataccaagatggcaaggtgatatgtcttaaccgtgaggattgattttgcgttgcagtcggacattcttgtcaattatcagtggagttgttgccggaatctggggattcacaggcttgatgggattcgtgttctaccttcttgtaatgatggtggcatcccttgggcttttgctgaaggccaaattttcaattcatacatactttgacagctggaacaggattttgattgaaggagtttttggtggccttatggtaagccatactggagctgtaacattgtgatgcacacctttatttccataaaacttgaatgtccagatcattcaacatgatttacatgaacttgtatctttcatgtttaatctatattctatgttattatgaagcatgggatgatgggaagattgatcattttagaaagttgatgaatgtggaacatcccttaacaatctgttcgggtttggcattttaaccaaattgttagaaacctcctagttaggaatagtgtgacattatcatggatcttcctagctgttaaaaggtggcctggtttggtgggagaatacagatttttgatggaaggagtataaaacattgggagcttcataccctaactaatgattcacatctcaattgttactgttgactgttggtaaatgttctcaagttatacaaccacattttcttaactatatgtttggtgttgctagtattctaatatcaatataggattctattgcctcaatgtatagttcatcactagattatttcctcaaatttcttcatgataatgagctttatcctgttttggatggtggcctaacattatttccttgctttttttgcagtcttttgtgctgttttggacgtatccttgatgctgtaaatattattgctattttcaattttccatatatacacaaaccatctagtatttcttattcagtataggtgtcaggcaaggtctgattcgattactagtataatggctcaccaccatagaaccatactaaagccacataactgagagtatgtaaatcattattatgtgaggccatagcatgaatttgaggtagaccattgtggttatacatttgaagatgccatataaattatataatgcatgccaatttttatgtttgagtttgtccttaacaatgaacagatttgcgtatgatattgtgcacatcttctgatgcacggcataaagaactcaactccgaagacttgaagggagctgtggggtttctccttgaactgaattaacgtgtaaccgcaccaaccctggaggactacattcgttggactgctgtcctgttttgttccttttttttccactccacatgtatcagttatagctctgtactttagaaagatgcaagcttattaagtttaattt

SEQ ID NO: 19105 - DNA, 2451 bp, Oryza sativa
  ref <308>: DATABASE ACCESSION NUMBER: AK069482
  ref <309>: DATABASE ENTRY DATE: 2001-12-06
gacatccccattgcagaacctctctcccttcttggttcttcttctcatctcctcccactccagctctgcccctgagccaagaactgagcagcagagagctcgtggtctctttgccagcttctcctcagtcctcaccaagctgttcttgcagagaaaacatagccaaagagctaatttgagctcccaccatgaagtacgtgctggtgacaggaggggtggtgagcggcctcggcaagggcgtgaccgcgagcagcatcggcgtcgtgctcaaggcctgcgggctccgcgtcaccaccatcaagattgacccatacctcaacactgatgctggaaccatgtctccgttcgagcatggtgaggtcttcgttttggacgatggtggagaggtggacttggaccttggaaattacgaacgttttctggacatcaaattgacccgtgataacaacataaccacgggaaaaatatatcagtcagtcattaacaaagaaaggagaggagactacttggggaaaaccattcaggttgtgccacatattacagatgaaattcaagattggattgaacgtgtagcgatgaatccggtcgatggtaaagaaggacctcctgatgtttgtgtcatagaacttggtggcaccataggggatattgaatcaatgccctttattgaagcattaggtcaattttcctaccgtgttggacctggaaacttctgtctggtccatgtcagtcttgttccagttttaaatgtagttggtgaacagaaaactaaacctacccagcatagtgttcgtgggctaagaggccttggattggcacctgacattttagcatgtcgcagtaccgagccactggaagaaaacgtgaaagcaaagctctcacaattttgtcacgttccagtctcaagtattattaatctccatgacgttacaaacatttggcacatccccttgttgctaagggaccaaagggcccatgaagctattctgaaagttctagaccttcaatttgtcggtaaagtaccacgagaacccaagttggttgaatggaccgaaagagccagcaagtttgacaagttgaaggctacggttaagattgcgatggttggaaaatatactgggctgtccgattcctacctgtctgttctaaaggcacttttgcatgcatcggttgctatgggaagaaagcttgtagtggagtgggttccttcctgtgatcttgaagattctgcagccaaagagacccctgaagcccataaaaaagcatggaagctactcaagggtgcagagggtatacttgtccctggaggctttggagatagaggtgttcagggaaaaattcttgctgcaaaatatgcacgagaaaataatgttccttatctcggcatttgcttgggtatgcaaattgcagtgattgattttgcctgttctatcatgaaattaccgggtgcaaatagcacagagtttgacccagatacaatgtcaccctgcgtcattttcatgccagagggttccaaaacccatatgggggcaactatgcggcttggatcaaggagaacatatttccatgccactgcatgcaaatctgcaaagctgtatggtaatgctagattcgtagacgaaagacatcgacacagatatgaggtaaatcctgaaatggtaccagagtttgagaaggccggactttcatttgttggcaaggatgagagtggaagacgcatggagattattgaactacccagtcataaatttttcattggagtacagttccatcctgaattcaagtcaagaccagggaagccatctccacttttcttaggattaatagcagcagcatctggacaactagaaactttgctccaaccaagttccaacattgtcaatccaaatcctatgcccagatttcccattcccaaaaagacgatttaccatgccaagaagccactggacagcttggtaaacggatactttgcaaatggcaacgtcatccacacttgattagcagttgtgcaaatcctaagcgaggccttgtttgagatttgtttctacggttttctgcttgaaccctaatcttttcttcttcttcgttttcgtgttttttttttggctttgtatttgtctctgctcaactgagaaggctaagagttgcaagctccagatacacggttcccatgttttaagaggaaacgtcctccggtcatgttgaagcaaagtttagctatagggtggtgtagtgtgctgtttatttcctgctgaggcctcaattaaggctggaaatgtattggtagctttagtatagcctggcatctcaactatttgtacattgggaaaaaaacctacctaagtactgaatatacaaatgcttggccaagattgcttacttcaatgaagagttgggcatctctgtatccttttcttttaacagcaggcgatctgagacatgaatatgctg

SEQ ID NO: 19106 - DNA, 1901 bp, Oryza sativa
  ref <308>: DATABASE ACCESSION NUMBER: AK099093
  ref <309>: DATABASE ENTRY DATE: 2002-08-28
gttctgtgtttggcacgtccacgacagcacgagacgggttggggacttggggggttgaagaagccaagctctccttggttggcgcgcacgtacgttcgcttcgcttcgattcgatggccactggtgacccaaaccctaccaccactccgccgtcgcagcagctgcaaggagcagatccccaaccccaatcccagcaggatgccgccgccaacgccactccggcggccgtggccgtgagagaggattatgtccagaacgccgtcaagttcctctcccaccccaaggtcaggggctcccccgtcctctaccgccgctccttcctagagaagaagggccttaccaaggacgagatcgacgaggccttccgacgagtccccgatccgcaacccagcgctactgctactgctgctgcttccccttcgccttcacagcaccccaacaaccagaaccactcttctaccgttgtgcaaccttatgcaccaaggcaaccagcaacacctgctggctctattattgttgccacacagcccaagttcagctggtaccgtgcattcgtcgctgcagggctattgcttggttttggagttagtgctgctgtgtttgtcaagaaattgctccttcctaggcttaagtcttggatccgcaaggtcgtagctgaaggtgatgaaaacgagggcaggcaaattaagtccaagatcgatgaggaaactgctgaagctgtaaaagcttctgcatctgctgtttctgctattgccaaaactaaccaagaattgcttgcttcaaaggatgaagaaaagaagatacttgtgacattaacacaagcactagattcccaagcaaaagaattgaaatccttatgtgagtctctgaaccgtagcagggattctataaatattaccagggaagataggttttctcagtaccgggcattggaagagcatgccccttctgctgcaaggaatgggccagttaacactccatggagagcctctcagcaaactaatatgtatggtgtgccaaacagtgattttggctcagggaggccttcatttgcgtcaacacataatgaagctacacctggatcattttcaagatcgtacgttgagacatctgctgcacaccgaggggataataggtcttcagggagtaagccatgggagatgcagcaatactcacagcagaggattggctatggatccaacagccagttgagtgatgacggatgccctgaaactcaggacaactatggcgggggaccttcgtattcgtatcaccagaatcagaatcagaacgggaaggctccggctccggatattcaagcagaggaggccaggccatcggtatacataagtggggctgaggaaaggtcgcctccgcctccgcctcagcgccgctgggttcccccgcagcctccgggcgttgtgatgccggaagctgtggctgccatccgtcaaccaaagtccctcgcaaagcaaccgtcgagcgaagcttctcaagaggcagccggcgagacgcatgccaacggtgcttcaagttcgtcgcctcttcctgaagaggcgcttgttaatggcagtgccgccggacgtagtgagatcgaagaacaagcagaagccatctagaaacaatttgttttaaattgggacgagatgatgttgagaagctggaatatgtatttattttggatcagtacgggaacgcctactgtggtaacagaagatctcgatttgtggtcgagtttatactacactacgtcaaataacaagtgttgctactagctgtgactgtgagtaataccgatacattacattacattacatacatacacggtgattaaaacaaacaagcagacatttttacttggttatgttatgacaggcagagatggcatatgttaaggaagg

SEQ ID NO: 19107 - DNA, 3632 bp, Oryza sativa
  ref <308>: DATABASE ACCESSION NUMBER: AK069483
  ref <309>: DATABASE ENTRY DATE: 2001-12-06
gattggccggcggccgcatcaaacgggacgaattcctaaccctcgtcatccgtcccttccctccattcaaacgcgaaaaaaaaatggagaaaaatgagagcgagctagctctctcatggggtccaatggcccgaactttctccctcaaaaggtgaaagctagaagcttcaaaacaactcatccagccaagcctccacccctcccaaatcattccatctgctgcctttgcaagtttcaacccgcaagaattcattcggtctcgctcggcttggcgtggcggcagctagattccaagcagtcgtcaaggccgaggcgaagatcggaattttttttctcatgctgtggctgtactaacttgtaaggatcggagggcgcgatggcggcggcggcggcggcggcgagcaggttcgcggcggcgctgttccacaggaggacgcggagggtcacgtcggcgctggcgtacgccgtcctggagtggacgctcatcgcgctgctgctgatcaacgggctcttctcctacgccatcgcccggttcgccgcctacttcgggctcaggccgccgtgcctcctctgctcccgcgtcgaccgcctcttcgagaaggcgacggaggaggaggatggcgcgcggtggctgcggagcgtcctctgcggcgcccacgcggcggagatctccgggctcgggtactgcctgcaccacggtcggctcgccgacgccggcgacatgtgcgagggcctgcctgtcttcttccaaggaggagagcataaaagatgcaggggaggagagcgccacggtgtgctcttgctgctacgccgttgtgaaaacctcctcgcgcgagctgccggataaaggagcaaggccaatcggaggagaagacaaccgaagaagacagaaaccaagggtatgttccattggctcaagaagagcacggcgaagaagaagaccaaggatatgttattttggctcaagaggagcacgacgaggaaaacgaagaagagcatggagaatttcaggaggaagagcggcaagaagaggtggacgataaagacgagcaagaggagaagatggccgccgtccaggacgagtccttggaagtcatggctgtcggagaagagatcgagctcgacggcgagcgcttgctgtcggtggcagccatcgatgagatgacaatcgccgacgagtcaggtttgcatcaggcgtgctgtgaaaaggagaaagaaatggaccatatcgacggcgagcacgagttgagagatcttgatatcggagttgttcttgaggagaagaggatgttggattcttcggctgcaacggcggatgtcgcgattgaggacgactttgttgtgcccgttccttgtgcagagcctgtcacaagcccacctgatcctcatgagaatatcatcccccacgatgatgaattggttattgaagatgttgctcaaattggagatgccactgctgaagaagaaacagttgaagaagaagaagttgagacagctgaagaagaagaaattgttgtgcccgaagtcactgaagcagttcctgaagatgacaacagatcagcagaggtggacactaactgtgaggtatcaatcggaagtgagatatgcgaagcgggagcaagatgaccatgtcgtgccgtttcatgaatcagcagagtttgaggagccaactgatccattggcgtacccagatgagcagccactgccattggaaagtctccatgaaacagacccaactgcgcaagaagcaagtgaaaccgaacaggaggaggaggcgacggcgagccagagattagaccagccaccaaacgaacagaacgaggttgaagacgacaaggcacctgagacaccgacctacagcgttgccacacaaatctcagacaaaaagtttttgcttgagaggaaacggtcactatccttatctttggacgggagtgtggcaagcgagatggagttgtccgagccttccaccgttgatcagctgaaatcggcgctgcaagcggagcgaaaggcactcagcgcattgtactccgagcttgaggaagagaggagcgccgctgccatcgcgaccaaccagactatggcaatgatcaacaggttgcaggaagagaaggcagcaatgcagatggaggctctgcaataccaacggatgatggaggagcagtcggagtacgaccaggaggcgctgcagttgctgaacgagttggtcaccaagagggagagggagaagcaggaactggagagggagctggatatgtgcaggcagaaggtgctacactacgaggacaaggagaggaggagaatggcaagcttcaaggctaacgggcatagccccaatggtaatggcacttctgtgtcatccagtggtgaggacagtgacgggcactccgatgaatactgcgaactaggtgagtccccggatggcagcaatcttcagagcccgtctcatgctgcttttagccccaggacagatcaagaaaacaagaaacatctggtggctcttgatgactccttgacgtactttgagatggaaaggctatctatcttggaagagctcaagacattggaggagaggctcttcacattggaagatgatgacatcaacgacaccagtgctgctgtgggccgatcttcagatgaatatgaactgtcggctgacggtctccattctccgggaaatggtgatatcactagtgacaaggcaaagtttgaaggtcgaaattctatttgcaggggaaagagtcttcttcctctattcgatgcagctggagatgagagcagtgatcagacaccatctgcaagggttggggatgtgcaagttgataattcgacaaaaccggtttctgtgcttgtaaaagaacaggagaggctggcaataatagaggaggttgatcatgtatacgagagactgcaagcactagaggcagacaaggagttcctcaggcactgcatcaagtccctgaagaaaggtgacaggggcatggaccttcttcaagagatcttgcagcatcttcgcgaactccggagcgtggaacttcatgttaagcatgctggtgatgcccttgctgcaaattcagcatagcacatgcctcttatatataacatgtgattaccgtagcttgctattgatttagtggatcggctttggtgagtcgatcggaatgatctgaagtacttggttggtgatggtacctttgaaagataatggctgatttcatgggaggttttgctcattttgccggtggcacggaagcaaagcctcttccttttgtttctggtccagcattgccggctttatgatgtggtagttgtagaaatcattagtccttccaaagctgcacaatgttgaatcattggtgccagcttcggatgtatgcacaacttaggggaaaaaaagaaaaggtaaagttagtctgagtggagatgtggaggatctattatttattctcttctttttttttcttcaattttcagaattgtttgtgcagaggtaggaatgtgcatgagtttgtcctgttctgtatgaggttgtagcttgtatggttggtacgtgcggtttgttctttttttatagccagatttgatgaagaaagcaatcctttcggaaatgatgaattgctattgcatttgcc

SEQ ID NO: 19108 - DNA, 1946 bp, Oryza sativa
  ref <308>: DATABASE ACCESSION NUMBER: AK069484
  ref <309>: DATABASE ENTRY DATE: 2001-12-06
ggacgaccatacgaacccgagcacccgagccatcccgaccggccggagagcgagccctagggcagagcggcggaggcggaggccggaggcgaacgggaggccggcgagatgtcgtcggtgtacgtgctggagccgccgacgaagggcaaggtggtagtgcagacgacggccggcccgctcgacatcgagctgtggccgaaggaggcccccaaggcggtgcgcaacttcgtgcagctctgcctcgagggctactacgacggcacgctcttccaccgcgtcatcaagtccttcctcgtccagggcggcgaccccaccggctccggcaccgggggtgagagcatatatggggccccatttgcagatgagttccatacgcgcttgaggtttaaccacaggggtttagtggcgtgtgccaatgccggcacgcctcactcgaatgggagtcaattctttatcagccttgaccgttgtgattggctcgataagaagaataccatctttgggaaggtcactggcgattctattttcaaccttctagccttggctgatatcgagactgataaggatgatcgacctgtgtatccgcagaaaattctttcagttgaggtactctggaacccatttgatgatattgttccaaggcaacttaagaagactgagcctactgccaagggtgatatcgaggggaaatcaaagaagaaagccgttaagcaacttaatgtgctttcatttggagatgaagtagaagaggaggagaatgaggcagcatcctctgtgaaggacaaaataaaaagtattcacgatgtgttggatgatcctcggtttcttaaaggagaggcaccggatgagcaactgaccaaggagcaagaggacaaaaaaaaggagactgttcaatctgtcagggaggctttagtatcaaaaaaatctgacttcagagagctagagcatgattcagaaacagatgattatcctgacgatgaaaacgaggaggattttgataacagaatgcgctctcaaattctaagaaaacgcagggagcttggggacatccgctctagtgaaacctccaaaaaaaacagataaagcacaccgtaaagacaaggagttaccagttcacaggagtgacgatgacaatgatgacgacaatgaagaccaccagctaaccaagtctagaaaattttctatgaagaaaaaaggcattggctcagaagccagtgctgaaaggatgtccaaaggcgatgctaatttgcagctattgaatccagctgagcaagagaagcatttgcaaaaacagaaaaggcgccgtcttcaaggccgtgaagatgagacgttagcgaagctacagaagttcaagggatcgtttctcagtaagaaccctgcaactggtaacacagaaaagaagactgatgaagaggattacacagggtggcacagcaaccggctgacttttgaacctgattcttctaaggatggaatgacgaggaaagatgatccagatgactatgtagtggttgatcctctccttgagaaaggaaaacaaaaattcaacaagatgcaagcaaagcttaagcggagagaacgtgaatgggcaggcagatctctgacctgaccgcataagctgcttgaggtgctttactgtttccttcataagcggccttcctgaatttttcagcttacattaatttatcctttttttgcctctcagaggtgcaccgtgcaaaagattacctcatatcataacagtgccactactgcagttttgatggtgttgtaactgtacactgcgtttcgctatgttgtggttcatggtagagggaccacctgtagactagtgcttttaacattaacatttgtatcattgtcaatcaaactgtaaataacaattgttttaaacttagaggttcataatgcccttattaagttgcagtggtctttttttttattgg

SEQ ID NO: 19109 - DNA, 2530 bp, Oryza sativa
  ref <308>: DATABASE ACCESSION NUMBER: AK069485
  ref <309>: DATABASE ENTRY DATE: 2001-12-06
acccctccccgccgcacaccgccgccgcaaagcccgcaagccgcagctctctcgatcggcgaggaggttccgacgaagctggggaggctggcggcgatggagagcagcagcgaggaggagctggaggaggacttccctggccacgagtggatcaccccgcagtcctccatccgcgccgcctaccagtcgcagaccgagaagggcatcaggaaaatttgctctgagctactggagttgaaggatgctatcgaaaacttgtgcgggaatatgcagtcgaaataccacgctttcctcagaatatctgaggaggttgttgaggcagaacaagaattaattgagttgcagaagcatgtgtctgcccaggggattcttgtgcaagatctaatgagcggtgtgtgccgtgaactcgaaatgtggcaaaaacattgcaaggatgaacatgtggaagagaaagaccttcaaacagaacttgatgaaattttgtcatatgatacccaagattccaaggttagttttctggataaattagatactttgctcgcggagcacaaaatagaggaggcattgcttgctttggaaaccgaagagaagaaatgtatggctacggatgatcctggcaaagaattagatgcagagatttctacctataagacagcactatctaaaaggaaatcaattcttgaggatcagcttgttaggtattcagaacagccttctttatctattaccgagctaaggaaatctttgtctggccttattaagattggcaaaggttctctagcccaccaagtacttctaaaagcttatgggtcacgtcttcagaaaaatgttgaagcatttcttccaacatgttcgatctacacagaaacttactctgcaactttgtcaaagattgttttctcagctatctcaaaggtatccaaagaatctagttcgctatttggggatagccccatgaatttgaaccggattattcagtgggctgaatatgaaatagaaacctttgcgcgtttggttaaggaaaattctcctttgcctgagagcgtatctgcccttcgttctgcctgcatatgcatccaaactagtctcactcactgctcttatctagaatcatatggcctgaaattctcaaatttactaatggtactattgcacccctatgttgaagaagtgcttgagctgaattttagaaggctgagaagaaagattgtagattcagcaaaaaatgatgatattctgcttcccagccctcaagaaggatcacggctctctagttcagttgcaccaaatataatgcttacaagcagtggaaagaagttcatgtccattgtcaatgatgttttggatcaagttaccccaatgactatagttcactttggaggaacgattttgaataaatttgtccagctatttgataaatatgttgaagcactaattgaagtcttaccaggagcttctgaggatgatcatctagtggagtcaaaagagcctatagaatttaaagcagagagtgatgcccagcagattcaactcattggaacagcatacactgtagcagatgaattattgccagcagctgtatccaaattttttgatatccaaaccgagaagaagagaattggtggaacaggcgagggccttggctctggatctatatactccatagaatacaaagagtggaaacgtagtctgcaacattcactggacaaactgagggatcatttttgcctacagtatgtcttatcatttatttacttagaagggaaatcacgactggatgctagaatgtacttggagctgaaaactgatgatcttctttgggagtgtgatccttcaccttctctgcctttccaggcgctgtttgtaaagttacggcagctagctagtgttgctggtgatgtcttactgggtaaagagaagatacagaaggtcttgctctcaaggctaactgaaacggttgtcatgtggctctccaatgaacaggaattctgggatgttttcgaggatcaatccatccaactccggccttcaggactacagcagcttattcttgatatgcacttcgtcgttgagattgctgtctgtggacggtatccacacagacctgttcagcagcttgtgtcggtaatcataactagggcaatcgcagctttctcagtgagaaatgttgacccacaaagttctctacccgaggatgaatggttcctcgacatggccaaggttgcaattaataagcaattagggacttcaggatctgagtccgagcttgaggagcctgtggttgtacatgatgaaatctcggattctgaagagagtagtatttcaagtccatcgacgataggatctgaagattcatttgcttctgcaaacaatgatgatctagaaactcctgtatatttcacggatcccgaggcataagagttatttatgcagggaggtgattgtagttatttaaacatctagtagtttaatgtcctatatacttgcagaaaaattgataatccatatttactgtcctcattttcttttc

SEQ ID NO: 19110 - DNA, 1972 bp, Oryza sativa
  ref <308>: DATABASE ACCESSION NUMBER: AK069486
  ref <309>: DATABASE ENTRY DATE: 2001-12-06
gtcccttccaacgccggccactcgtctcctcctcctcccacctcccgtttcccccgcgccatcctcctccgcctcgccgccatggccgcgaccccgccgtcgtcgcagcaccggcggccgctgtcctcctccgcctccgccgcctccctcgctggcaagccgcgggggggcgggctcctgctcgggcggtacgagctcggccgcctcctcggccacggcaccttcgccaaggtgtaccaggcgcggagcgcggattccggggagccggtcgcgatcaaggtgctcgacaaggagaaggcgatgcggcacggcctcgtcccgcacatcaagcgggagatcgccatcctccgccgcgtccgccaccccaacatcgtgaggctgttcgaggtgatggccaccaagtccaagatctacttcgtgatggagctcgtccgcggcggggagctgttcggccgcgtcgccaaggggcggctcaaggaggacaccgcgcggcgctacttccagcagctcgtctccgccgtcgggttctgccacgcgcgcggcgtgttccaccgcgacctcaagcccgagaacctcctcgtcgacgagcacggcgacctcaaggtctccgacttcggcctctccgccgtcgccgaccagttccaccccgacggcctcctccacaccttctgcggcacgccctcctacgtcgcgcccgaggtgctcgcgcgccgcggctacgacggcgccaaggcggacatatggtcctgcggcatcatcctcttcgtgctcatggctggctaccttccgttccatgaccagaatctcatggccatgtaccgaaagatttacaggggggaattccggtgcccgagatggttctccaaggatctttccagtctactgaatcgcatccttgacacgaacccagagacaaggatcactgtcaaagaggtcatggagagcaggtggttccagaagggattccggccggtcagattctatgttgaggatgatcaggttcacagcttggcagatggtgataatgatatgccggagttggaacctagtgagcctcctcctcctcctccgtttccgccgccgccgccgcagcaagatgatgacggtgaggagtcgggatgggagtcggactcatccgtggcatcatgtcctgccacattgtcatctgaggagcgtcggcaaagacctctcgggtctctcacacggccagcaagtcttaatgcgttcgatatcatatcgttctcaaagggatttgatttgtcggggttgtttgaggagcgagggagtgaagtgaggttcatatcggcagagcctatgcaaacaatcatcacaaaattggaggagatcgcaaaggtgaagagcttcttcgttcggcgaaaagactggcgagtgagcatagaaggcacgagggaaggtttgaagggtccattgacaatcggcgctgagatatttgagctcacaccaagcctggtggtagtggaggtgaagaagaaggcaggggataaggaagaatatgatgacttctgtaacagggagttgaaacctgggatgcagcatctcgtacaccatatgggatcagttccaaatataccttctgatacggagtagtttgaactaagaaaggtagttctctttcttggaggggtataaggaaattttggattaaaagtatatgtctatgcaagcatgaacacctgagaggcaaaatgatacccaattcctttagaccagtgtccatgttttggtgctgttcgtttcttcaatcgaaatgatgtatgctagtgtttgcatgctaatatcagctatcaaatgtctgtttttagctgttacagtttaaagagagtgacaaatctgagtatatggcatcagtatcaatgaagtggactagacttttatgtatgccgcagcagtgcagccatttgtatttctatgctgccagttagttctctgaatacatatgacatcaacactg

SEQ ID NO: 19111 - DNA, 1231 bp, Oryza sativa
  ref <308>: DATABASE ACCESSION NUMBER: AK069487
  ref <309>: DATABASE ENTRY DATE: 2001-12-06
gaatcaacctattgagcttgatctgttttttccaattccccagccacctctccatcttctgtccgttcacctctccgtaaccgtgctccagccgcttcttccacttctcgccatgaaaacagcgccacaatttccaattccctgcagatcccttcatctcctccttcagtttctcatcttcaaggccaaacgttgaatcctcctcaattgctagactatttctctaatagctgcagcacccctcttcctttcctctttgtttaaccaccacaccactgccccagccatgccgtgctgctgttgctgctgctgctgcttccgcaacaccgtgctgcagcattgaagctctcccacttcgcttgtacgccattgtcctgctgctcggtacctcgagccggtgccatcgtcgcagcccgagggaggacggctgccatcacgcctgcaagccgcctctctgctggctgccgggaggtcaagccgttgccatcgtcttcttgtttcaaacactgctacatcatcgagaggtccctcaattgccggggattggtgcaacgttgttttgcccatccaccgcctcctgtgctatcttttatcaagctgtccaccagcgccgacgattctctgtcaaccacccgctgctgctgcaacttctcctttgcgccaccaactaaatgccatcatcggtggtgaaccacgttgctccttcatgttcggtcgccgtcgcctgcacgcagaggcgctgctgccgtcgtggaaccagagccgccctctcgccatccacttcggaagcccaagccactgatgccatcttctcctttgctggagctttgttgcttcatcttctctgccatggctggtcacagagaaatgagaaggaaaataccagagaagaaaaaaaagaaaatttttaaatgggtctcatttgtcagtcaaaattatgccatgtcatatccgtgtgacatgccacatcagcgccgcgtaggatactgaaggggctgtggcgatttgggacctagatgatacactatgataaattctgggacttggatatgcattttgagagtttaaggacctagatgacacaccgctacaaggctgatggattcatgaacttgttcctggtcacttttgttaattggaagttatgtatttgttaattggaagtactgtacctactgagaattacaaaaccaaacaatgaaatcaactgtgacagggaacaaattacacc

SEQ ID NO: 19112 - DNA, 2149 bp, Oryza sativa
  ref <308>: DATABASE ACCESSION NUMBER: AK069488
  ref <309>: DATABASE ENTRY DATE: 2001-12-06
tgtcgctctcccctctcttcccccttcctccgcggttggtggtggctgcgccgctgcccgcatcatcaccacctcacctcacctcagctcgcgagctccgctctcaccaaccgcagcgcgcgacgaaggggattggattgggttgggttggattggagagagagaatggcggcgccgtcgtccctcgcgtcctcccacctctcccgcctcgccgacctccgccgcgcaggcgtcgccgccgccgccccggcgcatccgcagcagctccgcctcgggtgctcccgccgccgcgcccagcgcgtcgtcgccatggccggatccggcaagttcttcgttggaggcaactggaagtgcgtaagtatccgctcctcctcatcaatcaacttttgcagacgcacggggtacctatgagcagagcgatgatggatggagattctgctgctgctgcaccttcgtgatcttgagtcgttggcgccttgtggttgccgcctaggacattccaaagatgagcggaatgaatgggattttttgtcgtcatcaatacatcgtgatctacaccacacctggtcgtgtttgctagatatggagtcgcttttggtgccacaagatgtagtcgtttttggcttaagcagttctcttggggaatatgcatcttatatgcaaaaatgtataatttttttcagacttcatcttctcagtccctggctttctcatttgcccaaatttcatggagtcgagcaactactgttacgtagacagggattggttctagtgctccaaggataagaaagtgtgtgcatcagtatcttgtccaaaataaattagttctagtggtccgagggtaagaaagtgtgcatcagtatcttgtccaaaaataaagatagtagcatcttctttaggccatccttaggacgagctgattcagttgctcatttttccttttggagaatcatctcggtattatatgttgcttcactttttatcgagagcttatgctaactatatcaagacatgtttcccgactttttggtcagatatgttactatcagtatgattggttctgatgatataatttcttgtccctcaatttagaatggaacgaaggactctgtcagcaagcttgtgactgaattgaatgctgctacacttgaacctgatgttgatgttgtggttgcaccaccattcatttatattgatcaggttaagaactcactaactgatcgtattgaggtatctgctcagaatgtttggattggaaaaggaggagcatacactggagagatcagtgcggagcaattggtggacattggctgccaatgggttattcttgggcattcagagcgtagacatgtcattggtgaagatgatcagtttattgggaagaaggctgcatatgccttgagtcaaaatgtaaaggttattgcctgcataggggagctgttggaagagagagaagcagggaaaacttttgacgtctgttttaagcagatgaaggcttttgcagacagtattacaaactgggcggatgtagtaattgcatatgagcctgtttgggctattggaaccgggaaagttgctactcctgagcaagctcaggaagttcatgctgctgttcgtgattggttgaaaaccaacgtgtcacctgaggttgcttccggcattcgaattatatatggaggttctgtaaatgcagccaattgtgccgagctagcaaagaaagaagatattgacggcttccttgttggtggtgcctctttgaagggtccggattttgccactattatcaactcggtgacttccaagaaagttgcagcctgatgtaacccttctgtagaaataaatgacccagaggcagcgagacggctaccacaccatattgcttgatagagatacttcgtgttcaatcaccgtgcttgttttggcacacgagggaataatgcaagatgccactgtgttgttttttctcatagacctggctggcgttacgagagcctattatttgttagtgagtgagtgaccaataacacgtgaaaaattgctgctatatgtggtgttacccgacatctgtggaaggcaaggaatgttgtggtgttgagcataataatcgatgttgccgtaggatcgttgatcctccacaccttactggccc

SEQ ID NO: 19113 - DNA, 994 bp, Oryza sativa
  ref <308>: DATABASE ACCESSION NUMBER: AK069489
  ref <309>: DATABASE ENTRY DATE: 2001-12-06
gagaggagaaggagagatctggagaagaagaggtaggaggccattgccacctgaccttctcctcttcctccattcatcttctctttcttgggacatggcgaccatcctggagaacatccagaaggcgaggttcttgccgacaaggccgctcaaggacgagctgccgacgttccagggcggcggcggcggcggtggcggtgggggtggaaaggagagccacctgatggggctgaggaagaggctgtcctccttctccgacaagatccagcccatctcctccgcgtcggcggggtgggcgttccggcggtccaagtcggcgccgtcgctgggcgcgttcgccggcggcccgctgaagcggtggtgggactggggcgtcggctggctcatgtccaagaagcccgggttcgccaccgacctcgagatgaacgaggaggaggtggccgccctcggccgcggcagcaggggcagctggggccacatcctctacaagatgcgctccggcgtccggcggctcgtcacctcgcactcgctgcccaccacgcacagggcggcggcggcggcgtcggcgtcggcccagtgcaagccggcggccacgttcaactacacccagagcttccacagcgggcaaaccgccatggcgtactgagagcttctcacatgttcctccagtgagaaacatgaccttttcttggtcgccgtctccatgggatccaaatgaagaagaagctcagggagattgatataatatatggtgatgaagatgcaactacgattacatgtaaaattacacggtaaatttgatgaatgatgaaaaaaaaattgtagctcactacgtgatctgttttttgtgtagatctagtgtcctgtagaggccgaatgtatgttcgttctttcaattctttttggagttcgttgggcgatgtaaatgtctccggtcaaattccttatgcttttgcctcctgcagtaaataaaaagctaatgaaatatagtgct

SEQ ID NO: 19114 - DNA, 2410 bp, Oryza sativa
  ref <308>: DATABASE ACCESSION NUMBER: AK069490
  ref <309>: DATABASE ENTRY DATE: 2001-12-06
ggaaggggactcatgttgacaagttgggaggcaattctggaaaaaatgtccaccgcgccgcgtctcccgccgccgcgcggagcccccgctctctccgtctccgacgaccaagccccacgacctcgtctcgccgaacccacgcgcggtcaacctcccaaacccctcaagtctccactctccacctcctcctccccctcaccaagtcaatctccacccgacgccgccccgcccatggcttctcccgccgcccccctcgccctcctcatcctgctcgtctcgctcgccatcgccgccgctcagtccggccagccgtcgtcgccgccgagaaacagcaccaacatctctgatgcggccgccctgcacacggtgttcgagaagtggggactggaggatggcaccatgccgcaggggtaccacccgtgcgggaagctcgtctggtctaattcgtcggaaatggaagcgtccatcaactgctcttgcagcagcaacgagtgccgcattacgcacctgaacgtcaccggctacaggaacatcacctttatcccagcggagctcttcagtttgacggagctggtctctctggatttaagtaataacaacctgattggtcaaatacctccccaagtcagcaatctatccaagctggaaacatggcacttcaacaataaccggctcaatgagtcctttcctaatgcatctgcacttttaagtatacaatccctgtggatgtttgataatgacatcgaaggaatggttccaggatttattgcgaactttgccaatcttacagatttgagaatgtatgggatgaaacttcaaggacctattccagaaaatttctctaaattgatcaatatagaaaatctcatgattggtgaccttgataccgagggctatccttttaatttcacaggagattgggtaaatctttcaacgttatctctgaggaattgtggattcacggggaagtttcctaaccaaattctgaagaatctgaacaaattaacatacgtagatttgagatcaaacaacttgtcaggatcaattgaccttcagcagtacgatagtagcctaaagtacctttatgtaggtgaaaacaatttcaatggatctctgcctgatcaaatgcctcaatcactagttgctctggatgtcacatataatcctttgcttaggggaaggcttcctagcagttctgctgatagaaagatgcggataaattatattggaacttcgattggtgcaggaagctcagttggcagtgaaaaccttcgtctcctcaattgtgtcgacatgaaaggatgcaacacaacaggtttaactaatcctgtatcctttgctgtgaactgtgggggcaagcaatatactcctccttcagatccgtcgaatatgttcaatgacgactccgctaaccttggagcagcagactttcatgtggacactaataataattgggtagtcagtcatgtgggcactgatccttttagtaactcttctggtattgtaactaccggcaatggaacaaacatacctgagctctacagaacggcaagaacatcaactggttccttatggtactatgtggttggcttgcctagtgggaaatatacagttcaactcttctttgcagagatagttatagaaagtggatcaggaaggcgtttatttaacatcgacattcaggatcggaatatcatgacagattttgacatttccaaggaagcagggggttccaacagacccattaacaggaattatacagcggatgtcaccacctcagtgttgaaaatacatctctactggaatgggcgaggcacttgctgtattccacgcaatggaacttatggtcctctggtgtcagcaataagagtattcccttccgcggagacgcaagccagcccccctcctgtggcgcttacatcaaggcacgatgaaaagcgaagaggagtggttgcaggaattgctgctctttccatagctgctacagtgatatcctcatcagctgtctacctctggtggaaatgggtttcacttgtgaagcatcgaaaggcatgaggtgttcagatgtgcatatacaaagctggttgttttaattttgttcattctgtcttcttagcatgttcatgagcctatgtctgtattgtatgggcattgagctgggtttacatgagctgtacaggaaaaggtactgtgtaacgtcaagaggaaagcaacaatattgatgtacagtttggtttgtggtcatgatttttagcctatagttttgttgctctaccatcatttatagccagggtgtaatctcaagttaatttttttttgaaagttttgtacatgttacttgtatcaatttgtaaagcttttttgcacccatatcaatgtgtcaattgacaccgaagatcatttgtttacg

SEQ ID NO: 19115 - DNA, 2039 bp, Oryza sativa
  ref <308>: DATABASE ACCESSION NUMBER: AK069491
  ref <309>: DATABASE ENTRY DATE: 2001-12-06
gacatcatatgtcctcaccagaatccaaaattttcatcacaccaaaccatccaccgctcatcacttttcccccaagcaaatccaatctttgcaaccacattgttgttgtttctcccccacaacatcctcttccttttctttccttttttttttcccgtttttgcgtccaatcgcccaacgaatccaaccaaattcgctgttcttgccttcttcttttgtgttcaagaatccaaaagttgatgttgttttgagctcaattttgctcgagaaaagctcgaggaaggtgctcccatgtcggactcggagctgtcccagagcacggtggtgttcgggctccgcatgtgggtgctcgtcggcgtggccgtcggcgcggcgttcgtgctgttcctcgtgctcctctccgtgctatgcctcctcgcttctcgccgccgccggcggcggcgggggccgaacacctccccggtgcagcagctccccgtctccgccccgcccaagaacccccagaaggtcaaggcgcccaaggacatccaggaagtccccgcccaggccaccgccgccgccgcggcgaagacgccgctcgcccaggtgctccagatgcccgcgccgccgccgccgccgccgccgatggcggcggcggcaccgcctccggagaccgtccagatcgccaccggcaaggagcaccgcattacgtacccggagccgccgcaccgcagcggctcgtcgtcgcacggcagcggcgaggcgccgtcggtgccggaggtgtcccacctcgggtggggccactggtacacgctcaaggagctggaggcggcgaccgagatgttcgccgacgagaacgtgatcggcgagggcgggtacggcatcgtgtaccacggcgtgctcgagaacggcacccaggtcgccgtcaagaacttgctcaacaacagggggcaagcagagaaggaattcaaggtcgaggtcgaagcgattgggcgtgtgcggcacaagaacttagtgcggcttctaggatactgcgcagagggcaatcagaggatgcttgtgtatgagtatgtcgacaacgggaacctagagcagtggctccatggggaagttggacctgtaagccctctttcgtgggattccagggtgaagattatactgggaacggcgaaagggttaatgtatttgcatgagggacttgagccgaaggtggttcaccgtgatgtcaagtcgagcaacatcctccttgataagcactggaatgctaagctctctgattttggtctagcaaagcttctaggctcagagcggagttatgtcactacacgagttatgggaactttcgggtatgttgctccagagtatgcagggactggaatgctaaacgaaacaagcgatgtatatagttttggaattcttatcatggaaataatatccagtcgagtaccggtggattataataggccaccaggagaggttaatttggttgattggctgaagacgatggtgagcacccggaattctgagggggtcgttgatccaaagatgcctcagaagcctacctctagagctctgaagaaggctttgctagtggcattgcggtgtgtagacccagatgctcgtaagaggccaaagatcggccatgtcattcacatgcttgaagttgatgatttcccgtatagagatgaacgacgaggcgctcgagctccggtgcaggcaagagtggctgacaaaccggtggccattgaagcaggcgaccgtgaatccgacagcagcggtaacaacagcgcgcgacaaaccgaacccttcagatggagaaacccagagtcctaggcatttgttcagaaattttcacttgatttcttgaacaagaacagtgtccaccactgaagttgcaaagtgctcatttgttgccttcatcaccatatcatctgtacatgccgaaggaacatattagccctagtaatattttttctcggtttatttatccgattagagacacttttgtatgaaaaaagttactcttctaagttaaaagaaatggagcgtaatcaaatccc

SEQ ID NO: 19116 - DNA, 2092 bp, Oryza sativa
  ref <308>: DATABASE ACCESSION NUMBER: AK069492
  ref <309>: DATABASE ENTRY DATE: 2001-12-06
ggttcgtttttccgcatgagaaatatataaaactgatgcgccgtcatcgttgtcgcatccatccatccatccatcgatcggaggagtcgcctcgcgccgccgcaccggccgtcgacgtcgtgacccgcgctagctagctcgcgcgggcggcaatgtcgtcggacgacgacgacgatgggtcggggcgcaccaagctgatcatcgccgccgtggtcatgctgctcgccatcgtgctcggcacggtggcctacgtggtggtggaccgcgccggcgacgacgacggcctgagcaagcgcggcatgaagtcgacgatgcgcagcgtggacctcttctgcgcgcccacggactaccgcgtggcgtgcaaggacaccctggagcgcgtcctggcgcggtcgtcggacccggccgaccacccgcacgccgccgccgccgcggcgatcacggcggtggagcgggagctggcgcgcgggttcgaccggtcgtcggtgctggaggcggtgcgggcgagcaacgacagccgggtcgccgaggccctccgcgactgccggacgctgctcggcgactgccgtggcgacgtgagccgggcgctcaccagcatcgcgtggcgcggcgtggacgccgtgtcgcaggacctccaggcgtggctcagcgcggtgatcacgttccagggctcctgcgtcgacatgttcccgcagggccccatcaaggaccaggtgagggaggccatggagaaggcccgcgagatctccagcaacgccatcgccatcatccagcagggcgccgccttcgccgccatgctcgacctccacgccagcgagagccacgccgccgaaggcgaggagctcgacgtcgaccacgacatccagcaccacgtggaccgccacctcgaggatcagtcgttaccaccagtcccgccgtggttgtccgacgaggaccggaggatgctcaccagcggcgaggagttcgtcgccgggctgaccccgaacgtgacggtggccaaggacggcagcagcgacttcaccaacatctcggcggcgctggacgccctgccggaggcgtacgccgggaagtacatcatctacgtgaaggaaggcgtgtacgacgagacggtgaacgtcaccagccggatggccaacatcaccatgtacggcgacggctccaagaaatccatcgtcaccggcagcaagaacatcgccgacggcgtcaggatgtggaagacagccaccttcgcggtggacggcgaccggttcacggcgatgaggctggggatacggaacacggcgggggaggagaagcagcaggcgctggcgctgcgggtgaaggcggacaagagcatcttcttcaactgccggatcgagggcaaccaggacacgctgttcgcgcaggcctaccgccagttctaccggagctgcgtcatctccggcaccgtcgacttcatcttcggcgacgcggccgccatgttccagcgctgcatcatcctcgtcaagccgccgctcccggggaagcccgccgtggtgaccgcgcacgggcggcgcgaccggcagcagaccacggggttcgtgctgcaccacagccaggtggtcgccgacgaggacttcgccggcgccggcggcgggagcagcaacacgtcgtcgtcgtcgggggcggcgccgaggctggcgtacctggggcggccgtggaaggagcacgcgaggacgatcgtgatggagtcggtgatcggagggttcgtgcacgcgcaggggtacatgccgtgggaggggaaggacaacctgggcgaggcgttctacggggagtacggcaacagcgggcaaggcgccaactcgacggggaggatggagatgcgggggttccacgtgctggacagggagaaggccatgcagttcacggtgggccgcttcctgcacggcgccgactggatcccggagaccggcacgcccgtcacgataggcctcttcggtggctagctcgctcatccatgcgtacgtgtgtatgttgatgcgtgctaggtggggggttgtggggttaaattcgtatgtacaaaatggttacatgtggagcaagcagaagagagagatgcatttttttttctttg

SEQ ID NO: 19117 - DNA, 1922 bp, Oryza sativa
  ref <308>: DATABASE ACCESSION NUMBER: AK069493
  ref <309>: DATABASE ENTRY DATE: 2001-12-06
ggcaggtggcttattccccctaatttgctcgggaccagaccacacctccccaagcttgttgattattcttcgcattgcatcatctttgcttcccctcttttgcatgctcttgctgtccatgctgattggggattgtatcttgagaacctccccgtttgccttggaactttgagcttttcaagatgccaaggaggacagataatgctgcttctgccaattcagttgaaccagaaaaatcagaagaatgtttggagtttgatgatgatgaggaggaggaggtagaagaggaggaaattgaatatgaagaaattgaggaggagatagaagaggaggaggtagaggaggatgaagatgtcgtggaggaagttgaggaggtagatgaggaggaagatgaggaggaagaagaggaatctgatgaaactgaaggtgtaagtaaaactaaaggtgttcaccagaaggatgttactgaaaagggaaagcatgctgagcttcttgctcttcctccccatggttctgaagtatatgttggaggcatctccagtgatgtatcttctgaagatctgaagagactatgtgaaccagttggagaagttgtggaagtgagaatgatgagaggaaaggacgatagcaggggatatgcttttgttaattttagagcaaaaggtttggcattaaaggctgtcaaagaattgaacaatgcaaaactgaagggaaagcggataagggtttcttcctcgcaggctaagaacaagctttttattggaaatgtaccccatagttggacagatgatgatttcagaaaggttgtggaggaagttggtccaggagtattaaaagctgatctcatgaaggtctcaagtgcaaatcgcaatcggggttatggttttgttgaatactacaaccatgcatgtgcagagtatgcaaggcaggagatgtcttccccaacattcaaactagattcaaatgctcctacagtcagctgggcagatcctaagaataacgactcggcctctacttctcaggttaaatctgtatatgtgaaaaatctgcccaagaatgttactcaagcacagctgaaaaggctgtttgagcaccatggtgaaattgaaaaggttgttcttcctccttcaagaggaggtcatgataataggtatggttttgttcactttaaggacagatccatggccatgagggctctgcagaacacagagagatatgagcttgatggtcaggtcctggattgctcacttgcgaaacctcctgctgctgataagaaggatgatagagtaccactacctagttcaaatggagctccattgctcccgagttatcctccacttggatatggtatcatgtcagtaccaggtgcctatggtgctgctcctgctagtactgcacagcctatgctgtatgctccaagagctcctccaggtgcagcaatggttccaatgatgttaccggatggtcgtctcgtatatgttgtacaacagcctggtggacagttgccgctggcttcgccgccgccgcagcaagctggacatcgtagcggcagtggaggacgtcatggcggcagtggcggccgctatggcggtggtggtggcagctccggcagtagcaggccaggtgcaaagcggcagagaggagacgacaacagcagtagccgccacaaaggccggcgccgcccgtactgatctgatcagcatagctgtagctaccacttagaagatgtagtgtcgttgcagaaaattaccagaaaatctggtagaaataatttatactgtttgtactcgtcgatttattagaggaatgcgtttctgaaacaagactgtacatgcgtattttacctgtatcgcagagtgctgaatctgatggtgcactggtacagtataagccagtttcaggtctctttgtaagcctgtttt

SEQ ID NO: 19118 - DNA, 1939 bp, Oryza sativa
  ref <308>: DATABASE ACCESSION NUMBER: AK069494
  ref <309>: DATABASE ENTRY DATE: 2001-12-06
gagaaaacatcaccaagcacctggcaatcactcaacaaacaacaaatccaagtgtacgtacgtacgtacaccgtgcacggtgcacattagagcgcttaattaattagcttcaccgatggagaagagcagcgagctatggttgctatgggcggttttctccgcctctctcgtcttcctctacctcaccatccgacgacgctccggtgccggcgccggcggcaaaccacccttgccgccggggccaacgcctctcccgctcatcggcaacctgctcgacctccgcggcggcgtcatccacgacaagctcgccgccctcgcgcgcgtctacgggccggtcatgatgatcaagctgggcctcaacgacgccgtgatcatctcctccagggacgccgcgagggaggcgttcacgcggtacgaccgccacctcgcggcgcgcgccatcccggacacgttccgcgccaacggcttccacgagcggtccgcggtgttcctcccgagctccgacgagcggtggaaggcgctgcgcggcatccagggcacgcacatcttcaccccgcgcggcctcgccgcggtgcgccccgtccgcgagcggaaggtgcgcgacatcatcgcctacttccgcgaccacgccggcgaggagctcgtcatccgccaggccatccacaccggcgtgctcaacctcgtgtccagctccttcttctccatggacatcgccggcatgggctccgagaccgcgcgcgagctccgggagcacgtcgacgagatcatgacggtgttcgcgcagcccaacgtctccgactacttcccgttcctccgccgcctcgacctccagggcctgcgccgctcgaccaagcggcgcttcgatcggatcttctccatcctggacgacatcgtcgagcgccgcctggtggatcgcggcgaacgaggaggagaaggcggagccagctcgaacagcagcaagagcaagcaccagtacgacggcggcgacttcctcgacgcgctcctcgagctcatggtcaccggcaagatggagcgggacgacgtgacggcgatgctgttcgaggcgttcgtggccggcggcgacacggtggccttcaccctggagtgggtgatggccgacctgctccgcaacccgcccgtgatggccaagctccgcgcggagctcgacgacgtcctcggcggcaaggaccaatccgccatcgaggagcacgacgcggggaggctcccctacctgcaggcggtgctcaaggagtcgatgcggctgcactcggtggggcccctgctgcaccacttcgcggcggaggacggcgtggtggtgggcgggtacgcggtgccccggggcgccaccgtgctgttcaacacgcgcgccatcatgcgcgacccggcggcgtgggagaggcccgaggagttcgcgccggagaggttcctggcgagggaggggaaggcgccggtggacttccgcgggaaggaggccgacttcatcccgttcgggtccgggcggaggctgtgccccgggattccgctggcggagcgcgtcatgccctacatactggcgctgatgctgcgcgagttcgagtggcggctccccgacggcgtgtcgccggaggagctggacgtcagcgagaagttcatgtccgtcaacgtgctcgccgtccctctcaaggccgtgcctgtcaaggtgatcaactgagactagggctagttgagctagttgtgttgctcgatctgttatgtgtattggattatatagtttgtgcgtgtgccacgtatagtagctacagtattattcctagttggtttcgtgtaataagctacttaaatcaggactctcacagtcctagatatttgttattccattattcatatagtcaccacagccccataggccataatatacgtctagcatgcatctatgatatgattattttttcgagggcct

SEQ ID NO: 19119 - DNA, 1431 bp, Oryza sativa
  ref <308>: DATABASE ACCESSION NUMBER: AK069495
  ref <309>: DATABASE ENTRY DATE: 2001-12-06
ggtcaaaatcgtgtcgattcatcggccaactccaaaccaaccaaccagcagttgccgccatctctcatctctgtcacgtaacacgagtacgtacacaacacaaaatctgcaaaatattttggttgcctgctcggagaggcgaagaaaatggcgttccgacgaacactagcacgcggcatatgggcggggaagaacgcgaacgccgccgccgcttgtccggcggctgcggctccaaaacctccggcgcggcggccgttgccggcggttgacgactgcccgacgctcgcgtacctgcggcccagaccgggaaccatccggtacaccacggcgtccgttccgcttcccgcccattgcttccccgccctccccgtcggcgaccagctgttcaaccggctccgcctcgacgggctggtcccgcctacgacggccgtgacgcggccaccggaggaggagggggtgggcgtgacggtggaggaggcgaggaaggtggcgcgtgcggcggagatggaggtcgcgcgggcgaggctgaggtccaacgcccagagcgtcgtgtccgggtcggaattcgccgcgctctgcgtcgacattgccggcggcgccgagggaggacgcaggctcgcccgcgcgctcgacgactccggcgtcgtcatcgtcctcggcgacgccgtcttcctccgccccgacatgatagcgaaagcgatcgggagcatgataccggcgacggcacacgcgacgcgagctgcagcaagcgtcgtcgaagtgcggaagaaacgggaggaggaggaggagctgcgggcgatggaggaggagaaggcgggcatcgacgcggcggcggcggcgcaggtgcggcgggagctgtggtgcgggctgggcctcctggcggcgcagacgctggggttcatgcggctcaccttctgggagctctcgtgggacgtcatggagcccgtctgcttctacgtcacgtcgctctacttcatgtccggatacgccttcttcatgcgcacctccacggagccgtccttcgagggcttctaccgcagccgcctcgcgtccaggcagcgacgcctcatgcgggcgcgcagcttcgacgtcgcccggtacgaggcgctgaaggagcaggtgggaggaggagcacggtacggcgtcgcggcgcgcgacgccatcgtgttgaggcagcagcacgtcacgcacgttcattagcagcagcagcagggtgtttttttttttttttggtgtggctaattaggtgtgacgtcgagcgcgtgcgtagttgccagctaggagtagtacagtaatactgtactccacgtagtttgagacgtggacgatccgggactcgggtgagtccatgatgtccagctgtaccagcagccatttattcggtcagaaatctgaaaaattggttgaatcactaagtaaaattttttctcc

SEQ ID NO: 19120 - DNA, 1222 bp, Oryza sativa
  ref <308>: DATABASE ACCESSION NUMBER: AK069496
  ref <309>: DATABASE ENTRY DATE: 2001-12-06
ggggtattcgctattcatctctgaccctgcggcgcaccaaaacccccgtttccgtctcgcgttcttcgatcgcctccgcttaaaaagctcgccgcctccgaccgaatccactccccccccatcaatcccgcaaccctaccgaaaccggtaaaccactggaagaaagcgggttcgatcgatcgatcttgctagtgcggctatatctgctagtaggtgaattggtcgctcgacgttggtgatcatggtggagaagacgaagctgcagctgccgctggtgcacaacgagcggctgtgggcgcggccgtggcggtgggccaagacggtgttcttcctcgtctccatgctcgcctcgctgctgctcgtctgcgcgccgccgctgctcatcgtcgtcctcgacctgctactcccgcccgcgctcctctccaacttccaccgcgccgcgaaccaccccacctcgctcatcgaccaggccaggggcttccacttccggtcatcgctcgtcgacctccccgccgtctccgccgcgcgctccctcctcatcctctgcgcgtacacggcgtgcgggggaggcgcggcctacctgtgggtggccgtggcgtgcagcgtcggctcggtgtgctacgtcgtcgccaaggcggccgtggtgttcggcgcggcgcccgacagggccgtgctggggctgcagggcaagggccagctcgtcgccgtggaggccatgttcctcatgtcgctcgcgctcgccgccgcgcacatcgccatggcctaccgcgccagctgccgcgagcgacgccgcctgctcgtctacagaatcgacgtcgaagctgtaaggctaaagggaggccaaacgcccaagtccctgaagcagcagttcgccgtatgacactcgctgcctggccgttgcagtcggacacaaactgaatgccacggcatggcagggccctgcagggttcgttcctccggtctcaatttttggttcaagtagatgtgtacaacacgaccgttcactgtacctcaagtgaaaaatagtgtaaagaagatgtaaatacgaaacatttgtgcttcggcctcctgcagtcaatgcaaaaataggatgagccgttcggcagatgcatgcttgtcatttttggtgggtttcccatttgtgagctgtgagacggagggggtggtttcgtcgtgtgaatttccacaggtgcgcatcggtgacgatgcacatgattggatc

SEQ ID NO: 19121 - DNA, 3196 bp, Oryza sativa
  ref <308>: DATABASE ACCESSION NUMBER: AK069497
  ref <309>: DATABASE ENTRY DATE: 2001-12-06
gagtccactactctgagtacgagcacgagcacccccacaagctttgtagctctgctctgctcagtaggcaaacagatctcagcaagatggccgaggtgctggcgagtggtgctaccgggttgatcacatcactcctgggcaagctcgccagcctgctcgatgacgagtacaccctgctccgcgaggtgcgcggcgacgtggagttcctccaggccgagctgagcggcatggacgacttgctggtacggcttgtggagatggagaagaatggacacggcaccaagaagtggagggtgaagctgcgcgagctcgcctacgaagtcgaggacggcatcgattccttcacacaccgccttggctctgcccgtgacagggcagggttcgtgcggggtttcatgaagcagctgaatctgatggtgcgccaccaggtcgccaggcagatccaagaactcagggaccaaatcgaagtcgagtgcgcacggcagatgaggtacacccagcttggtggtggtggctcatcatccattgacgccgccgtagctgaccaaatcgactgccgcgtgaaggcgctgtatgtggatccggaccatcagcttgtggggatggatggtccggtggcgagcatcgtcgagctgctgaccatggaagaagacgagtcgtcggcaaggcagctccggatcgtgtccatctttggccctggaggtctaggcaagactactcttgccaatcaggtgcaccgcaaaatcaaaggccaatttgactatgctgctctggtgtctgtgtctcaaaggccaatcagggacattttgaccaagattgctccttcagtcatcccaactgacagcagcagcagtttagatacatgccaactcatcgaaatcgtcaaagattttcttcaagacaagaggtacctcattgtttttgatgatatctggagtacaaaaatgtgggagaatctgatgtcagttctacctagaaacaacaagaaaagcagagtaattactacaactcgcatgtccaatgttgcgagctcacgttctccccggtccaatggtcatatctatgaaatggaatctttaaatgatgctgactccaaagagttattttctaaaatcatttttgaccacaagggtaaatgtccaaaggcattggacgaaatagccgatgaaattttgaaaaagtgtggtggcataccgttggccataattacgttagctagtttgcttgctaaaaaaccaaaaacaaggaaagagtggaagagagtgaaaagttctattggcaatgcatgtgaactagaagggatgagacagacattatcccttagcttttatgacctgtcttatgatcttagaaactgtttcctatcatttagctccttcccagaggattatgaaattgatagagagagattggtactgagatggattgctgaaggattcatttcggggaaagaacaacaggaattaatggaggaagaaggaaacaactactttaatgagctagttaataggagtctgattcagccaattgatattcaatataatggttctgcacgagcttgtcgagtccatgatctgatgcttgagcttatagtgtccctgtcaaaagaagagaattttatcactacattgaatggaccggagtgtctacctatgccgagcaaaattcgatggttatctctccattccaacggaaatgaagtaatgcaggtggtcacaaataatcgtcgccatgttcggtctgtgagtttcttcccgcctgttgcacagttgcctccttttgttgaattccaagctatgcgggtttttgatgtaaaaggctgtcagtttggggagcacaaaaaaatgaaaaacatggaaagtttaattcagttgaagtatctgaatttggcatataccaatgtgacagaacttccaaaagaaattggggaggttcatttcttagagactcttgatgttagaaattgtcaaatacaaagtttaccaccatcattatgccaattgcagaagttggtgcgactttttgtcagccttggagtcacattgccagataagattgggaagatgcaagcattggaggagctatcacatgttgccatcttatgcaactctttgaattttgtgaaggcactaggggagctgaccaaactgagagtgttccgagtagattgccggtattcatggcttaacgggaagaaacaagccccaaggcaatcagtcagcacgcatgaagatgttttgttgtcatctctgcaaaatttgttaaaaaagaagaatcttcgatcactagagatcgaccttacaaatggttcttccttggtgttttcattgatgaatccatactgtcctcttccccaactcgaagaacttgtcatttccaattccatttccagagttccaaggagcatgagatcgctgaaggacgttatccatttggaaatcaagcttgataggatggaagaagaagatctccatatcatcagagacatgtctcattcactgctttttctaaaaatccacttggaaataaccccagaagagaggcttatcattgactccgagggatttgagtgtctgaagcaatttgagttttgctgtgttggaatggggctgaaatttgtgcaaggggctatgccagatctcgagaagcttgatcttgatattggggttcgaaagaccatgtccaagtatggcggtttcgactttggcatcaagaatcttgaagcactcaaacatgttggtgtcaaacttgattgtcaatatgctgaaaatcgggagatccagtctgcagaggctactatcaggagtggagtccttccaagacgtataatgccacaaattcaaaggattggtgtgaacagatgaactttcttccagaaatagttgaatgctactgctttggtatttgcagggaactcattggattcgattctaggccctattgtgaaagtgtgatgagagacaaataacagatgcaacacacatcgttatttatggatgatggttatgcaactctttgttaatcatcatatatgaaaatttagctgcttttaataatgtcatgtcatctaaagtatgctggtgatctttagttcttttgtgatgtagacggatgttatgtaaacaacgtaataatttggctctaccttctcatgaagcagaggccgtgctttttttcactattaaaaaaaattctc

SEQ ID NO: 19122 - DNA, 1764 bp, Oryza sativa
  ref <308>: DATABASE ACCESSION NUMBER: AK069498
  ref <309>: DATABASE ENTRY DATE: 2001-12-06
gaagcgaagagggcgacgtcgaggtcgtcgtcctcgacggcttcgccggccgcgcaaaccgccgaacacatcgccttcgcgcgaccaaggcggcctctcgctgtcgcctcgcctccctccccgacgactccgccgcgtccccgtcaaaaaacagcatccaccgccgccatctccgcaatggtggccgcgtcgccgctggctcctcctcgcgatggccctcccctgcgccttcctctccgccgccgccgccgccaacgccacctccttctcgtcgtcgccggaatccaggcgatgccgttcagtacaccgcgttccctcccgaccaaggcctcccctcgcgccgccggcccgtgtgatgggcaagggtaatagcaagaggaaggcggcgaacacccggctgtggatgcggctggatcggcggggcgggtgcgagatgatcctgtgcgataagtccttcgtcgcccgccgctccggcttgccggcgcgcgacctccgcgtcctcagccccctcctctcccgctcccccagcatcctcgcgagggagaaggctatggtaatcaatctggaatttgttagagcaatcgtaactgctgatgaggtgctggtgctggaacctcttgctcaagaggttctccctttcgttgagaaattaaggaagtatttcccactgaaaagtctggatgttgatgatgtctctacccatatgcatacggaaaaccaagatggcgaacttgctcaagatgtttcctgttatgaggtagaaggggccaaccatgagcttccatttgagtttcaggttttggatttcgccctagaagcagtgtgcttgtcgtacaactccaccatatctgaccttaacaggagtgccattgctgtgctggatgatctgatgaagagtgtcagcactaggaatcttgagcgcgtctggagcctgaaaagcagcctcactcgcttgcttgcaagtgtgcagaaggtcagagatgaagtagagcatattttggatgataatgaagctatggcacatctgtgtacagcaaggaaaacaaaaggacagaaggatttattgaacaccattttatttccagaaacaagactctgtagaacacactctagtattgagaacagtactggcattcgtacatgtgttccttcggatagcgatgctcatatcttagatatgttattggaagcctatttcaagcagcttgatgggattcgcaacagaattttcttggttcggcagtatattgttgacacagaagattatatcagcatccaacttgacaacaaacggaatgaactcctagggctccagcttaccctgatcatcgcatcctttggcatagccatcaacaccttcatagctgcggcttttgcgatgaacatccctcaccgtgggtatcatttcgttattggagtaccctttggacaatttgttggagccacctcatttttatgcatgtcgattgtcatactgttgttcacatatgcctggaggaacaggttgctctgcacttgagctagcacaacctcagagtaatcaacaagagcctcacctctcacctgtgacactgattagtattcttcttcaggatgccttagaattcctgttctatttgtgcttcagaagttcagaatacctcaccaactgcttctcaatgtggaaacgtgcaatccatgagttatatatatttcctaatttccgacaatgtaaaacaagttgcacttactcttatttcatgtgaaggggaatcattgttattt

SEQ ID NO: 19123 - DNA, 877 bp, Oryza sativa
  ref <308>: DATABASE ACCESSION NUMBER: AK069499
  ref <309>: DATABASE ENTRY DATE: 2001-12-06
cctcccaaccacaatctccctccttcacttggtttcttgttgtgcaactctcgtcgtctcgttcatccccgggctggcatcgcaggagctggcgtctcgacaggatcagcagccgcagcagctgctgctgcaccaacaacaacgacaagaagaagaagaagacttggagtcggagcagcagcggaaccagtggttggtgatccggctgtacgaggccatcaacgcccgagaccacaccgccgcgcacgccctcctcgccccggacctcgagtggtggtaccatggcccacccgccagccaccacatgatgcgcctcctcaccggctgcgcctcgccctcctcttcctccttccgcttccgcccgctctccgtccacgccctcccggcctccgacgtcgtcatcgccgagggcatcaccggccgctaccacgacagctactgggtgcacgcttggaccgtgggacccggccccaatggggatagggtcatcacccacctccgcgagtacctcaacaccgatctcaccgtcacccgcctcccgcccacccgctgcctctggcagagccgccgccccgacctcccggccctcctcctcgccctctaattcatcatcttattgtgattaccatcaatcagcttcaaccaatcccctccattctgctgttccaatacgtcgatcacacctagtacgcgtaattacagtattatttgcaattagtatataataagaaatgtggcctcctttacttcacttttactgcgtctgcgtcttcgtcagcggtgacgctctcgccgcttccgcagctactactgttcaaataatgtctcttgtatggttgaacaataataaagcagctttgcattctcatcttactgt

SEQ ID NO: 19124 - DNA, 1286 bp, Oryza sativa
  ref <308>: DATABASE ACCESSION NUMBER: AK069500
  ref <309>: DATABASE ENTRY DATE: 2001-12-06
gacctgttgttttcctcactcccttgacccgtcgtcccatgctaaagccaaagcttaggcagcagcagtaggcttaagcttggttggtcaagggcgagtggccatggaggccatggacgtcaagtacaagccgctcgtgttccccaacggcgccatcaagaaggcggcgaagccggcggcggtggcgcctgcggtgggcggcggcggagggggagagacggtgtaccgggagtgcctcaagaaccacgcggcgagcctgggcgggcacgcgctggacgggtgcggggagttcatgccgtcgccggcggcgaaccccgccgacccgacgtcgctcaggtgcgccgcgtgcggctgccaccgcaacttccaccgccgcacatgctgctgtcgctggggtcgagcgggcaggcgcagaggctcccgccgcaggtgatgtcgccggcggcggcggccgcgcctccccccggcggcgggcggcggcgggatgccgaggaagcggttccgcaccaagttcaccgccgagcagaagcagcggatgcaggagctctcggagcggctcgggtggcgcctccagaagcgcgacgaggccatcgtcgacgagtggtgccgcgacatcggcgtcggcaagggcgtcttcaaggtctggatgcacaacaacaagcacaactacctcggcggccacagcgcccgccgcagcgcctcctcctcctccgccgccgccgccgccgccccgccattcaaccctcccacctcacctcctcctcctcctcctcctcctccacacgccaccgacttcaacatcaacggaacagccaccgccgccaccgccgccgccgccgccaccatcgccgccggcaaccaccaagagaacggagcatcgtcgccgcaatcagcataaaaactagagagaaaaagagacagcaagtagccttcagtgatcattccattttcctttttttttgcttcttagatcgctcatccaagaaattaaccccaagaaaggacgccgcggctgcagatcagttcttgatgcctagttacagcaaaagaaaaaaaaagaggagaaagaagtccaatctttccttatccctgtatgttcttgggatccgatgatgatggagaattagggattttaattagattatctcatctcaaaagtggcacctctcttggctgttcttgtcctccctttgaagcagaggtaggaggagagggttcttccttctagaattctaggatctctcttctctttgagaaaaaatgtatacaaaaatggaagcagcctc

SEQ ID NO: 19125 - DNA, 1777 bp, Oryza sativa
  ref <308>: DATABASE ACCESSION NUMBER: AK069501
  ref <309>: DATABASE ENTRY DATE: 2001-12-06
gtagggtgctctctctctctccaaaattccaaggcgctgcagcagcagacagaggtttgagagagagagaagaaaaaaaaaacggacaccgaaactgtccgagacgcgacaccaaccggcttttctctctccccttccaccgccaccgccaaccccttctagaatcttctggaatccagtcggtggcggagggcggaggcttctggaaggcagcgcggggatctcggcggcgccggaggcgtccatggcgaggccgtgaagccctcgctcgcccggaggccacgcgacgcgcgggttaggaggaggaggagggatccgggtgggtggggtgggggggacgagatcccgcgagatgcagatccgagaggggggcccgcggcgcggggcggcgtcggcggcgaggtcgccgatgtccgccatgatgctcgccatgttcgccaccatggcctccttctacgtcgccggccgtctgtggcaggatgcgcagagtagggtttacctgattaaagagctcgacaggcgaaccggccagggccattcgacgatatcggtggatgataccttgaaggttgtcgcatgcaggcagcaaggaaagaggctggcctcacttgagatggagctggctgcagcaaagcatgaaggtttcgtggggaaatatacctatgagacaaatggaactaactctagaaagaggccactggttgttattggaataatgacaagctttgggaggaaaaactaccgtgatgctgtcaggaagtcatggcttccgacaggttcaatgctgaagaaactagaagaagaaaaaggcattgtagtgcgcttcatagttggaagaagtgtgaaccgaggagatgcttcagacagggagattgatgaagaaaatagaagtacaaaagatttcatgatcttggatgatcatacagagtctgaagaggagagtcctaaaaagacaaaaagtttctttgctaatgctgcagagtcatttgatgctgaattctatgctaaggtcaatgatgatatatacataaatgttgacactttgagtgcaatgctcaaagaacactgggacaagcctcgtgtctacattggctgtatgaaatccggcgaggtcttctctgaatcaactcataagtggtatgaaccagaatggtggaaatttggtgatgggaaaacgtacttccgccatgcttctggtgaaatgtttgtcatctcaaaggctgtagctcaattcatctctataaacaggtctgttctccggacatatgcacatgatgatgttagtgtaggatcatggttaattggtcttgctgtgaagcatgtaaatgaagcaaaactatgttgttcatcctggccctcaggagctttgtgttcagctctgtgacaagcaacactttcgaggggaagaattttgtgaaaattatgttaggatcgagattatacggaatgaagcataccatctgcagacaatgagatcaaaactggcgttttgaagattttgttttcttctgccgttttctgtggctcccgttgatcaagcagcactagttcaaactgagccatatatatcttctttttgcgaaggaaaatcttgtactttttttcctgcaagaccacactgctaaaatcagggatcctaactaaattccatctgcagattgtatcttgattttgcctgtcgcttgtagatgtccacccttaccattcttttactgatagacaccattgttggagtgacaaaatctaatagcaaatcaggaaattattttactccatc

SEQ ID NO: 19126 - DNA, 1306 bp, Oryza sativa
  ref <308>: DATABASE ACCESSION NUMBER: AK069502
  ref <309>: DATABASE ENTRY DATE: 2001-12-06
gggcctagcccggccaatttccatcgcagccatttttacccctagccccctccgcttcctcctttttacatccaaacccctcttccactcccctcgccgccgccgcctccgccgtcggggaggatgggaggggcgcacttccccggtgagggcgaggtggtggccggggagggcgacgccgtcgtccccctccgcgacgtgggcaagatggagcacgggtgcgagcattacaggaggagatgcaagatcgtggcgccctgctgcggcgaggtgttcgcttgccgccattgccacaacgatgccacggcttcaggtgatcggcataccatttgccgccaggatgttgaaaaagtagtatgtctactctgtgatactgaacagccggtgtcacaagtgtgcataaactgtggtggcaatatgggagagtacttttgtgatgtatgcaagttttatgatgatgatacagagaaagggcagtttcattgctacgattgtggcatatgcagggttggtggcaaggaaaactacttccactgcgcaaagtgcgggtcttgttatgctgttgctctgcgtgataaccatcagtgtgtggagaactcaatgaggcagaattgcccaatttgttatgagtatctatttgattcattaaaaggaacacgagttctcgactgtggacacacgatgcacatggaatgcttttctgagatggtggaacataacaaatacacttgtccaatatgctccaagacagctcttgatatgacacatcactgggcattgttagatcaagagattgaagcaacaatcatgcctcccgtctaccgttacaaggtttgggtgctctgtaatgactgcaacaaggtctcagaagtggacttccatgtgattggccacaagtgcagccactgcaactcgtacaatactcgatcgacatcacggcctgcggatttatcaggaagcagttctccctcgacgtcagattcgtccgaaaacaatccgtagataacatgccatgttggtgcccaacaagatctacagtttagacaatcaagtcccagattcatacatatacaagtagtagaaggaacattgttttgcggctagcctatccaagtgcctacccaattcttcaagattcaattgattccttgaatcttcatgtgttggaactgctactagacaaaagctattgtgatgataccatatgttgtgttgaatctttaatcacagccatggctgttatcagtgtgggtaaaagtgaaacccatcatgttatccaggagctgaatgttgatgattgcaatcc

SEQ ID NO: 19127 - DNA, 1398 bp, Oryza sativa
  ref <308>: DATABASE ACCESSION NUMBER: AK069503
  ref <309>: DATABASE ENTRY DATE: 2001-12-06
gactcactctcacacacactctcatcttcttcatcgcaagctagtaagagtgaatcgaagatgatgaagaagctggtgaggttgctgatcatggtggaggtggtggccatggcggcggcgccgcggcgagcggcggcgctgagcatggactactacgggatgagctgcccgttcgcggagatggtggtgaggagcgtggtgagccaggcgctgatgggcgacccgtcgctcgccgccagcctcctccgcctccacttccatgactgcttcgtccagggctgcgacgcctccgtcctcctcgactccaccccggacaacaccgccgagaaggacgcgctcgccaacaagagcctccgcggcttcgaggtcatcgaccgcatcaaggacgccctcgagtcgcggtgccccggcgtcgtctcctgcgccgacgtcctcgccctcgccgcgcgcgacgccgtcatcatggcggggggcccgtactacggcgtggcgacggggaggagggacgggacgcggtctagcgcggccgacacggtggcgctgccgccgccgttcttgaacgcgacggcgctgatccagctgttcgggacgcacgggttcaccgcgcaggacatggtggcgctgtcgggggggcacacgctggggcgggcgcactgcgccgacttcaagaaccgggtggcgacggaggcggcgacgctggacgcggcgctggcgtcgtcgctgggcagcacgtgcgccgccggcggggacgccgcgacggcgacgttcgaccggacgagcaacgtgttcgacggggtctacttccgcgagctgcagcagcggcggggcctgctgacctccgaccagacgctgttcgagtcgccggagacgaagcggctggtgaacatgttcgccatgaaccaggcatacttcttctacgcgttccagcaggggatgctcaagatggggcagctcgacctcaaggagggcgacgccggcgaggtcaggacatcttgcagggtcgtcaactgacactccttgatcataccaacaatctatatgtcctgaattgcccgccttagctctttagcttaagcttttgagtttaactggttggtgcatgcaactcaataataacataccgtatactcgacgtctttcgtggccgcgtctttgtgaacttaaaattgcagctagctagtttgccggaaatgctacagtacccaaggtatacaagtagtgtcagtttgtattgtggcatggaggccatgtatgatagtagtaagtatagtaagcttgccagaaatgctacagttagcagctggtataattgtggtactgtataggaaagattgtaaaacaatcatgcatgtcactagtttagatatgtatgcatgtacaataatattgtgatgctcc

SEQ ID NO: 19128 - DNA, 2785 bp, Oryza sativa
  ref <308>: DATABASE ACCESSION NUMBER: AK069504
  ref <309>: DATABASE ENTRY DATE: 2001-12-06
ggccaaccacaccacatctcaaactctctacacacgtttccatgtagagatcgatcgatcgatttctttgggattcttgagctcatccatccatggcgccctccttctccatccgggagtacgcggcgagcatgaggggcacggcggcgtcccggcacccggccctctccgccgccggcgacttcccgccgatgccaatccggaggttccggtggtgggtcgacgagctacacgccgcggtgagtcgtcgtcgtcgtcgtcgtagctcgccggcggcggcggcggcggtggccaggaagaacagcaagcggtccgtctccgacctcttcgccgccaccggtgaagcgccggccatggatagccggcggcggaagaagccgaggtcccaagaagacgacgatggtgtcgagaagatgaagaagaaggggatcttcatctcctccacaccaaatgctccaaaggtttcagtaaacaagttacatcctccttctccccagacatttcaggtacatgaaagacaaaaacacatcaacatcgagaatatgaagatgtatgattttgaaatatggaagccagagaactctgctaaggtcccgaagaacagcattctgagaaagcatacaaagcgctcctctttcactgtcagcatcaacaaggagaaatgcagcaatctgaaagggtcagaagccatagagctaagccacaagttggggaagcatgttacattctcaggggtggatgacatacatattagaaacaagctaagttccacgttaccccaactgcaaaaccactgcaatgtgtactcagacaagtctaatgaagctgacagattagtatctgcaaaaattagttctcatgagaacaaggaagcctcaggtagggatatatacgacagatggacttctgaatcaagtggtgcaaaggacccaattaacttgattgatctgaatcgcacgctcccatgtattcccgattttaatggcgcattcatttctggttcagaggtgcctgatcttgagcatacggagaatgcaacttctgatctccaaatacctggtgatgtaagagaagaagctgttcttaagcacaatcaagacctccattccaaatcaccgcgatcgcagtgtgaacttaacagttgtgatcttgggagaatcattaacttaagatcaatagcctcactgttgcctgatgaagcaattaacatttctgacagaggaatgattggtcatccattgaactcaacagaagttaataagttttatgctgattatgagagaagttcagtaagagatgatactatggaaggaaaggctccttacatattgcctcagcatacagttcagtacacaagtcagtttacggagaattggtacaccaatatgaatttgggcaactttcatcatgctggaagagaattttcttcttgtccatgtgaaaaccagctgaattctgagaaacccatgttacattctgaaatcaatgtgcaacatgagcatgcagttatgtcacaacgtaccatgcgtctgatgggaaaagatcttacagtttccacaacaggtggcaaatgcattggtgagacagcaaaggtgcatgtgaactcctctgtcagctgccatcatactactaatattttcttagagttgccacgacaaggtcacccgtttctgtcactgcaatcccgaagtttttccaatatacaggtagatgccccaagcacaagccatgattatgttggatacaaaatgcataatttaaagcgtcgttttccggaagctgatgttttctctgggaatggaatcgaatgcgaagataggttgagggacttttcatatttgcactgtggccaaaatgcgcttgctggattttcacctcaaggaggaaaatacaacacaagatctgatcaaaactcactgtctgctacaacattcttgcctaccttcataccacatgccaagcagtcagcagtttaccgtgccaattcaacttggaaacataatccctatcctgcaaacttactagttcatcctcctgatggtacaaattttagaaaggatcaaaaccagataatcagaggagttgcagagatcccaagttctgtaaacaccatgtcaagagatactgtttggaagacgagaaaaatagacgtcgacaattctaacatttcttctggtgtcaggtatatttcaaggtctggtccggtgaagctccgccccggggcgaagcatgttttggagccgagacaagacacagatgatggcaattatccacctatgtattcatgtgtaccgtttttcgttataagaaggggtggaaatattttgtctggtcagactaaaagtcatagaaaggtctaatttgtagcccatcagatgaatcattcggattatattttgtcccaatcaatggttatggctcaaacttttctcaagttgatgaacagtgtgcagctagttctggtcttctttaacccatagtttgctgtactagagccctgtgaaaagaggactcaattgatttgggaggttcttacttttgcgtcgacgcatcaagcattacatccatcaagtttacttcaacagaatcctggtggcaagttaccatttccataattttgcagcttgcctgatgccctgatgaccctgcacctgctatcctctgtgcctctctggctatatcctcctctgaactggaggtttttgtgttgaattatttaggttcagagatttagaaacatttatggattgggatagctttggcataatacaatttttgtgtagtc

SEQ ID NO: 19129 - DNA, 1821 bp, Oryza sativa
  ref <308>: DATABASE ACCESSION NUMBER: AK069505
  ref <309>: DATABASE ENTRY DATE: 2001-12-06
ggtgccgcgtgcgtgactgccagcagcagcagcaagcggaggagaggagagacgcgccgccgccgccgccgcctgcgaagcaaagcggcgagcgagaagccaacggcgcatcaaagtgaggatatggagaggggcgccgccgccgcaggagcgctctcatgcaccttccgctccccttccccttccccgacgtccccggccgcgccccattggcggcctctcctcggcttccgctcccgctcccgctcgcgtggccggggctggggccagcgcgcggtggtcgccggggcaccgcggttattcctgccgccaccatgccggcgcttcagatactgcagtcaaagcaagcttctaggcacgaacaaagggcaaaacagatgctcgttggcaactttcagctcatttggacagtcagggatcagtctgaacaatgaagatttagtgaaagataagctcctaatagattgtggggaagatcaagattgtgtgattgatgggatagttgccttgggaaagtttgatgcccttcacattggccatcgagaattggcaatgtatgcttctaaggcaggaactccctttcttctttcttttgtgggaattgctgaggttcttggctgggagtataggcctcctatagttgctcagtgtgatcggaagcgagtgctcacctcttgggctccatactgtaagaatgtagtgcctattgaatatcaagttgagttttcaaaggtcaggtacctaactccgcggcaattcgttgagaggttatcaagggatcttaaaatacaaggtgctgtagcaggtgaaaactacagatttggctacagggcatctggcgatgcagctgagctagtgaaactatgtgaagaatttggtttaagtgcatttattgtacggtcagtcatggacacagctagatcttataatggagttacaacctccgtaaattcaagcgacaaggggcaggtttcttctagtcgtgttcgccatgctttggctatgggtgatatggaatatgtttctgaattactagggaggaaacaccgccttgtgctgacagttaaggaaaaccaccttcaggaaaggaaaaggatcatgctgccaaaatcttgcatgttgaacatgccaccagctgatggtttgtatgagaattgtgaccttcttaatggaggccatcttggactatgcagggtgatcataaactcagagaccattgtaattgagatgaaagatgagaacagtttattaccaaatactattcaagaaaatcagcaattaggtattgaatttggatgatatggtacagctcaattcatgattggtgacatggcaggtcatattttgtactatatcttcattatatctggcaccttgcggattagtttgtgttgatgctaaatagtgctgattttatctggaggggatatagagcaagaaagaaaaaaactgagaactttgtattcaagggtgtatacctcatcgtgatcaagccaaagagcatcttatagatgaacagagattttgtgcaaatttgcatttcatgcaacgagaagacatggtagtcagagaggacattgtcctttttctccctgggaattggcaacgatagaactgactagcttctagctagctgtatcagcaaagctgaagcacaaggaaacatacaagggaactcatttcccaaatcccacctagtacgtttttccagcttatgaaattgtgatttgtacaaataggtttcatttacacagcaacttcccattgttagatagcagcttgttccatcaacagttaatgaaatatgttgcttgatcttcg

SEQ ID NO: 19130 - DNA, 1811 bp, Oryza sativa
  ref <308>: DATABASE ACCESSION NUMBER: AK069506
  ref <309>: DATABASE ENTRY DATE: 2001-12-06
gcccatcactcgattcgcgctctagctctagcttttctctcttctttcttgggctggctatctatagcttgctcgctgtcgatcatggcgagccgctctggtgatcggaggctggccgtggttgcgttcgcggcggcggtgttgctgtcggcggcggaggggctcggggtgaactggggcacgatggcgtcgcacccgctgccgccgagggcggtggtgcggatgctgcaggacaatgggatcagcaaggtgaagctgttcgacgccgacgccgggacgatggaggcgctcgccggcagcggcgtcgaggtgatggtggccatcccaaacaacctgctcgacctgctgacggactacgacgcggccagggactgggtgcacgagaacgtcagccgttacagcttcgacggcggcgtcaatatcaaatatgttgccgtcgggaacgagccattcctgtcgtctttgaatggcacgttcctgaacgtgaccttccctgctctgcagaacatccagcgagccctctacgacgccggccacggcgacaccatcaaggccaccgtgccgctgaacgccgacgtgtacaactcgccggagaacatgcaggtgccgtcggcggggaggttccggccggacatcgccgggctgatgacggagatcgtgcagttcctgaaccagagcggcgcgcccttcaccgtcaacatctaccccttcctgagcctgtacggcaacgacaacttcccgctcgactacgccttcttcgacggcacgaccagccccgtcgtcgacaccaacggcatccagtacaccaacgtgttcgacgccaacttcgacacgctcgtgtcggcgctggtcgccgccggcgtcgggggcctccccgtcgtcgtcggcgaggtcgggtggccaaccgacggcgacaagcacgccagggcggacctcgcgcagcggttctacgccgggctgctccggaagctggcgtccaacgccgggacgccgctgcggccgaaccagtacgtggaggtgtacctgttcagcctcgtcgacgaggacgccaagagcgtggcgccgggcaacttcgagcgccactggggcatcctccggtacgacggccagcccaagtactccatggacctcgcagggcagggtcgggacacggcgctcgtggcggcgcgcggcgtcgcctacctcccgcgcgcgtggtgcgtgctcaacccgagcgccacgccggacgccatgagcagggtcggcgacaacgtcaactacgcctgcacgtacgccgactgcacctcgctgggctacggctcgacgtgcaacggcatggacgccgccggcaacgcctcctacgccttcaacgcctacttccaggtgcagaaccaggtggaggagtcgtgcggtttccagggcctcgccgtgcagacgcagcaggacccgtccacgaacgcctgcaacttcaccatacagatcgagccgtctgcggccgccggccgacggccggcggcggtggccgtgacggtggcgacggccatgctgatctcggttctcgccgccatggtcacgacgccctgattggcgtgaggacatagttacatttgtagaggttttctgcttgattttgtagatactttggtgttgcctatacagcgattgatcgatacacgctcgtttggtcgtttcgatgtctaactgggtggctgaaatttcggcccatgaagtagatgggcttgtaagttggaaacaaattacggcccatttatatatggatatgggccggtttctgtgacggcccgcgtagcttcggaggaagcgaccacctt

SEQ ID NO: 19131 - DNA, 1212 bp, Oryza sativa
  ref <308>: DATABASE ACCESSION NUMBER: AK069507
  ref <309>: DATABASE ENTRY DATE: 2001-12-06
gtcatcgtgcccaccaccaaaacgagccgccgcgaccgccatccgcctccccacatggggctcgctgcaggtgctcctcctccgtgcaccgcatccacaacacacccccccccttccccgcccccagcgcaacgccgcctccccgcacctccgcgggcccggcctcagcgacgccgccacactcgctccgcgccagcgctggcgaggaagcgaggcagccgcggtgctgggctgcctccgccgacggaaaccacggggcacgcacgggacggcggtggcgggaccaaacccccctccccccggggacacgccccgtctcggcgagcgtacgtgtcggcgcgaggaggcagactggcgcgtgggcaggccacgcggcgacgcggctcgtggcctcatctccggcgccaccgcggccagatctggcggtcaaaggagacggcgcgacagaagaggataaccgcgataggcgcgggcgacggagcggcggaggccgacaggtgcggcaccatcgtggccttcatcgttcgccttcccccagacaccgccctccccctttgttctcccaccaccccgcccgccggcaacggcgcttgcggttgcggcagatccggccgggcacgggcgtcgtgccaccaccgtccgtctgcgcgaaggaaggattgggagggaaggcaggcagccgaaggaaggattgggagggaaggcagggatgagaaagtggtggtgatgccgccgctgccgcaccggcatggagcacagcacggcggccgcgtcaatgccgtcggacggccgcgtcaatgccgtcggacgccgctcccctcttctttgcgtcgccgtcgccgttgccggtgggttcttcgcgtagccgtcgccgtcgccgttgctggtgggagaagagggggcggggcatccgccgccgtgcgccgccggtggaaggtgaggagagggtggagtagtcgtcgccgtgcgccgccgtgggagaggacacagaggagggcgcggggagtcggcgccgtgggaggaggacggagagaaggacgaaggagcggtggaagtagcgatttttctggttttttatggtgggacctaccgcaaaaaaaatgatggtagaccccatctgattttttttatgtacgacggtagaacgatccaccggctcggttgaccggctgtcccggttttctaaggttgtactcgttgtttcatttttct

SEQ ID NO: 19132 - DNA, 1819 bp, Oryza sativa
  ref <308>: DATABASE ACCESSION NUMBER: AK069508
  ref <309>: DATABASE ENTRY DATE: 2001-12-06
gccccttgcacactcattctctagagaagggagagagaagagtgtagtagtagctagctaggagaaagagagagatagagagagaaacaatggacaggagagcagtagtgtatgatgctgaagcagttgatgatcatgagagacaagggacggtgtggacggcgacgtcgcacatcgtggcggcggtggtcggctccggcgtgctggcgctggcgtggacggtggcgcagctggggtgggtggtggggcccctcgtcctcgttggcttctcatgtgtcacttactacacatctaccctcctcgccaattgctaccgctaccccgaccccgtcaccggcaccgccaaccgcgagtacatcgacgccgttcgctgctacctcgggccgaagaacgtgatgttgtgtgggtgtgcgcggtatgtcaacctgtggggtacacttgtcgggtacaccatcacagcgagtgcaagcatgatagcggtgaagcgggtgaactgcttccaccgggaagggtacggcgccggcgactgcggcgcgtcggggagcacgtacatggtggtgttcggcgtcttccagctcctcctctcccagctcccctccctccacaacatcgcctggctctccgtcgtcgccgtcgccacctccttcggctactccttcatcagcctcggcctctgcgccgccaagtgggcctcccacggcggcgccgtccgcggcaccctcgccggcgccgacctcgacttcccccgcgacaaggccttcaacgtcctcctcgccctcggcaacatcgccttctcctacaccttcgccgacgtcctcatcgagatccaggacacgctccgctcgccgccggcggagaacaagaccatgaagagggcctccttctacggcctctccatgaccaccgtcttctacctcctcctcggctgcaccggctacgccgccttcggcaacgacgcccccggcaacatcctcaccggcttcgccttctacgagcccttctggctcgtcgacatcgccaacatctgcgtcatcgtccacctcatcggcgcctaccaagtgttcgcgcagccgatcttcgcgaggctggagagctacgtggcgtgccagtggccggacgccaagttcatcaacgcgacctactacgtgagggtgccggggaggtggtggccggcggcgacggtggcggtggcgccgctgaagctggtgctgcggacgatcatcatcatgttcaccacgctggtggcgatgctcctccccttcttcaacgccgtgctgggcctcatcggggcgctcggcttctggccgctctccgtctacttcccggtgagcatgcacgtcgcccgcctcggcatccgccgcggcgagccgcggtggtggtcgctgcaggccatgagcttcgtctgcctcctcatctccatcgccgccagcatcggctccgtccaggacatcgtccacaacctcaaggctgctgcacccttcaagactgtcaactgatcgatgatcattaatttgatcgcttattaagtggttaaattattcagttaattaatgatcgatgatctagttgttagctcagcaacaagcaccatcagccatcagggagctgcctagctagagctgtggcctcattttgtttctaatttctttctctctgttttttttttggtgaatgattgatcgatctcaatgtactgaggttggttaatttttcttgctgctggttaatttgggcttaattttgatcttggagtaactagaaaacatgtaattcatcgtgttgaggatgagcaatgcaagaaagaaaataattattcgcc

SEQ ID NO: 19133 - DNA, 3059 bp, Oryza sativa
  misc_feature (567)..(567): "n"=any one base of a, t, c, or g
  ref <308>: DATABASE ACCESSION NUMBER: AK069509
  ref <309>: DATABASE ENTRY DATE: 2001-12-06
ggccggcctcgcctcggcctctgccttcctcatctctccccctctctctctctctctctctccctcctcctcctcaccccgacccctccccgccgattcctccctcctccacgcgcgcgcggcgcggcgcagcgagcgctctccgattcttccggctccgagggattagggttccgggggggcacgcgtccgctgacatggcctccgcctccgccgccgccgaaaccctcgcggcggcgtcgctccccgtcgcgtcgccttcgcggtcgctgctgcggccgctccccaggagagcgtccgcgggaggcggctgctccgcgtccgtacgaatctccgccgtgccgccgcgggggctcgggttcgcggtcgtccagcgccgcgtcctccgccgcccgccggcggcgcgcgccaacgtcgagcgcgaaggggacggggccgaagcgtccgggccaggagaggcgtcgtcctcctcctctggagatggggaccgcgacggggcggcggcggcggcggaggcaggaggtgatggcgccagcacgagcaccacgagccgcggcgcgacgcctncgcagcccgcctcatcgaagaggggggaggacaaggggcggcggaagctgattaagggcggaggcgttgggcggtggctgtgggagcccatagttcaggggagggaaatggggttcctcctgctccagcttgggttcgccatattcgcgctccgaatgctgcggcccgagatcgcgctgcctggctcagagccccggccacagacaacgtacgtcagcgtcccatacagcgacttcctggcgagcatagacaagaaccaggtgaagaaggtcgaggtggacggggtgcacatcatgttcaggctccgtcctgaggttgaggcccgtgcaatggagcagccacaggtgcagcgtggaacagattctgttgctgataatgctggagttccaaggcgaattgtcttcacaacaacacgtccagtggacattaagacaccatatgaaaaaatggtggagaatagtgttgagtttgggtcgccggacaaaaggtctggtggcttgctcaattcggctttggtggctcttatttatgttgtattaattgctgtagttctgcagcgattgccaataagcttttctcagcattcagcaggccagctgaggaatcggaagaattcaaactctggtggggccaaagtttcagaaagtaccgatatagttacatttgctgatgtggctggagtagatgaggccaaagaagagctggaagagattgtggagttcctaaggaacccagaaagatatattcgtcttggtgcgcgacctccacgaggtgtcttgttggtgggccttccaggaactggaaagacgcttcttgcaaaagctgtcgcaggggaagctgaagtcccattcataagttgctctgcaagtgaatttgtggagttgtatgtaggcatgggagcagctcgagtgcgtgacctatttgctagagctaaaaaggaatctccttcgattatttttattgatgagattgatgctgtggcaaaaagccatgatggccgttatcgtatcgtcagtaatgatgagcgagagcagacactaaatcaattactcacggaaatggatggatttgacaccaactcagctgtcattgtacttggagcaacaaaccgagcagatgttttagatcctgccctccgacgccctgggagatttgaccgtgtagttatggttgaagctcccgacagatttggaagagaatctattctgaaagttcatgtgagcagaaaggagcttccgcttggtaaagatgtagatcttagtgacattgctgcaatgacaactggttttactggggcagaccttgcaaatttagtaaatgaagctgctttgttggctgggagatcaaataaagaaatagtggaaaaaattgacttcatctgtgcagtggagcgctctattgctggcattgagaaaaagcatgcaaagctgatgggtaatgaaaaggctgttgttgcacggcatgaagttggtcatgccgttgtgggaactgctgtagcaaacctattgccagggcagccacgtgtggagaaattgagtatattgccaaggtcaggtggtgcattggctttacatacacccctcccacaacagaagatagatatttgctctttgttgatgaactgcgtggacgtctagtaacacttttgggtggaagggcagcagaggaagtagtactgtcagggcgtgtttctactggagcacttgatgacataaggcgtgccactgacatggcatacaaggctgtagcagagtatggtcttaatcagcgcataggtccgatatcggtggcaacattgtcaaatggtgggctagatgaatccggaggctctccatggggaagggatcagggccatctagttgaccttgtccagcgggaagtaaaagcccttcttcaatcagcccttgatgtcgctctttcagttgtccgtgctaatcctacagttttggaaggccttggagcatatttagaagagaatgaaaaggttgagggcgaggagcttcaagagtggctcaagtcggttgttgcaccaaaagaattgacctcatttataagaggaaagcaagagcaggttcttcagctggaagcaggctcctagcactatacattggtctcgtagaatcaattaattaatttaacacaagtagctccaacagtttaaactgtacaagttctgaggtacgcaactcacgcccaagccaagacccttgtgatgctgtatatatctatgtgccgctccacgacccttgactacaggtctaccaggaatgattcatagcgagttgtaaaccccggagtattgtaagttccttcggtttcctcgtttgccgttggatgttgtttatagattaggcgggtggtacacatgtaaaagaatattcgtttttcttctgtgttctttctctttctgttcatcctgcggaaggaattttttgttacattgtcatcttggcaaatattaataggaataattcatatacgtcgttgatcct

SEQ ID NO: 19134 - DNA, 881 bp, Oryza sativa
  ref <308>: DATABASE ACCESSION NUMBER: AK069510
  ref <309>: DATABASE ENTRY DATE: 2001-12-06
tttgcatatttggttgggagaatctccctcgaactcttctcatgtacttcacaaacgtaatgctacctcaggaagggtatttccactcagttgtatgcaactcagacttccgtaactccacagttaacagcgacatgcggtatatggaatgggatgatccaccccagatggaaccccattttctgaacacgacacattatgatgagatagtggagagcggagtgccttttgctagaaagtttcgggagaatgaaccgctgctggacaagattgatgaaagagtactccaccgttggcgtcacagacctgttcctggtgcctggtgcacaggcagaaaaaggtggttcaatgatccatgctcccaatggagcaatgtcaacattgtaggacctggtccccaggctgagaagttccgcaaacatatgaatcagatcatagaggaatctgcatcaggcaacaactcatgcaagcaatagcagcaatgaagcgcgagatttcacttcccatgtttgaagcgatgagcttttctcattttgcatagaggggctcttcacgaacttcagcagttaacgcttccagagcgaacatttttgcacctgggttacaagcacacgtccaaaggtgagatgggtttattctttccagattttttggtaactgtcatggcttcaagggcctcactgcatagcgcatactagcttagttggaagtcagagtgctgatggtcggagcaccaaagctaataggcagtgtaattattagtgatcagttgaatgacttgtgcgactgtttatagaactgatggaattctgggtgctcccatacaggattgagaaaaatgaagagtgggtgatggtggttggattcttactgttgtggtt

SEQ ID NO: 19135 - DNA, 1030 bp, Oryza sativa
  ref <308>: DATABASE ACCESSION NUMBER: AK069511
  ref <309>: DATABASE ENTRY DATE: 2001-12-06
ggttcgcctcctccctcgtcgagacctcgaagctgtgaaaagaccagaatacccctcatccccaaaagccccaaacccgaggaggcgagaggaggaggaggaggagctcgtcggcggcgagcgatggcggcggcggtggcggagctgtgggagacgctgaagcaggcgatcgtggcgtacacggggctgtcgccggcggcgttcttcaccgccgtggcggcggcggcggcgctgtaccacgtcgtgtcggggatcttcgcggggccgcccccgccgccgccgccgcggccgagggacgagcccgaggcggagccgctcccgccgcccgtgcagctcggggaggtctccgaggaggagctccgccagtacgacgggtccgatcccaagaagcccctcctcatggccatcaagggccagatctatgacgtcacgcagagcaggatgttctatggacctggtggaccttatgcgctattcgctggcaaagatgccagcagagcactcgctaagatgtccttcgagccccaggatttgaccggtgacatctctggtcttggcccatttgaactcgacgcattgcaggactgggagtacaagtttatgggcaagtacgtgaaggtcggtaccgtcaagaagaccgtccctgttgaagatggtgccccaagcacttcaccagaaacaactgaaaccgccgctgccgctgagccagagaaggcgccagcaaccgaagagaagccgagggaggtaagctcggaggaagtaaaagaaaaggaggatgctgttgccgctgctgcacctgatgaaggcgccaaagaaagttagaacactccagtaatccccattgcagcaataatttgtgtaattggatgtgcaatctgcactagcacataggacctggagctggaggtgctagtgcttattattattagttgttactgggagtattagacatgagatcacctggggtttattccccttttgttaagtctctgttaataactatatgggtgaataatatagctgccttttt

SEQ ID NO: 19136 - DNA, 1970 bp, Oryza sativa
  ref <308>: DATABASE ACCESSION NUMBER: AK069512
  ref <309>: DATABASE ENTRY DATE: 2001-12-06
ggttcgcactctgccctctctccacgggcctcgccgccgccgccgcttcgcatcctctcgtcgtcacaggctcgcagccgccacctcctccgcttagtggccgcctctccccctacccccacctctcctctcgtcctcgttgccgcctctcccatgacgtccccagtgagagcagggcgaggccctctcctcgcacgcgccggcgaccctccatctcctcctcatcgtcgcttgatgggggcgaggagctcggtgacggcgcgcagggacttggggagcagcacgccggcagcgacgagatccgacgaagacaatgcctctcccctctcaagctcggggcagcatggcgacggggctcctcgagcggctgcggctcaaatccggcccgccgccgtcccctcctcctggttgctggattgggggaggagctcgatggtggcaagccgaggggattcgtgtccgccgcacagccccaccacgccgtctcggcctccacatcgcacggagccgccgcacggcctcgtcctcgccgtcgcccggccgcgacgcccacggccggccgcagcgtcgtttattgctgtaccactttgaatgacaccaccggatttggactgcaaatccacctcgccatcacaggcatactacctctacctgccatgtggattttgatgcaggggcaagataccatggatcttggggagatttaagctctttaattgctacgtattgcatttgttcagtaggatcttccttaccgtggatcttgcatgaaatttgctggtaggaatgcacatcttaattaacagattgtgttgtttattagtttgggtaatggtcaaagattaagggaaaaaattgagcatagaagagagagttttacaagttttcgtatattacattttagggagtcacaatatagttaattttaggtaggaggaatcaagaaagtgtcatgtggtttaaaatagaaaattgcatccttgtagagaagtgtctgtggaattagttaaaaacatacacttagtctagctgagtggtttttgttactggttcttgcttctggggtatgcagattagtgttggttagatgatatgtgaaacaaatacttcattttccgtgttctcaggagttcatttgctggcttggacagactatctgaatatttgctaagtttcacttttggaagccaataatttttttcttcattgtatgaacaactaaaactgaataagcagttggaagtaatcagattgttgttggctggtgaatgtgatttgtagttcatgaaaatatatagcatatccatccaaatatatctgacagcaggactatgaattgtgctaacaagtagaaaaagagagtttttatttgttgttgcatacttatcatgtcaaatatcaggtttttatttgttgtaattgcttactgatcatgtcaaacttcttgttttttttccatgtaataatgagaatggaaggagatgagtatttcactagcttgatgaatgatgacagcactgcactgagtcgggaacttggggttctctgaatagccagacaaaattgcagcctttgctgatcgtcgaaagtactctgtcaatggttgtcatggctgggtagcagcaatcttgtattatcttaatactaactggttgcacttgcaaatatcttcagagatgagctaggaagcactatcatgtagatgggtgataggaggaccggaggaggcttgcattcatattatcaactattgggatgaatctgagatatgtttctcaagcttcaaaatgataatataacgacattagttaaactggtctttagcaatgtatgaatctatctaaaggctacataattcagttttttgtatggagggagttttagaatccatttcagtgtgataattctctcttgtacctttcttttatgcatatattcagattatttgtaatatgatgtttactaccgcg

SEQ ID NO: 19137 - DNA, 1886 bp, Oryza sativa
  ref <308>: DATABASE ACCESSION NUMBER: AK069513
  ref <309>: DATABASE ENTRY DATE: 2001-12-06
gtctcctctcctcgcgacagcgccgccccaaaaaccctcaaaaccccggcggcggcggcggcggcggcggagtagtcggcggcggcggcgagatggcgacgcgggtgaaggacgtggcgcggcggtcgagcaagaagtacgtcgacgaggcgctgtaccggcggctgttccgccggggctccacgccgcaggccgtgcgggaggaggtggacggcttcctcgacagccggaagcgcgccttcaagtgggaggtcggcgtctgcgtccgccgcctccggaagcaggccctctaccgccccgccctcaagctttctgaagtcatggcaagaagaggcatgaatcctacagtcagtgaccaggcaatccgccttgatctcgttgccaaatcaagaggcattgctgctgctgagaagtacttcctggacctcccagaaacttccaaaactcatctcacatatggtgctcttcttaactgttactgcaaagacttaatgactgagaaggctgaagcccttatgggaaaaatgaaggaactcaactttgctttcactgccatgtgctataacagcttaatgacactatacacgaaagtcaaccaacatgagaaggtccctagtgtcatccaggatatgaaagccgatgatgtgttgcctgatatttatacctataatgtttggatgagggcgcttgcagctcgtgtagacataaaaggggttgagagggtgattgaagagatgaaacgggatggtcgtgttactcctgattggacaacctacagtaacctggcttctatatatgttgatgctggactgtttgagaaagcagaagctgccctgaaggagctggagaagtggaacactagcaatgatcttgaagcatacaagttcctcattacattatatgcaagaacacaagatttagtggaagttcatcgtgtttggcgatcattgaagcggaatcaaccaagaagggcaaacatgagttaccttaacatgattcaagccttggcaaatttgaaggatctgcctggtgctgaggcctgtttcaaagagtgggaagctcagtacatcaatccacctaagactaacacaaaggcccctgggacagctgaaacgtcatctaatgaatctgatgtcaaggcaaccaaggacaagggcacagatggggaattgaagcatcctaaatatgatatccgggttgcaaatgccatgatcaaagcatatattacagagggtatgtttgacaaagctgttgctgtcaagaagcgtgccaagatgcgtggtggaagacttaacgctaagacctgggaaattttcatggaacattatctcaaggaaggggatctcaagatggttcactggtgcgctgatcgtgcaatcaagaaagggcacagcgctggtaggatctgggtgccaccacatgaagtgactgaaaccttgatggattactttgagaagaacaaagatgtagatggagctgagaaatttgtcgaggtattaaagaaggtacagaaggatttgggcacggtggtgtttgaaccactggttcgcacgtatgcagctgctgggaagaagctccctgggatgaggcaccgccttaagatcgaaaatgtggaagtcagcgaggaaaccgccaagctgcttgattctgtctgtattgatcaatgaacgtgccttagatttggattatgtaataacatcaggatgcatgcaaattgacatggttcttctgcaaaacctgtaatagttgctgtaagctgaaatttagcactacatttacttttgttcctcggctgtttcgacccagtccccagatgctgaatggttggtttgaaatcttctttcagttcccatacctatggactaatatatgaagatgaatttttg

SEQ ID NO: 19138 - DNA, 1046 bp, Oryza sativa
  ref <308>: DATABASE ACCESSION NUMBER: AK069514
  ref <309>: DATABASE ENTRY DATE: 2001-12-06
gaaaccatccaacctcacacagttcacacaaccacaagcttcaaagctccctactacttctcctcctccttcttctccggcgccggcgacgatgacgctgacgatcccggacgacgtgcgggcgaaggcggaggtgtacgtcggcgacgaggccgggcaggagaagacgcggctgctgctggaggagacggggctccccagcggcctcctccctctccgcgacatcatcgagtgcggctacgtggaggagaccgggttcgtgtggctgaagcagcggcggaaggtggaccacttcttcgccaaggccggccgccacgtcagctacgccgccgaggtctccgccgtcgccgagaagggccgcctccgcaagatcaccggcgtcaaggccaaggagctcctcatctgggtcaccctccacgagatcgccgtcgacgacccccccaccggcaagctcacctgcaaggccatcggcggcctctcccgcagcttccccgtcgacgccttcgaggcccccccgccgccgcccaagaacccctcccccgccgccggcgacaccaccaaggtcgatgaggagaagaagaaggaggaggaggtcgccggcgacgccgccgccgccgccattgacgagatcgaggggaagatgaaggagatgaacagcaaggaggtgcaggtgcaggccgagggagtggcagccaagaactgaagaagatcgatcgatcgatatacacagatcatcatacatctcatcatcatcatcagcagcagaagcagcagcacgagatctcactatcatatggagattcagatgagctagtagctgagatgatgagttattattaattaatcgttttatttggttctgaataatctgcatctgcatgcatgcactgctttaaattaattattattaagttgttactacttcttttcttgctgctgttaaacagagagaaaatgatatatatatatggagagatcgacgacatgtattattattgctatcatcatctgatgagattataatatgagcaatggaaatattattt

SEQ ID NO: 19139 - DNA, 2698 bp, Oryza sativa
  ref <308>: DATABASE ACCESSION NUMBER: AK069515
  ref <309>: DATABASE ENTRY DATE: 2001-12-06
gattagtttgtaaccaagcttaaacccgttaaagataagggtttggaacaggtgacctagtccggtgtagtgtgtccaagaaagctgcagatcgatgccagcgatgtgtgtactgcagggcacgtcgacggccggcggctgcaggtacaggcaggcggtcccggcggggcgcggcgggcggctggacgtcgacacgaactccggcgtgaggagggggttcctgccgcaggggcggcggcggtacaggccggtgacgcagccgacggcgcagcgggtgatggccgacacggtgtcgggggggcccaccaccgtgctcctcttcggggcgcacaccaacctggcgctcctgctcatggcgcacccgcgcctggctcggaacatcgaccgtgtctacgtctccggcggcgccgtcagggcggcggaccccgccggcaacctgttcaccgccttcgccaccaacccgttcgccgagttcaacatctttggagaccccttcgctgcttatcaggtcatacattccgggattccaatcacgatgattcctcttgatgcgaccaacacaatttcggtcaccgaggaattcgtttctgaattccaacagcatcagcaaacttacgaggcacagtactgtttccagtcacttgataaggtcttgatgaggctgaggggacgatccaacggccatggcaacacgagctactacatgtgggattcctttgctgctggtgtggctctctctagcatgcgcaatggcgaggttgatggtgaaaatgaattttctgagcttgaatatatgaacattacagtgataacttcaaacaaaccgtatggtaaacgtgacggctcgaacccctttttcgatggccgtgctactcctaaacttggcctgaaagagggtggagttcacagtggccatgttcagactggaataagagatagcttctgcctggtaccgggaagcaacagagggagatgcgaggatggatacactagagaagtgtctggtccagaaggagttcgggttcgtgttgcaacaagagcaaagcctaacacggataaaaatagttcactagaaaaggaattttccaagagcttcttagaggtcttaaatcgtcccgaacaaactgggcttttcaacatcaatacgcagttcccatattatagagaagttctttacaagccggttttcagaaatgtgagcagggggaagccagtcatttttgacatggacatgagccctggagattttgtttccctaatatacctcttgaagacaccaatagaagtaatagatctaaaggctgttttggtcaatggcaatggctgggcaaatattgcgagcatcgatatcgtttacgacattctacatatgatgggccgcgacgacattccagtaggcctaggcaataccactgcattgggaattccaacccttggctgcaacaattcttatgctatcccccatggaagtggtggttttattgattcagatacactgtatggactagccaggtcactgccaagaagtcctagaagatatgctcctgaaagtttagatcacccagaagatcggcagcctttggctcttgaagtttggcaatctgtcaggaagcagcttgatccaggcgaaaagatcactgttcttactaatggacctctcaccaatatggccaacatttcactctctgacagggatgcaagttctgtaatagagagagtctatgttgttggtggactcatcaaagatggaggcgatgagaatggaaatttgttcacggttccatcaaacaaacatgcagagtttaacatatttcttgatccactagctgcaaaaacagtcctggaatctgatctgaaaatcgcactcattcctcttacggcgcaacgaaaggctgcatcatttcgggctgtccttgcggctttggaagacatccagcatacccatgaatcaaaatttgtccatgaattgttgtcgttgctgcaagaacttcagatcaaacagaagctgtatcatcatttggacatatttctgggagaaattcttggagcagtttacatggttgaaggatcaggactgaaaccttcagtggaactcaagccagtaagtgttattgccaacacaaacaaaagcacggacgggcagattgtcatcagcaagaatagtgcaaagctggtaagggtattgagcgatttcgatggtgaaatatatagcaaacaattggcaaattctttagcaaacaagagacagtctgccgttattgggagttttgaagaacaaaaggcaatttggagcaggccggtaaatagttcagggaatataaaaaaacaaaagtgaacttttgtagtagcattagcgtgctaaaaaaatatattaaagattacatagcacaggtaataagaaagctgacatgataatgcttgaagtggctgaagaacgggtgtcactgggtgctgaagaatcgctccatgagtcgcgaagtaacctggagaattaatcatttatcttttttcttttgattacacaaaaaggaaaattatgtttctttctgaattttgtaccgtagttgagcattgatgtgaccagcaaatctgggatacgtttttcagtttgtgctctgaaccactgaatcattcaagcagtataaataattacagtctgaaattatttacctctgcggcaaatcaagccgtttttacc

SEQ ID NO: 19140 - DNA, 2113 bp, Oryza sativa
  ref <308>: DATABASE ACCESSION NUMBER: AK099094
  ref <309>: DATABASE ENTRY DATE: 2002-08-28
gacactccaccagttgtccagttcaccaccaaagctgtggtcgatcccctccacacgaagatatggcggccgtcgatacgccggagaagccgtacgagggtaagccggcggcggaggcgaggagctactggcggtggcagaaggaagatttcttcccggagccgtccttcgcgagctggggcgcgtaccgcgcggcgctggccgcgacgcccgcgcggttccgcgaccgcttcgccggccgctccaccgacgccgacgagctcggcgcgctgcgccgccgcagcgagaacgagatgcgccgctgcctcacgtggtgggacctcacgtggttcgggttcggctccgtcatcggtgccgggatcttcgtgctcaccggccaggaggcgcacgaccacgccggcccggccatcgtgctctcctacgtggcctccggcctctccgccatgctgtccgtgttctgctacacggagttcgccgtcgagatccccgtggccggcggctccttcgcctacctccgcgtcgagctcggcgacgtggcggccttcatcgccgccgcgaacctcatcctcgagagcatcatcggcacggccgcggtggcgcgctcctggacgtcgtacctcgcgtcgctcatcaacaagccggcgagcgcgctgcgcatacagacgtcgctcgccgaggggtacaacgagctggaccccatcgcggtggtggtgatcgcggtcacggcgaccctggccattctgagcgccaagggcacctcccgcgtcaactgggtcgcctccgccgtgcacgtcctcgtgatagccttcgtcatcgtggccggcttcctccacgcgaagaccagcaacctgaccccgttcatgccgcacggcgtgccgggcgtgttccgcgcggcggcgatcgtctacttcgcctacggcgggttcgacaacatcgcgaccatggcggaggagaccaagaacccatcgagagacatccctctcgggcttctcggctccatgtcggtgatcacggccatctactgcgtgatggcgctggtgctgagcatgatgcagccgtacacggcgatcgaccggagcgcggcgtactcggtggcgttcagcaacgtcgggatgcggtgggcgcagtacgtggtggcgctcggcgcgctcaaggggatgacgacggtgctgctggtcggggcgctcggtcaggctcggtacaccacgcacatcgcgcgcagccacatcatcccgccggtgttcgcgctggtgcaccccaggaccggcacgccggtgcacgccaccgtgctcatcgccgccgccggcgcctgcatcggcctcttctccagcctcgacgtgctctccagcctcctctccgtcagcacgctcttcatcttcatgatgatggccaccgccctcctcgtccgccggtactacgtgcggggcgtgacgagcaggacgcacgcgaggcggctggtggcgttgctatcggtggtcatcggctcgtcggcgggcatcgcggcgtactggggcgcggcgccggagcggtgggttgggtacaccgtgctggtgccggcgtgggcggcgggcacgctcggcatccagcttctggtgccggcggcgcgcgcgcccaaggtgtggggcgtgccgctcgtgccgtggctgccgtcgctgtccatcgccaccaacctcttcctcatgggctcgctcggcgcgcaggcgttcatccgcttcggcgtctgcaccgccatcatgctgctctactacgtgctcgtcgggctgcacgccacctacgacgtcgcgcacggcgcgtgctccggcgacgacgtcgacgaggaggtctacgctgatgccgcccacgtggacgatgcgaaggcggcggccgcggtcgctgccaacgcagacgtggagagggcgggcgcgaagatctgatcacatgcctaatgatttggtacattgatgcgaagaatattcaaaactgtagcgtgcaactgcaaatatcattatctattgaacagtatctcaccaaagtgggaaatggattctctttggagggatagggatatcccctccgtctgtcgtgtcatgtaaatagttatgaaaataattgaaaaacaaacatatactatctc

SEQ ID NO: 19141 - DNA, 897 bp, Oryza sativa
  ref <308>: DATABASE ACCESSION NUMBER: AK069516
  ref <309>: DATABASE ENTRY DATE: 2001-12-06
gaactccactcactctgtgtttcacttgctgcctttcagttgcaaagcatagctgttctcacacctgccttgtagctagagtggttagcagagaagggaagcagtggagttcaggttcagccatggaggttgaggcttcctacagctatggcttccttccttcaggcaggcaccagccttatgcaccacctcctccccaccctgcagaggaaggcgaattgtgggagtactttccatgccctttctgttacatcgaggttgaggtgcccttcatctgcaaccatcttcaggaagagcattgctttgacaccagaaatgctgtgtgcccgttgtgcgccgacaatatagggagagacatgggtgcccatttcagagttcaacactcacatcttctcaagagaaggaaaccttctaggcccagcagctcatggcctacaccctccaacaattcagacccctactttgaggggcctccacagtatatgatgaacaacaggacataccaagatcctgcacctgatccactgctctcccaatttatctgcagcatggctcaaactgacactaactcggataacacaaacactgaaattgcagtttcagcagtctcacatgatcagaggttgagtcagcgtgtgactctgactgatgatgcatccaagctggaactcaaggaaaggttgcaaagaatcgagtttgtcaaggagataatcatgtcgacaattctttaatttgttgtctagtgttacttagcaagttttatttatgttttgtgttttgtgagcgcagatgtatcagtcatgtatgcgcaacatcccctggctcacagatatataatctataccatgtaatattctagtagatgaatgcttgcatactttggctccaagtttgtcc

SEQ ID NO: 19142 - DNA, 1518 bp, Oryza sativa
  ref <308>: DATABASE ACCESSION NUMBER: AK069517
  ref <309>: DATABASE ENTRY DATE: 2001-12-06
gggtgcttcccgcaaggccacagcgagcaggtgtcgtggctcagtgcaatgggatgctcacttctggtcagcatggtgtcgctcgtctgtctcgtcctgctccaatccaggggaaaccatcaaagaccatggtggattgccttgccatcttcgtggtcatgagacaatgcacagctcggttgatgaagccctcttgctaaatgtaccgcataatcaaatcaagatgcaccttgttttttgtttttttttgttttttgtttgcataagaactttcatttgagctttcagtgtatactagatcgactcccgccgcaagcttgtcccattgaatagtgatccaccataaccattcaccaattcggttgcaaatctgaaattctatgatcttagattcttggtacagctggtgcttcttctccaagactctcgccgagcgcgaggcgttctattacgtggttgacaacgctgctgccatggacttcatcactgtgaacaccagcggctccatcctcatcaacatgctcaagtgaaatatctttgaatattttatcgattactctggatcatgttgaaggatatcttgaatcggctgcaaagacaataatttcgtgacgactttgttcagcctgagtataggaaatttggtgaatgggggaacaggtgcatttggtttacaacaattcagttctctgtaatctccaaggatctagcttcttacatatcaattcagccagtaagtggccaaactatctgtgttggattgttatgggagtatattataggtcattttctatcttcaacagctcttgtatcattcatttgttgctccaaaacacatggattcatctttgaaggagctgcaggttgttctatatgtgttccaactgattcacttgtagagttaatacaaatattggttgaaatgtacacacatatacgacattggtgcccatctcttctatcaccatctgcgaggcctcactcaaggagatacaccatcagaattttgtgaggtagaacgggattgttcattatggaagattagcactacactcttgtttgctaggagctatctaaggaaaaagaataaataagatcttatcctcttcaacatgatgctatcatccttggtcatcaggaaaaactcagaagaccatggaccactcctgccactcgttgcaatcttgatcagttaattgctccagtttaaagacttttttcactataggcaggtgagactgaagattgtttgtcagttgaaactgcgctgtgtagacagtagcccttgcttgagaaatgatggctatgactttgaccctttgatcatatggaacaacaacacttcagtatgcaagaagctcttggaagtggccatttacatagtgcaaaatatccatgaattactattatcccttttatccatcagaattatgttacttgtcgtctatggttttaataacaccaaattttggtgtaaacatggtatctaaacactgttgagcgatccagctatttagc

SEQ ID NO: 19143 - DNA, 2951 bp, Oryza sativa
  ref <308>: DATABASE ACCESSION NUMBER: AK069518
  ref <309>: DATABASE ENTRY DATE: 2001-12-06
gggttttcaccagtcgctagctcaagcctctaaacccttcttctccccagctcaccccgttcgccgccgccgacgccgctcgccgggggctatcgccatgtcgccggccgccgcctcaccggatgatcgcatccggagctacgaggatttcgcgagggtgcacgcgtacctgctggccgcatccgggatcccgccgtcgctgcaccagcggctttaccgcaagctcgccgacgaggtgttcgacggcggggaggccttctcggtagagccctgcgagggagggaggcagcggaggctcgttctcgccgctgagtggactctagggagggagtccgatgtcttcctcgtcgaccacgcctggtccttccgcctctccgatgcgcttaagcagttgagggaagtaccaggactggctgaaagaatggcagcattgatgtgtgtggatctggacgagagaactgaacttgaagaagcagatggacaggacaatgggaatggagggagtttggagagtgccttggaggtagttgagaaagaaaggactagaatccaggagaagggaagtgactttgcagcatggctggaacttgaggagcttggaattggtgatgacatgctaatagctttggatctatcttcaaaatttccgaatatggtagccctcaacctatggggaaacaagcttcaggatccagagaaataatgaaaggaataggggaatgtagaaggctaaaggcactttggttgaatgagaaccctgcactgaaggaaggtgttgacaaagttattcttgacggtctacctgaattggaaatatacaattcacattttacgaggaaagctggagaatgggctttaggtttctgtggggatattattggagcagacaatccctgttcctcagcggaaagcataccattggagaatattgcgtctctcgatctctcagataggtgtatccacaaactaccagtggtgttctctcctagaaaactttcctccctgttgagcttgaacatccgtggtaatcctttggatcaaatgtccagtgacgatctcttgaagttaattagtggatttacccagttacaagagttggaggttgatattcctggctctcttggaaacagtgctatttccattcttgagtgtcttcctaatctatctttgctaaatggtatcaatgtggcaagtataatagagagtggtaagcatataattgattctgcacttaaaccacgtctgcctgaatggtcaccacaagaatcccttcctgaaagagttattggtgcaatgtggttatatcttatgacataccggcttgctgatgaaaaaaagatcgatgaaacacctgtttggtatgtcatggatgagctgggttcagctatgcgccacaatgacgatgcaaacttcagaatagcacctttcctgttcatgcccgatggtaaactagcttctgccataagttacacaattttgtggcctgttcatgatgttcatactggagaagagtgcactcgtgatttcttgtttggtgttggcgaggacaaacaacgctcggctaggcttacagcctggttccacacaccagagaattattttatccaggaattcagaaagtacaaggaacaacttcaatcaagcagtatctgtccttcaagagaagtaacaccggtgaccaaaagtatccgtccaagtgatggccatgcacttcgagtatttaccgacataccccaagtagaggagtttctaacacgtccagaatttgttctcacatctgatccaaaggaagctgacatcatttgggtaagcatgcaagtggattcggaattaaagaatgcactaggacttacagaccaacaatatacaaatcaatttcctttcgaagcttgcctggtcatgaaacatcacttggcagagactatccacaaggcatggggttcacctgaatggcttcaacctacgtataacctggagacacatttatctccactcattggagattactgtgtgagaaagagagatggtatggataacttatggattatgaagccttggaatatggcaagaacaattgacactactgttactggtgatttatctgctatcattagactcatggagacaggtcccaaaatatgccaaaaatatatcgaatgccctgcacttttccaaggaaggaagtttgatctgcggtatattgttttcgtccgcagtatatgccctttagagatatttctttctgatgtgttttgggttaggttagcaaacaatcagtacactctggagaaaacaagcttttttgaatatgaaacccatttcaccgtgatgaattatattggaaggatgaaccatatgaacacaccagagtttgtcaaggagtttgagaaggagcaccaaggtcagcttgcatttttctctttatattatgcgtgtctagttactgacttctgactaaaattttagttaaatggctggagatccatggacgcatacgggatatgatacgatgtgtctttgagtcagccacagctgttcatcctgagatgcagaacccgttctctagggctatctatggggttgatgtcatgcttgataataaattcaatccgaagattttggaggtgacatattgtccggactgcacgagggcatgcaaatatgacactcaagctctcgtgggaagccagggtgtcatcaggggcactgaatttttcaatacagtgtttggctgcctctttctggacgagcttaaagatgtatcgccgctgtaatcaccacaacaaggttgctgtaacaccgaagttcaacacaatacacgcacatgtgagttgtgatcctgtcgttttatatgccatacatatcaaatttgctcagtacaattacaaagggggtgtgatgctgcctcctgcctgtaccatgcttcggatcagattgaaatgagcttgacg

SEQ ID NO: 19144 - DNA, 2671 bp, Oryza sativa
  ref <308>: DATABASE ACCESSION NUMBER: AK069519
  ref <309>: DATABASE ENTRY DATE: 2001-12-06
ggtcgaattggagcgggatggatgtggtgtggccgcacgggcacggcgtctggggctcgtcgtcggcgtcgcggcggtcggcgatgctccacggcagccttgacatatggatccacgaggcgcggaacctcccaaacatggacatcgtctccaagaccgtcgtcgacatcctcgggacgaagaagaagaagaaggcggccaacggcgccatgaccagcgacccctacgtcactgtgcagctcgcgtccgccaccgtcgcgcgcacctacgtcgtcaacgacgacgagaaccccgtgtgggcgcagcacttcctcatccccgtcgcgcacgaggcgcccgccgtccacttcctcgtcaaggacagcgacgtcttcggcgccgagctcatcggcgaggtcgtcgtccccgccgagcagctcgaggccggggagcacgtcgagggcgtctacccggtcctcgatcccgccgccggcaagccgtgcgcccccggcgccgtgctgcggctgtcggtgcagtacatccccgtggcgaggctaaccatgtaccaccacggcgtcaccccgggcccggacttcgccggcgtccccaacacctacttcccgctgcgccgcggcggccgggtgacgctgtaccaggacgcgcatgtgccggagggctcgctgccggagatcaggctgggcaatggcgcgctctaccggcaaggccaatgctggcacgatgtctacgacgcgatatcgcaggcgaggaggctcatctatatcaccgggtggtcggtgttccacaccattcagcttgtgcgggacggcggcgccggcgtctcgctgggcgatctgctgaagaggaagtcgcaggagggggtgagggtgctgctcctcgtctgggacgatccaacgtcaaggaacgtccttggtatccagatggaaggttacatgggcacacgggatgaggagacccgtagatttttcaagcattcttcagttcagatactgctctgcccgcgttctgctgggaaaaggcacagctgggttaagcagcaggagaccggaaccatttttacacatcatcagaaaacagtgattctggatgctgatgccggcaaccataaaaggaaaatagttgcttttgttggaggccttgatttatgcggtggacgatatgatacacctactcatcctctttttcggtctctccagacattgcacaaggacgactattataacccaaactttgcggtacttgatgcccaagggccaagagaaccatggcatgatttgcattctaagattgatggcccagcggcatatgatgtcttgacaaactttgaggagcgctggttaaaggcatccaagcgcagcggggttaaaaaattgtcaaaggcaaataatgacacattgctatggattggaaggatacctgatattgcaagcattgacgatgaagtgtattcaagtgacaatgatccagagcgatgggatgttcagatattccggtcaattgattcaaattctgtcaagggttttcccaaaaatccaagagaagcaaccagtaagaatctcgtttgtgggaaaaacgtactaattgatatgagcgtacaaaccgcttatgtgaatgcaatccgaggagctcaacacttcatctatattgaaaatcagtatttccttggttcttcatttaattgggattcacataaagatgtaggtgctaataacttaataccgattgaaatagctctcaaaattgccaacaagatttatgccaatgagaggttttcagcgtacatagtaattccaatgtggcctgaaggtaatcctactggtgctcctacacagagaatactttactggcagaaaaaaaacaatgcaaatgatgtatgaggtaattcacaaggcattgaaagaagtagggctggataacacatatgagccacaggattacctgaacttcttctgtcttggcaatcgtgaagcaggcggcagtcctagcacttgcagaggatcaagttcagccaacaatccccaggatcaagctaagaagaaccggaggttcatggtgtatgtgcactcgaaagggatgatcgtggatgatgaatacgtgataattggatcggctaacattaaccagagatccatggaaggaaccagagacaccgagatcgccatgggagcgtaccagccccagtacacatgggcaaacatgctttctgctcctcgtggacagatctacgggtacaggatgtcactgtgggcagagcacattggagcggtggaggaaagcttcagttgcccagagagcctggagtgcacgaggcaggttcggcacatcggggagcagaactggaggcagttcgcctccagcgaggtgagcgagatgagagggcacctcgtcaagtaccccgtcagcgtcgcccgcgacggcaaggtgaagcccctgccgggatgcgccgcgttcccggacctcggcggcaacatctgcggcacgttcctgcccatccaagaaaacctcaccatatgaaacaggataaagatgttttcgtttgcgattcttgagaagggattcttgtgaaagcagccctggacgcgttgcattcgttgtagatgtgcagatttttctcttttcttcgttacgatttggaggatgtgaaattttgggttgggatcaacacagatttctt

SEQ ID NO: 19145 - DNA, 4017 bp, Oryza sativa
  ref <308>: DATABASE ACCESSION NUMBER: AK069520
  ref <309>: DATABASE ENTRY DATE: 2001-12-06
ggcttgctcgccgcgcgctctcttctcgccgcctcggcctcgccgccgtggccgccggtgcctggacgaggaggagggctggatcgctgggagatgttgagcagcggcgcgcggtggcagccgcggcgaagcggatgggcggagtggggcggcgacgctcgcccggctcgctctcctcctcctcgtcgtcgtcgtcccgacgtcgctgcgggttggcgaggcgaggggaccagtagagtgcgggggcgcggggagaagggaacgactcatggtggagcggaaggcgagggcgcggtggtggcgccggtgagaacagcggacgcggtgccggcgagaaatgcggtggccgtcgccggtggtttggccacgcgcggcgtcgagcgggatgctggccaggtggtggcgagagaggagaagagacatggcggcgagttggggaccaagagaggattggaggagcgggccgcgcgttcgccgccgccgccgccgccgcccaagcggagggcggtgtccgctattcgccagtttcccccaggttgcggaagggacgctgctgctccagtcgcccgcggccgcggttgtgatggtggtgttcgtctgttggatgaggcaaccgctgctcctctcgctggcagcaaagatgattctgctgttccgggtgtggtggagaaggtggcgtctgtagatggtggcgattcaatggcgaatgcgcatcatcatcatcatgctatgatggacacggtcttgatgaaatcttcacatgtttcggatgagaatcaggtcgctcgcaaagttggttcactggaaaatggcgcagaagggtcagcgaggggaaagggaggacacggcggtgaattgctgggaaggaaggaagtgttggctcaagccgcgaatttgcttcccaagaggaggattgtatctgcgacgcgccgcttccctcctgggtgtgggagggacgctgtggctccacttgctcacagagaagagagtaaggtaggttcaagtttggaagccatgcctgttgatgctggttggggtgtgtcaaaggaggtggtgactacggatggccgtaataattcggttaaccagtgtgcctcgaacattgtcggaacagtaaagtgccaggaattggaggagggtgaggtagctgctgaggcatgctgtgatgtggagtcacaaaaagttgctggtcatggagaaaaacttgaaagtgctgttcctgtaacttctgctgttactgaagttttgacaaggtgtggttctgatgagatggaagggtgtagttatgctgcggaggcaactgaaaaacacttgtcaatgggtggtaaatgttcaattggtggtcctttcaatgaaattgtccacggcaagagagtgttggggagtgatggcattaaaagggaagttcctagtcttgcaatggaagatcatggcagcattgctcatgaccaagaactggtggaggttgagttaactacaggggaccatattcaggaggctcaagttgctaccactgttaacccacatgagtctacaattagtagacatgaggcagctgtttcagcaaatactgctccagaagtttctattaggcatttttctagtgtgaagaacggaaacacatcacagcatgaggagacgatatatgcatctgcagctgctgacgttgttaaggtgatgaataaatgcaaagggaccaaatccaaagctgcggctgaaccttgggctgaaggtccttccaaagaacacttcaaggctaagagggagtgtgaaaaagatgggatgaaaaaatcatccatgaatgttccaacagaagtatttcgtgatggtatcatgagaactaagttactattgacagctagaaaagcagtcaagccaccactgaatactctgcatatacccttctccatgggaaaagaggagtctgttgtaacaaatagtgcatcatttggtcctaagaagaaggtgaaggtgaaaagcccgcatgaaagtaaaggtattcctatgaagattgtctctacatctggattggcgggcaaggacaaccttatcaatgaaaaggctttgagcttggaagatgatgatattttgaaggcactagctgttcataatggaaagctagagttgtatctcaatgttccctcatgcgttgagcgtcacaggcaacatggaagtgagaatggcaatgataggagcaaaatcaggatgctatgcaggaggtttcaatttatatgcaacgctcttctacatgctgttgaacaaggctcattgatggttcgacgaattgaccttgaagctgataaaatcatcaggaaattgccgggctttactaaacatggacctactgtgggaaatgttcgtggagtcgaagtcggtgacgaatttctgtacagagttgagctagctcttgttggtcttcatcgcccataccagggaggaattgataccaccgatcataatggagtgcttgttgcaataagcatcgttgcttctggaggttatcccgatgaattgtcaagctcaggtgaactgatatatactggttctggaggaaagcctgctggtaaggagaaacacgaggatcaaaagctagggagggggaaccttgccttgaaaaattgcatcaagacaaagacacctgtccgagtgattcatggattcaaaggtcaaaatagagaggacgtcagtcattcaagagctaaacaaatcttaacatttacttatgatgggttgtatcttgtgttggattgctggagagaaggtctaaaaggttcaagggtcttgaaatacaaattacaaaagattcctggacaaccaaaacttcctctgcacatagctaaatatcagaacactaggctgggatcccaaggatggtgagaaccatcttgatgtagtgcttagatcattgctcttgattgcccttgtcgaactcggacatgaagagactataaatgagggagttaggcggttccatatcttcttaaaagacagcaaaactaaccttcttccaccagacactagaaaagttcagattttttcttaacataccgctatagtgtcacgtctttggtatctagtgtactaatatatgtattgatctgcaggcttcatatctttctatgatgcagactgttactacctccagcagaggtggtaatggtgctctccttaaaatctacagagaaactgctgaagcactggagaagtcagtcaagtcacgcattttaggactgtgcgttctgactgtctagcttaagtgacacagcagggattttatgatgagttgtgttgtcctgaaaagtaatatttcttctattgtaggtacattgtcttcatgccaagctaaggatattgttcttgaggcaccaaacttcatggtcactgatgagtgatgaggttaagctctaaatttctgaacaaacgatgattcaagacagtaaatggtggaatgagattctattctacaccatggatacataagccagtctagtctctctcttgcttgccaggcctgattctggagttcagagcaagttggatatctgtgaccatgagtccccatctatgcatgatgcaggaaaaccggttcatgtcttgaagacctggccatcaaattcactactatcagacttcgtcaatttctcgggtcaccacggaggagaaagctactgaattttccgagttcttcgccggtgaagggttcaaaccatagttcgagcgtgtgctgaagcaaagcctggagagggtccggatcagcccgagatggatcgagagcatcaggccttgctcgtacagtgcatgagctgcagcagcaggaaatgtaactttctgggctaagctagaagattttacacgcatggaagttcgtacaaaaatgttcttggaaaggttgtgcggttgggccaggtgtggccactactaaaaaaaacctagataggtgctcaaccggcacctagcaagcaggcggcacatatgagagaaatgaaaggaccggcacctttgaggtcccaaaaattc

SEQ ID NO: 19146 - DNA, 1676 bp, Oryza sativa
  ref <308>: DATABASE ACCESSION NUMBER: AK069521
  ref <309>: DATABASE ENTRY DATE: 2001-12-06
gactgcaccgattcttcttgagaagaagatctgaagatgaagcaaacccgtagcagcctccttgcagatgatgaagatcgcccgagatggttgaagaagcgcagatgcgatctccaccaatggagtgatttgccatcggagctgaccgaggatattgcaagcaggctgcttgggtacgatgtggcagagtaccttcgcttccgcgccgtctgcaaggcgtggagggagtgcaccccccacccgcgcgaactcgacagccgcttccgcccgcgccgctggatcctcctctcctccacctccggcgacatgcggtgccgcttcctaacatcgccaccggcgcctgcatccaggtcgacctcccggaggagctcgccgccggcggccagatccagatcgagtgcaggaccgagggcctcctggtccttcgcgacaaggtgaccgacgccattcgactcctcaatcccctcacaaaagccgtcaccgatctcccacccatcaccgccgccatggcaaacgtgatccctgagaaacgtgtccatgccgagatcccgtggtcgctgattgcctacgccggcatctccgacgagacctccccaccgaccgtcgctattttcctgagagacatgcggttaaacatcgcgtacgccaaggccggcgaccgccattggaagctcctcgacgacaaagcttggtcgaccttcccaagcagcatcagccgtagcgacggccaacaactccggtatgtcaactacctgtccgtggtgacgctccgtggccgcatctacttggtgacataccaaggtaacatattgaagctaagcattcgtcctaggccccagctgatacccatcgtcaaggaccagaccaaacattcgatgtggcacggccgagttctgtgccccaacgtggtctcctaccttgtgccgcccaacgacgacgatcaccgtatgctcatggtgcgctattacggcgacctcacccacctcacagatcacgagcagaggtgcatcaagcgaaggaagaagaacgacttgatcaagctgcccagcaaaaatccatgccggtacaattggcgaatactgcaggtgttcgaggtggacatcgtcaggaagaagctggtacgcgtggacggcatcgccgacgaccgggcggtgttcgtcggcgatgtggcgtgcgtctcgctctctatcgacaggttcccttccatccttggcaacacggtgtatcttgggatgaacagctgctgcgctgtgggctttggcttgtgccacctcaaggaccggactgttgagccgcggctcgagcatgtcctcgaaagtgggcgcaaggcgccactccttgttgatatcagcctcttccacctaggaaggattgtgccctttgcacgcccctgcactcttgaagagtaccttgtatgcagcgtcggcttcaagaacgggatcaaagattgatattattgtcaaagcctcactgctagctgatgctaattaagaagcttattactaccactactatttattgttagtaagtgtagttggttaatttactctttgtatgtatggctgactttgatatggttttagattgtaatcttatttatcagccacttggtttgaatatttatgtccctccacaagtcagtccatcaattgttgtccttaatttgcatctttggt

SEQ ID NO: 19147 - DNA, 2114 bp, Oryza sativa
  ref <308>: DATABASE ACCESSION NUMBER: AK069522
  ref <309>: DATABASE ENTRY DATE: 2001-12-06
gttaagtggagtgtactaggtagacacactagctagctagagtgatccagctagcatggaggcctcagccatggaggaggccctctcgaagaagacgacgagcaagggaggcctcaggaccataccattcatcatctcgaacgaggtgttcgagaaggtggccacgttcgggctgcacgccaacatgatcctctacctcaccgagaggtaccacatgacggcggccaccggcaccgtcgtgctctacttctggaacgcgctctccaacttcctccccatcttcggcgccgtcctctccgactcctgcctcggccgcttccgcgtcatcgccctcggctccgtcgtcagcctcgccgggatgtgcctgctgtggctgacggcgatactgccggcggacaggaggacgccggagtgcgaggcgaggcgggatgactgtcagctggtgccgtggcagctgccgctgctgttcgcgtcgttcgttctcatgtcggttgggtcgggtggcatccggccgtgcgcgctggcgttcggggcggaccagctggaccggcgcgacaacagcgcccggaacgtgcgtacgctgcagaccttcttcaactggtactacaccgtgctgggcctctccatcgtgctcgcctccaccgtcatcgtgtacatccagcaggccaaggggtgggtcatcggcttcgccgtgcccgtcgtgctcatgctcaccgcgctcacgctgctcctcctcggctcgcccttctacctcaaggcggaggccgacaggagcgtgctcgtcggcctcgtgcaggtgctcgtcgccagctacaggaagaggaggggtcccttgccgccggagacggccgacgcgtcgcgcttccacaaccgggccgggtacaagccgaggactccgtcgaacaggttgaggtggttgaaccgtgcgtgcgcgctgggggacaacccggacaaggaggtgaaccccgacgacggctcggcgcgcgacccgtggacgctgtgcacggtgcagcaggtggaggacgtcaaggccgccgtccgcgtgctgccgatatggtcgacggggttcatgcccggcgtgatcatcggccagcagatgttccccgtgctgcaggcgaagacgatggagcggcgggtgggcgggctggagatccccgcggcgtcgttcggcgtcttcagcatcctcacgctcaccgtctgggtggccgtctacgaccgcgcgctcgtccgcccgctgtcgcggctcaccggccacgcgcgcggcgtcaccctgcggcagcggatgggcatcggcctggcgctcttcgccgtggccatggccgtggccgcgcgcaccgaggccgcccgccgcgccgaggcgctggccgagggtctccgcgactacggcccgcagtcgggccgcgccgtgcgcatgtccgccatgcggctggtgccgcagcactgcatcacgggactcgccgaggcgctgaacctgatcgggcagatcgagttctactactccgagttccccaagaccatgtccagcatcggcgtctcgctgctggcgctcggcatggggttcggcagcgtggccgggagcgccatcgtcggggccatcaacgccggcaccaggagcggcggcggccgcgacagctggctctccagcaacctcaacagggggcactacgactactactacctcgtcctcgccgcgctgtgcgttgccaacctcgcctacttcgtgtggtgcggatgggcgtacggcgaggagggccagaaccgggtgaccgcggaggaggaagcggtggaagacaccaagaccaaggaagaacagcagcagaaactgcaaaacctttttagtgaggcaggctgctgctgtgtctgcttcagctttctacttctctagttctctcttgtgaaaattgtagtaatatttacatgtatatgttggtgcaaaaatggatggttcgacctcgaatcctatcagccctccggatccaaagatcctacagggcacaggctgctacctgcaacgttaaaatgctagtagtagcagcagtttttttttttctgttacttggatgggttgcatataagtagtgataaaaacggtgacagaaattttctaccgaccg

SEQ ID NO: 19148 - DNA, 3768 bp, Oryza sativa
  ref <308>: DATABASE ACCESSION NUMBER: AK069523
  ref <309>: DATABASE ENTRY DATE: 2001-12-06
ggccgtttggagaaaaaaaatttgcgaatccaatttcgaatttcaatttgcgcgtcgccgtcgtctccgcttctcctaatttcgaactccaatttccaagcaatccatcgcctccacctcctccaccgcctccgcctccgcctccaccgatcgaggccgccgtagcttctcgatccgcggggagctcgagctccagcacctcggcgggcggcggccaccggaattgccgcggaatccgcgcgcgtcgccagtcgccgcggcctccccgtcacctctaacccctcccgccgccgccgtccccttctccgcagcttcgggagccgccgcggcgctctctcatctcgtcggtgcgtggaccgcggcccgcggcttcacccacctcttcctgaaacttcacgcgcttacactcatcgtgcccatttcgcagccgcgaggttagattgctcgtcgtttgttcactatgctgcaatggatgggtggttcgcggaggaaggtgtatgccgtgagtaccccagatctccctccctccatctctctctgttgtgcttcctcgcaattagtttgggcttggtttccatcattttttactgaaacagtgaaacggttggcgtgtaaatcatcagagcaatcgctgcatttagcactatttgtcgtgacaaactaacattcggtcatgtttgggcgtctgtgttatgcatgtttgttcctgaattgggagcagtccaggaaatcaacgcagagcaggcagaggcagtactttgagcaaaagaaaaggcaacagcagagtccaggagtacagagccaggttgatgtatcaggcactggcagtcaagcttatcatgatcaggctcctcgatcgcttgatgttataaacctgaacaatctggcaaccccaattagtcatagcagtggccctgaaactgtagataatgttgttccaccactggattgcactcttttaagtgcttctcctatagagggactaaagaagatcacttctgcgtgcagcaatctgaaggaaccatgttctcagccaagattgtcatcatcctctgaccatcacgatggtgcagcttctgctaacccatacaaggaaccgcttggttgcaaaatacccccaccaaaaagcaacagtgtcaagaaacaaaatccaaatgtggaactcaataatgaaatttcactttttgatttggtcagtgatgagggaccaaataataaatctactgcacgacctgcccgtgaagctcatgtttcgttttctgttaaaggccttggccatgtcaagatggaaacacctcctcaatcaccaagatccaccaaaaggactttgcctttgcctcccaaggtcatgcggtacacacagaacaaagctagaaggtatattccctttgatgcgacaaagcaattggattctataataaatgatatcaacgtgctgaaagagcgaagattttcagaaaagaggacttgtcctttagatgaatcaggctatgaaagaagcaaacagtctaactgttattttccacattcatttgagaaccacaataataaattctttcctgaggatgaagacatgttttgtgaaacaaaagctgaagaatgttggcgatcaaagcatggtaggttggatgataatttaactgatgaaaattctgagagattgtggaagatggaaccatttaattcagaggatcgttttcctactccaatagtggaacagtttgatacacgtgattatggttttaaagatagatactctccagaacaaagaacttcaacaagaactaacacaagatttgagacatcagcaacacatgacctcttttctgatcaatcgatgatggacaatggcaacgatacagtactttttgactgggaaaggcacccaccaattaagaaaaaatccaacttaaacagcacatttggtccttctgcttggtctttcgatatggtagacgattcagagaaaaggagaagtccacggagcgaagaatcatgctcatcagctgcagtaatgaaggatggatcctgcaagaaaccatcactgtcggtagaatgtgaagagaataaaatgaatgagaaggatgacttccacataagctttgataacttagatattccaaaaatggatgcacatcttgatggagtttcactattcgacaatctggaagagcaccacaaaagaacagatgatcagaataatcttgaagctggatattggtcagacaaggctacagagaaacggagaactcgagaaccaagttgtcgtttatcacttaaggagaagttttccgattggggttctacttctcccactacccattggaagggtcaaactggattaagtaacccatcaagttgcactgtgttgcatgaggataagcctttcaattctgcatcagaaatgagcacgtatcaaactgcagggtcaagttcacctgaaaggaggccagcttcaaaagtttctcctgtgtttcatagacctgacaatgccatttttgatgatgacattcacctacagagttctgtttcagatatatttggcgatagaattgaattttcaaaaccaaactgttccatgggtcttcagagtgacattgatatgagtactttcttggcagagaaggttgacaaacggaaagaagataatttagatacctccaagaaccaaaatgcagacatgtttcttccaaacaaatctgtgagttctgttagacagaatgtaggtggtcaacacagttcatgtgctcagcagcctggcaaggattcattactccaaggtttcagtcctggtattgattttcaggattccagactaaattcattttgggaggatggccttgctgataatggcacttttcagggagatattgaactgaccgatctgttaacaagaaaaaatagtgacaagaatgaagacagaattgagaagctctcgaagccagaaacaaaaatgttgacagaaacacctcaagcatatccagatcacagaaatgagatgagagaaactgaaacctgttctgatggatcagaagtgactaatcctcctggagtgcagaagcaaacatcattagcgacacaagttcctgcaaacttgggttgtcttcaggaaacctcaagagaaatgctcaaggttcatgctcatactgaatgtgtaaaaagggaaaagatagaatatccctgtgttgatttcagtactccattgcatttgaggaacaagattcctgatgttgatcattccaaaagcaattttatgttccattcacctttcgttggaggttcgttgtccactctatcagtaccccaactttcactctgtaccccttctcttcttttttgtcttatgttttctgatctctagaggaggtggggattgagaagaagataatagcaagtgtgtcaccgaacaacagtgatgttcagtataaagttatgcttgaacatcgtgttctccgaaggctttgtgttcaaaagatagtggttgatacaccaatcaagaacaagctagacaaggataatcacttcaggatgatggaggatgggtatcatgtccttccaaaaagtgtttaaacaggtaagcaacaggaatgcagcatgtcttattgtaagatcttgtgttgaagtgagaggtgactcgagtcattgggtgtgattcgtgaagttagaatgaaatgggatacagtatgttaagcattcgcccacattgcctgctacgatctgttacctaagtgattattagggggaaatgattccagtgtttttgtcttc

SEQ ID NO: 19149 - DNA, 2900 bp, Oryza sativa
  ref <308>: DATABASE ACCESSION NUMBER: AK069524
  ref <309>: DATABASE ENTRY DATE: 2001-12-06
gagtgctgcttcgtgctgggagacggcgaagcgatgcgagcggaggacgacgacgccggcggcggcgagttcgtgggcgcgcggctggacgccggcctccgcgccgcgcggttcgcgtcgccgccttctgccgacgagttcgcggccgccgtcgagcccaggaacgcccccgcggtgtttcgtggcgtggtgaaggattggacggcctcctctcggtgggatcctcgccgtggcggccttgactatttgcgggtttggatcgatccctccttctatctctatctagctcacatgaggagacagtgggaaagatatcttgtttccgtaccattctactttgcgttgtgcaatctccgatacagtatttacttcaggaaaaggttggacctgatgttgatgtggaagctatgatgtcgagcacagggcatgtgttctatggggatcttagaagccatgagagggcgggttttttttactctgaatctgcttgggagttgtaactttcaccattttgcgcgaggcgctaacgctgcttatcttgctcctcgattccaggtgcttgttccattctccaaattcatgaactcgtgcaaatcttacctgaggtgtccgaatgcctccagtgactcacccaaagctcaagaaatcctcaaggagcccgcttcttcagaggaggggtgctcgagcagcttagagagttgtgaccaagtctatttagcacaagtatcaattctgaacactgagaacaaagagagatgttcactggaagttttgaaagaggacattcaggagccaacatttttgagaggaaaaccattttcatcaataaacatttggatgaatagagctcacttgagatcaagtacccattatgatccccatcataatctcctttgtgtggtggctggttgcaaaaaaggtgtgtttgtgtttgtgttagtgttttaggtttgctgcagttttatgttctttttggctattagtggtgacacgtataattcttccaaattctttgttttctcaaatcttccaaattatttgttggccggtgtatttagtagaacataggaacttaaatgtccttctactgcaattgcaaatgcacttctgttttcagattgctgttgcttcttttcaaattttattccaaaattttctcttctcataaagggtttctatccttctagctatttgaaatgtaaattgtgtgtaaaacccatgacaaatttctagtggaatacatgcagtaattgcttcattctcttgaacatttcatacagtaactttgtggcctccctcatcatccccatatctgtacccgatgcctgtgtatggggaggcctccaaccatagttctgtcagcatcgaggaaccagattattcaaggtacacgagagcaagatacatgaaggaatactctgagagagtcattctaaattgtggtgatgctcttttcataccagaaggatggtatcatcaagttgacagtgatgatttgacaatagcaattaacttttggtggaagtcaagaataatgaatgaaatgttagaacatatggatgcctactatctgcgacgaatcctgagcaggtgttagtattttcttcagttatatttgttttcttcaatatgcactgcacttccatcagtgaaacgtctatatatgatttggtgtagaaatatactgtataagcctttcattttaccaatcctagtcattggcatgtaacgcgtatgtactaaataggtagtcacaatgtgacacaagcatatttgacattacaattaatacgactctacattagaaggatttaactaaattgctctttgacaaaaagaatatttggctgatgttaccatagtctagacaactgctatcccttactctgtgccagctgccaccttttaaaataataacaggatatgtggttgttcaactgaaggatatagagattcattcatttccaaatgtctagcctttagtgtggatgttttttcacttgacctgtttttaatcctactctaactggtttcctgttgttttggcatcttgcgggtgtctgcatctaaacatgattcgtagtaaagattggtggataaggagatggtacgccccattgcccctctatttgtgcattggtacaagatctttttttctttattttaaattttgtttatgccactggtttcaaatagccatctgatcaatttctatccttggcagcatctgactgttttgactagagatgattgtcatcttttgcgtgcagtattagatgcttgcactttccaatatttcttgtattcttgattctttatttctacttttaaacatctttcacatttcattggatggatattttgggtggtaactttgttcctctcatgaggcagaacaaaatggtgcaggagaattctgtttcttgttcaaaaggtacaactgtttgtcagcctacagatgaagaatcaggaggtcctgagcaattgaagcagaagcaggttaattctgattcatctgacaaaaaagattcaccactgcaaactctggaaccgtccaccctccaagcactttatgaactcatctcactggttcacaacagtgctgaaatggttagccaaaacgaaataacagaacctacatctcaggatgcatattgcaagcaaagcaatggaagtaagaagattgctgcagatgattcatctctcttggagaaagatcctattgcaaaaataattttaccactcaaaccgcttgaattgcagagtatgctgcttgccatggcggtatgtattgtgagctaaaaattttatctgctgatactgataccatatcattttcttttctttcatctatctttgtacattctagccctcctctttgacattagaattatatgagc

SEQ ID NO: 19150 - DNA, 1608 bp, Oryza sativa
  ref <308>: DATABASE ACCESSION NUMBER: AK069525
  ref <309>: DATABASE ENTRY DATE: 2001-12-06
ggctttccttctcccctcccaccaactaatcgatctcctctctctctctctctctccctctctatcccattcgcgaggcggcgtctcctcctcctcccgtctctctcgcttcccccccaaatccggcggcgaatccagggccccgcgccgcgccgacgaccaccgccgatcgcgaccaggagggaggatgctgggcgccgcgaggaggcagctcggatccggccccatgctggggcaggtgctgcggaggctccggccggcgacggcggctgcagcggatgcggcgagggcgtactccgcggcggcgaaggagatgactgtccgtgaagcgctgaactctgcactcgatgaagaaatgtctgctgatccttctgtttttctgatgggtgaagaggtgggagagtatcaaggtgcatacaagatttcaaagggcttgcttgacaagtatggtcctgagagggttctggatacaccaatcacagaggctgggtttactggcattgctgttggtgcagcgtatcaaggtcttcgacctgttgtagagttcatgacattcaatttctcaatgcaggcaattgatcatatcatcaattcagctgccaagtcaaactacatgtcagcgggtcagatatctgtccctattgttttcagaggacctaatggagctgctgctggagttggcgctcaacactcgcagtgttatgcggcttggtatgcacatgttccgggtcttaaggttctggttccatattctgcagaagatgctcgtggcttgctcaaagctgcgattagggatccggaccctgttgttttcttggaaaatgaactgctctatggagaatcattccctatttctgctgaagtgcttgattctagtttcgctctgccaattggcaaagcaaagatagagcgtgagggtaaagatgttacaattactgcatactccaagatggttggatatgctcttcaggccgcagatatattgtccaaagaaggaatcagtgctgaggtgataaaccttcgttcaattagaccacttgatagagctactatcaatgcatctgttagaaaaacaaatagattggtgaccattgaggaaagcttcccacagcatgggattggtgctgagatatgcatgtctgttgttgaggaaagctttgaatatcttgatgcaccagttgagagaattgctggagctgatgtacccatgccctatgctgccaatcttgagaggatggctgtcccacaggttgacgatattgtccgtgcagcgaagcgtgcgtgctacagagcggtgcccatggcagcaactgcctgataggagagacctcttttacatcatctttcttttcccgtccggccaacatatgattcataatggtgtccaacaattgcccaaactcaaagcgagctaattttgcaagatatttccatgacccccacctattcttttagctgcagttgcatcactgcgttcgttggtggtgacccaaatttccctctttttttttggtgtgtatgcgagaattatgcagcttatggtgattggttcacagtacacactggcgctagttacataaatgaaagaaaaatctgagctcttgatgg

SEQ ID NO: 19151 - DNA, 2918 bp, Oryza sativa
  ref <308>: DATABASE ACCESSION NUMBER: AK069526
  ref <309>: DATABASE ENTRY DATE: 2001-12-06
tgagaaaaaaaaatccccgacgcgagaggagacgagacgaagccatccgatccccacccttccccccctccccctcccccctcttcagcgctggaggcggcggcggcggcgtcccctggatccctcggcggcggcggtggcgcacggttatgccgagaggcacccaggttccaacaccgtgcactgccagggctctagcattctcattaaggatatggagtacaccctctacaccacaagttcctctgtattgcacatttcgctgctcgaggaagttcttggctggaggttttctctttacggagacttcctcgttatctcttttgtcaactgcacctgaagatcacacctcattcagcagccgtcttgcctggtcccatgctattgcacattagagtcgactattgattacagtgcagctgtagcacatttcttcgagcatggtgcatctcatcctcttgcatccttccggtagtttttgttgtggcactgatcagccagcaaaagttaccatcggaacttctttggacaatcggatctgacattagatcttcattgtcaggcttaatctctaggttctggttttctttacttccgtttgctctcttctcccctacactgcttgctttttgtttgatcatcccaagatttggtgcatactacgcagttctttgtcaggctttgtgtttgatggcgtaacaaaccgagtgaaggtgttcaagtttttttgtcagagtatgggtattgcttatagagtttttccagaagcgttgagtggctttgctgatctacccttcaaaggcatttcagcaatacacatatgagtcttgttcacaacagggctcttctagaataagaccagctttactctccagctagtaaaaatggagaggtataagattattaaggaagttggtgacggaacatttgggagtgtttggcgcgcgatcaacaaagagagtggtgaagtggttgcaatcaagaaaatgaagaaaaaatattattcatgggaggagtgcatcaatctccgtgaagtgaagtctttgcgaaggatgaaccatccgaacattgtgaaactcaaggaagtcataagggagaatgatatgttattctttgtttttgaatacatggaatgcaatctctaccagctgatgaagagcagggggaagcccttttcagagactgaagtccgaaattggtgttttcagatatttcaagctttgagtcacatgcatcagcgtggatattttcaccgcgaccttaagcctgaaaatttgctagttacaaaggagctcatcaagatagcagattttggacttgctcgtgagatttcttctgaaccaccatacacagaatatgtgtcaactcgctggtaccgtgcccctgaagttctgctccaagcttctgtttacaactcagcagttgatatgtgggcgatgggtgccatcatcgcggagcttttttcactgcgacctcttttccctggttcaaatgaagcagacgagatttacaaaatctgtagcattcttggtactccgaatcagcgtacctgggctgaaggactgcagcttgcggcatctattcgttttcagtttccccagtctggaagcatacatctttcggaagtggttccctcagcaagtgaagatgcgatcagccttatttcgtggctctgctcatgggacccacaaagaaggccaacagcggtggaggttttgcagcatcccttctttcagccatgcttctacatccccccttcacttcgattcagatcaacaaacggatatgcagcaacaccaccatcagttggggctaaaggagctgtggatcagaagaatgctaggagatattccgtggggcccttatctaatgggagaccagccgttaattactcatacttgagcgctaacaccccggcaagagcagctggtgtgcaaaggaagctggagttggatcaccaggtgaatatgaattcttgtcaggctccagagggtaaccataaactgacaaaggcagaggcaatgaatcagccttggtccagaccaccaccagcagcagcagcagtaaggagcaatggaaattacttcactaaagaccagggccctcgtgcgcctgacattgcggagaagctgtctcagctgacagtgggctccaacagggtgccaagcttggcttcggacaagtttgtggatatgaaggcaagaacccatgggaataccatgaagcggcctttgcctcctgtgggaaccaggacatggcacgccccggccgaccccttccggcgcccatacgagatgccaggcgacagggctttccttcccaggaagctcgttagctgaagactacgatgaaacggaagctgccgccacactcctctttgctaccctttcaccaatcctcctactatcctgaaaaataagaagccaacagagccgatctccctcgaagagtttttagtgctgtttcctagtagtgtcgtattggttgtgaatctcataccccaataaaaatggagatgtgccagcctgctggtactcctatcttgccttgcattggcatccatccatgacagcacctcgaggatgcagctgatcctcgggggcatgcaagcatggccgggcgcgtctgcatggaaaccttgtgtttcgagtcggaactgtgcgttatttgctccctagtgacgtgacgcttgttgagtcgtttctgctctgcgttggctggcccctgcctgtgacatcgcagctactacagtactactactactatgtcaaatattgttataggactattaccactacgtggtgcggctatgcttgtccagttgtttatgcaccatgcaggcatgcatgagtgcatgaccagcgcgtctgcagcaatcaaataataataataaatatatactattgctattattactg

SEQ ID NO: 19152 - DNA, 1281 bp, Oryza sativa
  ref <308>: DATABASE ACCESSION NUMBER: AK069527
  ref <309>: DATABASE ENTRY DATE: 2001-12-06
gatctctatcccctttcctctctcttctctgtccagcaacaccaccaccgactccgccgccgctcccgccaccgccacatccctcgccgccgcttcgcctcctagctcccttcttgcctctcagcggtcgtctccgccgtgggaggccgtggcgggtggcagcgggagcgggaggccgtctccgccgcagccacctcgacaccgaggatctccgggcggcatgccggggctgcacggcctgcctatggagatgacgacgggggagatggaggccgccatcgtcgccctccctgcgaagaaggaggcgctgcgggaggccccttcctcttcccctcgccggttgccgctgcaggcgctgccgccgttgagccgactcgattaattatacttccattccaatattctatggaagcaagcttaatttgcaaaagtgaagtgaagctgagcatagcatagcagagcatccagctcgctcagatggccttgaggaggtcggcggcggcggcgatgtcctggccgtcagcaagggtgacgatgttgggggactctatggccacgacgtcctccgtggtaaacccgtcctcgtcgcagaggagctcttcgctgccggcggcgaccatccccggcaggatcaccgtcctgtgcagccccgggaggaggcgctccctgtcggtatcgcccttctcgccgacgagcaccgccaccttggataggtcgatgccccactgtatcgacaggtacctgaaagattaatgcgtcgaacggttagagacgacgagatggtgatgaggtggtggtggtggtggactggtggtgatggtggcgtcgctggcggcggcgtctcacctgatcgcgcatggccgggagagagggatgatgttgaggcacatgcacgcgcgcgtgtagacgaggtttctttggaagccgcgcatccgcagcacctgcttgatccaatcgatttcttcaagaagtgttgtcatcaaatggtgttcgtggcaacggtggtgctctgcttaacttggatgtgtccttggcgacgtaggcgtggcagtgcacggagcaggcggcggcgtcgacggcgaggtccgcctcctgtgcgccatcggccttcccgagcctcggcacggcggacctcacgtggtcctctcccaccggagagacagagagaggatagagatgagaggggagaaagaggatgacatatggggcccacatgggtcccaccattattattattatttttgtgtgtgaaactgacatgtgggtcccactggttttatt

SEQ ID NO: 19153 - DNA, 1308 bp, Oryza sativa
  ref <308>: DATABASE ACCESSION NUMBER: AK069528
  ref <309>: DATABASE ENTRY DATE: 2001-12-06
gacctgtcaaccaccgaaacccacacaaaatacttggctctcaactcaaccgcatatcccccccttctctccgcgccgccgccgccgccgccgctcgccggacttacccgcatccgcacagaggcgcccccgccgcagaaagccccacatgtggcgccgacccgggcagctccgcctccacctcgcggcggcggccggagccgctggccgcggcgccaggaggaggaacccgcttccccctgtccccaccgtgccctcctcctcctcctcctcctccgcctctaccaccaccacccgcgatctcgcagccttcgctcggggctcctcctcctcctcccggagcctctcggaccgggcagggggaggcgagtgctggagctgcggcgcgagcggcgcgttcctctcatgcgggtcctgcggcagcgtgcagcccgtcgaccccgccgtcgattatttccggatctttggcctagaaagggaatacaccataaaggataacaatttagaagggaaatacaaagactggcagaagaagttacatcctgacctagttcattctaaatctgagaaagagagagcctttgctgctgagcaatcagcacttgtaattgatgcataccgcacactgagcaaacctttgtcaagggcattatacttgctccaactagaggggatacccattgatgaagaaaagactatcactgatcctgaacttcttatggagatgatggagatacgtgaagcagttaatgatgccaatgattctcaaaccctggagaagatacaatctcagattaagagaaagctggaaacctggtcccattccttccaggaagcatttgaaaggagggatttcgaccgtgcagtgaaagctacacagagaatgaggtattatgaacgcgcagtggaagaaaccataaagaagctctaattgtaaagtgtacagtggcaacagatgtggaggctagcccatgttcttggatgacccatgtttactacattgctcttaggatgaaataatgccggatgcttcctcaccaccactcaaccagccagcgctctcttcactccatggttgcaatgctgcaggaaggggaaagacatatttccacatttctcctcgctgtaaaaatatttcatcacagatatatacaggcagcactaggcagacaatgaaatggaaactgatatttgttattaccaagaattacattcattctttgctcaataagttatatgtaaaatgtgctacacttgaaaagttcagtgggtgcaaagcagtttaaagcatggacaagttgaagtttt

SEQ ID NO: 19154 - DNA, 2225 bp, Oryza sativa
  ref <308>: DATABASE ACCESSION NUMBER: AK069529
  ref <309>: DATABASE ENTRY DATE: 2001-12-06
ggctctcgttgcggccgccttgtactctgtcgcccgcaccgtggcggagacggcgcaccctccacggagccgcggggaccccgcagcgcgtcagcgtggcggcgccttccgccatcgtagaggccgtttcgccgccggcgaggttctctttcccgatactggtgaatggatgcactggtaaaatggggttatctgtggctgaggcagtcacttcaagtggtcttcacctagttcctatttcattcagtagtagagatacgctagacagaacagtacgggttggtcatacggatgttcggatatatggtccttctgcaagagaagatgttctatcatctgttattgatgaattcccagatgttgttgttgtggactacacagcacctgactctgtgaatgctaatgctgagctctattgcaagctcggtttgccatttgttatgggcacaactggtggagataggcagttactctataaatcagttcaagattcaaataactatgcactgatatctccacagatgggaaaacaggttgttgcatttcttgctgcaatggaaattatggctgagcaatttcctggggccttttcaggctatcatttggaggttttggaatcccatcaagctggcaagctggacatatctggtacagctaaagctgtaattgcgtgttttgagaagttaggtgtgtcatatgacatgaaccggatggttaagattagggatcctgagcagcagcttgagatggtgggtgtccctgaagaacatattgaagggcatgcattccatctgtaccatctcacttctcccgatgacagtgtttcatttgaattccagcacaatgtctgtggccgttcaatatatgctgaaggatctgttgatgccgcaatgtttctgcataggaaggtacgctccaatgattccaaaagaatttacgatatgattgatgtcttgagagaaggcagcatgcggtgaagttgatgaagtccgcatgaacaatatgtttagtctgggaggactattggactatagcatgatcatctgatgaaattagtaagtagctatctcatagtggagaagatgatgttccagtcaaactttcccagtgaacagtttgaagcaacccattgcagtaaagtttcttctagatcactgctttcaaaattgggtattaggcccctacatctccatgttatgcacagggctacctccttccctatcaaccatgagtacatgtgacaaggatgtacgtacctgtagggtttctccacattctgctcattgcagtggctgctgcctgaacggacaagcaatgaggagcaaaacataattgaccaagatttacagcccgtatcgaactttctagtgcttgttcttctgctgggttggagggccgtagatcggggtcggcttcggcggcgcgtacaccggcgtcgtcgtggacggcggcttgtgatcgggaacggtcaccggcgccggcttgtggtcgggcacggtcaccggaggctcgtggactggcgggagcgagtgatcatggtcatgcttgggaggaacgatcacgggcgggtggaggacgatgtggtggtggtgcttgtggaaaggatcgcacaggaacgcggaggcgcattccgccgacggccggtgcaccttgccggcgagcgccacgaacgtcttcgcgccgtcgtggccgggctgctgcgccgcgacgatcatggagggctcctgccccgggcagggcgcgctcgacgcgctgtgcagccgcgcgaagcagtcctgcttcagcacgccgtcctcgccgacgaggtcggcggcgagggggacgctgaaggcgccggacttgtccaccttccccacggccattttgtcgtactcgcccctgctgttcttgcacttgacagccacttgaagacctgacacatgttaaccacattatgttggagttcatgtcgaatgtgtgtacaaaatcagtcacatggtaggtctcgtggagccgtaataatcgaactttctagccgtttaatggttgatgatgctttaatacgtactaataattatgcaagtttggagaggagcgattgtgatcagtgtcccagggtttagctttggctggattattaacaaatatcgtgtcttcgagtcactcatcgtgttggatctacttacacgtttgactacatgtatcaattttggtttccagtttataaacacgcaatttagatcatc

SEQ ID NO: 19155 - DNA, 1749 bp, Oryza sativa
  ref <308>: DATABASE ACCESSION NUMBER: AK069530
  ref <309>: DATABASE ENTRY DATE: 2001-12-06
gatcatttttctaaaaaagaaaatcgctgcctcgacctcggtttctccgtcgcatcgccgtcgtgctcgctgcctcgctctaccccgtaaaatcccccccggccgttgccgcgcgaagcttttccctcccacaaatgcccgagaccccgaccacgacgaccaccacccgcgcgagcaccgggacatcctcacatggctcctagtctgctccgccccgcctccccgtgcctcaacctcgcgccccccaccgccgacggccccggccggagccgctccgctgtgacgatcggtggttcgaggccgctcagcgtttccctgcgtgtgggaggatctagccggagggactttccgtgtaccacaatggcctcaagagatcattctggtttgactcgacagcttttagattttcaacatggtacagtagatgagatagatggggaacatgatccattcatggagttgaaagcaaggttcatggacttcaagcacaggaattgtgtggataatatttctaactatcaaaatcttgctcagcagcaaacaccaaagttcatggtggttgcttgtgctgattctagggtatgtccttcaagtgttttggggtttcagcccggggaagcatttactgtccgtaatatagcaaatttggtaccaccatatcagcatggtgcttcagagactagcgctgcactggagttcgctgtcaacacactagaggtagagaatgtattagtggtaggtcacagccgttgtggtggtatccaagcactaatgagtatgaaaagtaagcaagatgattcgcaatctagaagctttatcagagattgggtgtcaattgcaaagagtgcaaggttaagtacggaagcagcagctggaaatttgaattttgaattacagtgcaaacattgtgaaaaggaatcaattaatagctcactgttgaacttgttaacatacccttggatagagaaaagggtgaatgaaggaactttgagccttcatgggggctattacaattttattgattgcacattcgagaagtggaaattagtataccgccaagggttggaaggtggaagcaagtatgccataaagaataggactacctggtcttgatcaagaggcattgcttacctgggtaaatttcactctgccccctgcagtttagcatggttttgctttgccactgtgctgtccattttcattgcactttgctccattgtggtattgacattctgcaagaacgagtcccagtatcaagtcactgttacggtgttgttggtaccattgattaacataacacttgacggccatacttggtcatgttgtatgttatcagcttcacagaggtacatgtggcactttaacagttatttgatacagtgactaggctgcagttgagcgaaaccacaatggagtgaagtgcaacagaaatgaacattatggcagcaaagtgaaagtttgtcaaactgccggggacaaagtgaattttgtccaaatatccctgtattattttctgcttagaagcatcatattaattcaataagctgcaaactcatattcataccaaaaacatgtacgatcttgccacatttggcaaattattgtgttgtatcatttatcgtgtaattgcaaaaataagatagagctttgtaatctggtgtgccgggcagctgctgtatcaatataataattctcaaatagttgaaacaatgttgtgtttaaagttcaatctttactgttcttttgtcg

SEQ ID NO: 19156 - DNA, 2087 bp, Oryza sativa
  ref <308>: DATABASE ACCESSION NUMBER: AK069531
  ref <309>: DATABASE ENTRY DATE: 2001-12-06
gtagtgcaaaccattgatatgaatcaggataactattttgaggaggcactcaaaatgagaaacctgcttgaggaattctatcagaatcatggcaagcacaagccttcaattcttggtgttagagaacacgtgttcacgggaagtgtttcttcgctggcctcgtttatgtccaatcaggaaactagttttgtcacattgggacagcgtgttctggccaatccactgaaagtaagaatgcattatggccatccagatgtttttgatagaatttttcatataacgaggggtggaataagtaaggcctcccgtgtcatcaatatcagtgaggatatttatgcagggttcaactcaactctgcgcttagggaacataactcatcatgaatatattcaggttggaaagggaagagacgttggtcttaatcagattgcactgttcgaaggaaaagttgctggaggaaatggtgagcaagtgctcagccgggatatatacagacttggacagctttttgactttttcaggatgttgtccttctatgtgacaactattgggttctacttctgcaccatgctaactgtttggaccgtgtacatatttctctatgggaaaacctatctggctttgtctggagttggagaatcaattcagaatagggtggatatattgcagaacacagccttgaatgcagctctgaacacacagtttcttttccagattggtgtatttactgctattcctatgattctgggtttcatcctggaatttggtgtcttgacggcttttgtcagcttcatcacgatgcagttccaactttgctctgtattttttactttctccctgggtacaaggacccactattttggccgcacaatactacatggtggtgcaaagtatagagcaaccggtaggggttttgtggtacgacatatcaaatttgctgaaaactaccgtctttattccaggagccattttgtgaaagggttggaggttgctcttttgttagtgatctttttagcgtatggttttaacaatggtggagcagttggctacattttgctttccataagtagctggtttatggcagtttcttggctttttgctccatacatattcaatccatctggatttgaatggcagaaggtcgttgaggatttcagagactggacgaattggctgttttaccgaggtggtattggggttaagggagaagaaagttgggaagcctggtgggatgaagaactggcacatattcacaatgttggtgggaggatactggaaactgtactgagtttaagatttttcatcttccagtatggagttgtttaccatatggatgcaagcgaatcaagtaaagcactattgatatattggatatcatgggctgtgcttggtggcctttttgtcctcttactggtattcggtttgaatcccaaggcgatggtgcatttccagttgttcctccgacttatcaaaagcattgcgctactgatggttttggcgggcttggttgtggcagttgtgtttacaagccttagtgtcaaagatgtgtttgctgccatcttagcatttgtgccaactggctggggagttctttcgatcgctgtggcgtggaaacctattgtgaagaaactaggtctatggaaaacagtgcgctctctagctcgcctgtacgatgctggcacaggaatgatcatttttgtcccgatagccatcttttcctggtttcctttcatatccaccttccagacccgacttctatttaaccaggctttcagcagaggtttggagatctctctcattcttgctggcaacaatccaaatgcgggagtatgactgtagctgctcccatccatctaagcatctccattcagatcgtggagctttacaatcactgttgttctctcttagcagtaggatgtatatatttcatggacggggagtcgtggatgtatcctgttggccacattgttgtattgatcttagtgcttctaattgtgattgctactgttgttttgtagctttagttgtggagttagcttttcatgtttgctaatacaactgattatattatcctattagattttgtt

SEQ ID NO: 19157 - DNA, 3340 bp, Oryza sativa
  ref <308>: DATABASE ACCESSION NUMBER: AK069532
  ref <309>: DATABASE ENTRY DATE: 2001-12-06
ggggaggaagagcgtcgcgcccccatcccctcctccccgtggcggcggcggcggcggcgagccggcgacttcccgccgccatgtcggcctgcggttaccactccccgcgcttctccgaggacattgcctttctccctcaatggctacagccgcatcggccgctggcggttggcgagcacgggaaggacagcgccgccgtttcgtcgccgtcttgtgtgaattgcgcgtttatcggaggccctgcacaagagcaacatagttgtctgaacaccatggtgaatgctgctagttgcagtgggtttagcttgcacttgtcgggggatgagggcacgcctactggaactactcctagcaatggcaatgtagtgcctttctctctgcatctttcttcagaaagtacttcaaaactatcctcaactcaagccaatggtctaaactctgttacatgcaaagatgtgttaggtggcttttgtattgatgaccaagcacaagagatcaagacagtgccgcaaaatcaatcggaagccaaagaccttcgagaaatttgtaaaatgtctagcgaggaaatcaataaaacatgtgattcaaaaggacatagaagacagcaactgtctggacgaaaggttgatgttcggaaactccgtagcgcggatgtgaatgatgcagttgaactatcaatcgctgcctctgaagccatggttattgcggaaatgatacttcttgattctcagtctgataaactagctacagcttccttagaagctgctctacatgtgaaagaagctcggaaacagtgttttcttgaggagctagaacattcttgtggatcctctgaaagtgatctggatgagactgataggctttcagaattagatgagactgaaatgctcgatgcatttcaagatgttggcctatctcttgttcaaactgcttgtgcatctcaaggtcagaacataagtggcctgaaacaggaaatctctcacgctagttctcacccttgtgatgcagaagctcacgtattagagagctctcctgagaagcaaaatattagatggaacagccatgatgctgatactaatgaccatgtatctgattctttagcaagtcacaataaggaaggtggagtagttgctgtgcagacaaatgttggtacaaggaagcatgtaaagggattattcaataaagaaactagcttcatttctgagtcaatggatggcatggatgagttcccttctccatctagaattgcttccatggaaatggctgcatcttcaagagcttcttttctccacaaaattaaaggttcttgtgaggaaaaccaaggtgctgaagctgcacagttgtgctctcaagttgtatgttcaaacttgtcacttgtggatcctctttgttccattgttccatgtagtatatctttcaacgaaggcccccctagtcaggcccctgaatgcatacagagtaaaggggataaagaattgatcagcaccaaagaatttccatcaaagcaagatctggagggagaagctggtccatcttgcacaccagtatctaatattctgctcaggcgaaggaaatacagttctctcagaccttttagcacaatagcacccagaccatatgtatcaaaaagtactgaacctcataatgatgttgatgaggcagtttgtcagcagggaagttttgcagcagtaactttaaataaaaagatacgacgtgtgcaagcctctaaagtatgtgtagaaaataattttgaagctggaaatttgcacgaattttctaaggttctaaagaatccatcttatgctcagggggtcagtgagcatcaaaacagtatgaagagtcttaaaagaaagaaagcccaattttcagaagctaaaattagtaccaggaaaaccaagaatattagaaggacgcagactaaatctcgattcagctggtcagatagcagactcattgacacaatcgaacccagggagtacattgataataaagaagccctatttcatggactggattttttgttgactggatttcagagtcacaaggaaaaggaaattgagccattgatccgaaaatttggaggctatgttctttctagagtgccatcctgtccacttgataaaagaagcaagctggcagagcttgctaggtgcaagcctcccattgttctttctcctaaaaaggtatcaacggctaagttcttatatggctgtgctatcaactcctggattttgaatcccagttggctttttgattctattcaagctggtgtcatgttgccacctggaaagtattttattcgacaagtgcattcaatgcagggtatttcaatgtttgaccagtcactgcacctaagaaagaatacattgttatttgatggggtaggattcttaatccttggaaaaatcagcttctgttccaaattttccaacgttatcaagcatggaggtggccaagtttttgcatctcttcagggattagttcaaagcttgaaggatagaagctcttcacatggaatcattctcgtagcaagtgaggcgagcgcatcacgccatctaagctattgtgggcttgagcatgacataaaaacagcgccggcgagctgggtcattggcagtctatattctggtaaactgattcctctgaagaaagatcgatgtgcctcattccgcaaaatcaagatgccatcattccaacaaccgcaagcatttgacatgagccaagaaatttgatgattcagatctgttgcttagctaccatcacataagaaactgaccaattcttactgatacatacttaccagggatccagtatcctctttctgcaacagttttcaagagcatgtgtgataatgggactcatctgtggtgcgctcatgctgatgcttatcgctggcaacctttggagtgtggagtgccatatatccatttttctctttccaaataccaaaaggcgactgatgtcaaagcatctcgagaaatatatggttgactgctaacttgaaatatgccaggtcatgtttcacttgaaatatatccatactgtctctttcactggggaatgttgttcatttctgaagatcatgttattctggggagtgttgttcgtttctgaagacgtgaagatcatgatattgttgtaaatgcaacagtttttctcattcgtacacttggcccggaaaaaaaaatcatgatattcagggtagagaatgtttctgtttgttgtctgttgtaatttgtaaatacggatacctgagaaaacacacctctcacttgcaatatcgagtgattcgcatatctatcatgccatcaaaattggaaggcatcgattatagtgtttt

SEQ ID NO: 19158 - DNA, 1878 bp, Oryza sativa
  ref <308>: DATABASE ACCESSION NUMBER: AK069533
  ref <309>: DATABASE ENTRY DATE: 2001-12-06
ttgggacttttcaggtcagctagctactgcaaatagtcaatgagtgaggaggcaccgccatcgccggtgatgaggccggtgttctacgatggctgccccggctgcgccatggaacggaagctggagagcagccaaggcatcccctacaaggagttcttctttgttgggatcaccaccattgcctcttctttaccaatatcctcgttgttcccattcctctacttcatgatagaagatctgcatgtggcaaaaaaggaacaagatattggattatacgctggatttcttggtgcatcatatatgatcggtagatgttttgcctcactcttttggggtgtagttgcagatcgtatagggaggaagcctatcattaaattttctattttatcagtggtcatattcaacactctgttcggattaagtgtgaagtattggatggcaatcgccacaagattccttcttggtgctctaaatggcatgctggccccaataaaggcttattccattgaagtttgtcgacctgaacatcaagctctaggattatcaatagtaagcactggttggggcgtagggcttgttgtgggtccagccattggaggctactttgcacagcctgctaagcaatatccaaatgtattttccgagaagtcaatatttgggaggttcccatacttcttgccatgcctttgtatctcactcattgctcttgttgttcttataagctgcatatggctaccggagacacttcataagcataaagatactgaaggtgaaattgaaatgattgacgactcaagaagtacacttgaagaagattcacataaacagaagagtctctacaagaactggccattgatatcctctattattgcatattgtgttttcacccttcatgatacagcatatagtgagatattttccttatgggctgtaagtgagaaaagatatggtgggttaagtttttcgtctaaagaagttggtcaagttcttgcagttgcaggtgctggtctacttgtgtatcagcttttcatctatagatcggtccataaatttcttggatccatcaattcatctcgtattgcatcagctttatctgtaccaattctcgctacttatccctttatgacacacttgtcagggtttagacttggaatagctctttaccttggaaccattttaaagggtgttttatcaataactatcataacgggcacttccctactccaaaataatgcggtttcacaaagtcaaagaggtgctgcaaatggcatatctacgacggcaatgtcattcttcaaggcaattgctccagcaggagcaggagctctgttctcttgggcccaagaacgccaaaatgaagccttcttcccaggggatcaaatgatattctttattctgaatgtgattgaattaattggacttgcgttgaccttcaagccgttcctggcaataccaaattaaacaattatcagttgaagtagaagctggaatagcacccccaagcaatgaagaattattatgcaagactacactgtgttgtggtttactgaattgatgtttggcttaagtgatgtacatagaaatatatggcccatcttcagaatcataaaattaatgtacaagagactgtttatctgaaaatgttcttctttccatgaagaccctatgtatggtgatggattagagtttacattgcgtggatgcaagcatagacttgaaggcagtgcaatgactactaattttagcttccacatttcttgtacgcaagcctgtctctctccccagcttcaaaggaatggggagatcttgtttcatgcgtacagtgttggatgtttactactccgaatcaatcaattacccaggaattcaggaatgttt

SEQ ID NO: 19159 - DNA, 3323 bp, Oryza sativa
  ref <308>: DATABASE ACCESSION NUMBER: AK069534
  ref <309>: DATABASE ENTRY DATE: 2001-12-06
gagagccaagagagagggagacgcgtcaccacccttcccttcccaccactttccttctctcctccgatctcctcgcgcgagtctcccgcctttctctctcccctcccctcgtcgccggcggattctccggcgaggtcgccgccgccggtgtccgaccccgcggcgcctcccccccctcggcccgtccaatggagggcatcgaggggctcctggcggacttcggcgtgcggccgcaggggaaggccgcgcccatggccgcctcccgctcccgctccaccaccaccaccggatccgcctggcccaaccctagatccaccccagcgcccgcgcagtcctacgacgggctcttcggcgcgcccccctccgcggccgccaccaccacctcctcctccccgttcgactcgctgttcaatggccctcctacttcctcctcctcctcgtcgtcggcggcggcgagggccacggtgtacgacgacgacatcttcggcgcggtcccggggctgaggccgagctccaattcggcgtcctcctcctccgcggcgcggtacgacggcgacgacgtgtttgggggtggccggcgcgcggcggcgtcccccgcgtttgatgacgtgttctccagcaaccgctcggcggcggcgccttcgtacgacgacatactaggtgggttcggggtgaagccgcaggcgggggaggagaagaggtcggtggtggttgaggacgacgacctgctcggggggttcgggaggaagccacattcggaggcggagaagaagccggtggtggtggagaaggctaatgggggcaacggattcgatgatctgatcccggggttctctgggagcggcccgcagaggagtaggaagattattgatgataacaaagatgagccagcagttcgaacttctaaatcaacagccagtgtattagatgatgacccatttgttgttctagaaacaaattctgcctcaggttcaacatatccatcccctagcagcttcatggatcccttggaacatctgaataattctgcaagctctaaaggcaagaatgttgataatactactgataatgatagtctgcctgatgattcaagtgcctttaaccaggttccaaaatcagatcctttgtttacctcagaattcaatggtgatacaaagtatatgaatccaccaagcaaagcccgagactcaaaccctctacatggttcaatgaatggaaattcagcacggggatcttctacggaggacttaggagatgccaagacaaagtcacagtctgcaaggtactctgatatttatgtcgatggctcaagttcagacagatatgctactgatggcgttggggatcagtcaccaagatctactgaatccgaagatgacatatggcttacagtttctgaaattcccctcttcacacagccaactaatgctccaccgccctcaagatcaccacctcttcttaaacaaagacctctgcaagcaaaagctaatggtaattatgatgggtatgtgcggcaatcaaaccaaaatcacaaccaatacagagacatgccagatcaagcagaggtttcttcactagatgagatggaaggttttgcgaaggacaagtcccaaatgccttcttatgacgacaatttttttggtgaagctgaacaatctgaaagaacttcatcagatcgtgaagagaaagagaggcaggccagattggagcaggaacaggaaatgaaactgatggaggaaaagaagagagaacagagacgacttgaaaaggagagagaattggaacagcagaaagaaagagaaagacaagccatggagagggccacaaaggaggcccgagagagagcatctgctgaagctcgtgcaaaggctgaaagggaggccacccagcgtgcacagcgcgctgctgtgcaaagggctcaacaggaagctcgtgagagggctgcagctgaggctaaagaaaaagctgcaaggattgctgcagaagcaagggagagggctgcacctgaagccaaggagagagagagggctgcagcagaaagagctgctgccgagagagttcagcaagaagcaaggaagagagctgaacgtgctgcagtggaaagagctgctgctgaggctcgggaaagacaggcagctgctgcagcagctgctgctagagaaaaacagagctcagcagatgatcttgagtctttctttggtgcgggtgcccgagcaaatagtgcgccaaagcagaggactccaacagtggattctatgtttgattctcaacctcaatctagagcaaccacgaatggatcacagagatcagcctccacctcagcatctatgagaaaagccccgtcagccacaaatattggggatgatctatctaatttatttggagcccctgcatcatctgatgtattccaagaagttgagggagagagtgaagaaagaagacgtgctagattagaacgccatcagaggacccgtgaacgagcggcaaaagctctggctgagaagaacgaacgggatatgcaggttcagagggaacaggcagaaagagacagaattggggacacactagactttgaaatcaggaggtgggcagctggaaaagagggcaacttacgtgctttgttatcaactttacaatatatactttggccagaatgtggatggcaagcagtatccttgactgatttgattactggcgccgctgttaaaaagcagtacagaaaggcaacattatgcatccatcctgacaaggtgcaacagaagggtgcaaatcttcagcagaaatatactgcagagaaggtgtttgatattcttaaggaggcatggaacaaattcaactctgaagagctcttttaaaccatccaccatatgaatggatataaatgttcagcctaactatacccacatgaagaactggaggaacaaagcagagaaacggtgcagtgatcaagtgaaaactctgctataattacagtactatcattgtttcgttcttacacccttaccattgtgttttgctctcatgatcgtatttgttcactccattatacttcgaatcttcaagacttgtacttatacctcacacgggcaacggcggcggtgtacatggatgtagcttcttcttcttcttcttctgttcattggattagtaatggcacggttctttgggaaggcttttatacaagcatattaatagggtaaagatacgtgtacaaaaaattcttttacaaatactttacaaatgttattgtggaccgctgtattgaatcttgattcctatagctttctaactgattaaatccaatggttgagaattttgtttgc

SEQ ID NO: 19160 - DNA, 2352 bp, Oryza sativa
  ref <308>: DATABASE ACCESSION NUMBER: AK069535
  ref <309>: DATABASE ENTRY DATE: 2001-12-06
gaatctcgattcgccactcccatccccgccggccgccgctggcccctttccccttctccgaccggaccgcgctcctcagatccatcgcagggcagggcaggacgcgcaatccactgcggtcgcatctgtttgctggagacccaaacttttaggcgtcgagactccatcccagtctgacttcctgctccgaccgcgcgcctcaaggaagctttatctcggctcggctggctacatcttctgtttgctgctgctgcttattggagctggaacttgggagttgctgatcgactctgaagatgggcctgtcgcgtcgggctaagaatctcatcgtcgacgtccccttccaaggcgccaaatggctacgctgcgtcgatctggcaggccagctgttcggtaacaccgctacaccaccaccaccaacaacaatcgcacatggatcagagtcagcagctgtgcaagaagactacacctctcagacactggtgtccgactcctgtaatcccaagaagaaggcagcaggcttaaagatggagaggattcggcttcccagacccatcctcaagttccgacctgctctaaacgaggcatgtaggattgattgcttcccttttgtggatcacaagatgttctgggtggatcacttggggcgccctttcctctttgaagcagagacacggctgatggacatgttgccctgtctccacaagcccaagtcgatgcccttttctgtgtttgtacccaacgccgatgctgacaatgactatgaacaccaccgccctggcagcagtctttttgttatggagaggattcccaagccagaggtcaactcaagcacacagtggagcgatcagtttgaggcctttgtctactgcaagcacaagcggacatcgaccaacttctccaagacctggcagtggcaactcctcccgccgccgccgtacgttcgtgaacctaagtactggcacagctgcagccgcccagagatcagctcctacacatcgctcacagtcaatggtgacccccacatttgcatctccatcgatggtgttggcacctactgcctgaacacggcaagccacacatggataaaagtcggtaattggaccctacccttccatggcagggttgagtatgtgcctgagttcaacctctggtttggcttcagctccgatgagtcaccgcactacttggctgcttctaacctctctgccatggactcccagccacagttagtgggtcgttgggaggagctttacctgccagaggatttgaaggaatgcaaaaaccctcaacttgtcaacctcggctctggcaggttctgcatcacaaggttcttccactctaggagtcacaacagtgactctcggggtgatgttgaccagaatgttgctgtctttaccggtgtggaggtgaagccatgtttccaggatgccaatggcggcagtgggaaagtggaactccaaatgatcccacacaaatcattatttcacaagtctaatcacactaccatcgatgctgtgttctgaacatttttgacgcactattttgaaaactccctgttttattgctataattttggttgttacttctgggtctgaaaaatatataattttggtcgttggcagtgtaggaggtaactcagcgtcttcgtctaatatgtagtgtagtgttgtatccgaagttatgtcgccttctcttgggcttatttggagagctactccttgtttacattaagcagcatcgtaaactgttaagcgatctattttttaagaaaactttatatttagaaatttctttaaataatcaaatagatctcattttcatctttttgtgtttgcaatagctaatacttaattaattatgtgctaatgctaatgatctttcttgttttggcgtctggcttatgaagttatgagcttactctaaacttcaattcaagctgagcttaaaattaactccttgatttgttcataactttgatatgatctatgttttggatccgtgcttgtcatttagcctggggatcagtcttaactgttgtcatgttctgttaccatttgtttggtacaatatcttcatcgaaaatgtattatggcctgtttagttcccacaaaaaaatttacacactgccacatcgaacgtttgaacacatacctaaagtattaaatataagctaaaaaattaactaattacacagattgcgactaatttacgagatgaatctttgactaattgcttcatgaattgacagtgtagtgttatagtaaatatgttaagtgacagattttgtaattagtttttggggcaattgtatccatgcccccacttttaaatccaattgttgttttaccc

SEQ ID NO: 19161 - DNA, 1296 bp, Oryza sativa
  ref <308>: DATABASE ACCESSION NUMBER: AK069536
  ref <309>: DATABASE ENTRY DATE: 2001-12-06
ggccgcgccggcggaatccccgggcctcgtcgtcgtcggcggcggcgatggggtcggtgtccctcaacgtgccggcaccccgccgcggcggcggccggcgcatctcctgccactgcacaccgtcgctgctcaacctgctcatgttcctcgccctcctctccaccaacgccctcgccctcctcgccttcttctcctcctcctcctcctcctcctcctcccccgccgcctccgccgccaccgcggcggcctcgacgatctccgaccacgtcgcggccatcgcccgcgagatcgacacctcctcctcctcccacctgccgtaccgcgcggacggcctgccaccggagctcctcctcttcctctccccgcacgcgctcccgctgggccgcgacgcccgcacggggctcacccacatgccggcctccgtcgcgcactcctgcttcaggtcgcccgccacgctctccctcctagccgccttcatgtcctacgacccgcacgccgcctgcccgcgcaacgccaccctgcagcagcaccgcctcctctccaaggcctgcgagccgctgcctcgccgccgctgcctctccggggggccccgcgcggcgctcccggcctccaacatgggcgtcgacggccgccgctgggtcaggccgcgccacgactacgagttcctcctcgacgacgtgctgcgcctcggcgccaccaggatccggattggcctcgacgtcgccggcggcgccgccaatttcgccgcgcggatgagggaccgcggtgtcaccgtcgtcaccacggtgctcgacaacgccgggaagcccatgaacgagttcgtggcggcgagggggctgttccccctcctcctctcgccggcgcaccggttccccttctacgacggggtgttcgacctggtgcacgtcggcaccaatgcgctggacgaaggtggcgcgccatcaatggggaattccggcacggaggaggcgctggaattcttcatgttcgatgtcgaccgcgtgctccgcgtcggcgggctgctctggattgatagctacctgtgccagagtgaggagaggaggcaattggttgtgaatctcattaagagatttggctacaagaagctcaagtggatggtcggagagaaagccggcacggggagcgcaaagacggcattgtacctctcggcattgttgcaaaagccggcgagggattgatactgaactgatggatgaattgctccaagctcatcacttgatccgaggtacgaatgtacctcacaactattacttgtagttcagctgttttgatgcc

SEQ ID NO: 19162 - DNA, 2565 bp, Oryza sativa
  ref <308>: DATABASE ACCESSION NUMBER: AK069537
  ref <309>: DATABASE ENTRY DATE: 2001-12-06
gggaagagagagagagttaagctgggctcagggaggactaggagagcagcagaggcgaccgcttgttgttgctgctgcgtttgcgtttctagggtgtaagcacgggccatctttccggtgggagctttgaatgccaatcttcaccaccatagtagtactatctcattatctctccctctgagtcctctctcgatccggttcggcttgctcgggttcgcgcaacggaaaggcgagatttttgaggggatgaagtagttgccattctgatatccttctctatctatccgcttcgacgagccgcgatctctgggagtttatctttcaggaatcttgagaagcctatgcaattgctggttcttcatcaaccttcgcaagttttttggttccgtttgtagatattagctaaccatagatcaattatagtttagccatcttataaacaagctgttgtgagaatttgacttcagatgggccaaggagttgcggctattcctggccttgggtctcttggaggcgtttcctgcgacaaattccttttctcctttgcgaaattctacttcaacatgtggtttctactgatccaggcatccaaagttggaatttgatcacttgtgaggtagcttctcttcgctttcgtggtttgccagaatggagagagagaattcatggctgaggagaaccaagttctcccacaccgtgtacacaaggttggatcaccaacgggcgcctattgctccccttggcagggatgtggagcagaaactgcagagatttattagtatggggaagtctgtgtcgatgcctgttaaccgggacgaggatgcagtggctgcgttcaagcactctgtgagcttgccaacagcccgctcctcgcttcagattgataaggaaaaggccaacaagcagaaggcagattttgatatcccttcaagccctccggtgaactctgttaattcgaagggcctgaaggcaaggagcctggtcaagagcccaagctcagcgatgcttctcagctacttgaacaaggcacacccgaatcgagattcaaacctcaagaagactgacagacctcagcacaagctgagatcaaagtcccctcttccgaatgtagcgccttctgatgtgttcagagaagcacgtgcaagtagcaggaggtttacaagccctcccccaaagcgaaggggatctgaaagaagcatttacggcaaatcgtttgatagacaactgtctgatatgagccaaagccctgatttgtgttcaaccccagtgtcctctgataagcacaagtctctaaaggatagctcatggactaggagatattttgataatggtggaaggaggagggttagtgcagtggacgctactgaagttcggaggaaccgcggggttagtatggctcaggcagttcaaactacagttgattggacacttgatccatctaagctgctcgtggggcataagtttgcatctggggcatatagccggctctacaaaggactctatgatgataaaccagttgccattaaatttattggcaacctgatgatgacgacaatgggaagatggctgcaaaacttgaaaaacagtataacagtgaggtcaatgctctatctcacctctatcacaagaatgtgatcaagctagtagcagcctataaatgcccaccagttttttacataattactgagttcctccctggaggttccctgaggtcatatctaaatagcacagagcatcaccccatccctctggagaagatcatatccattgctctcgatgttgcctgtgggttggagtacattcactctcaaggggtcgtgcaccgtgacattaagccagagaacattctctttgatgagaacttctgtgtaaagattgctgattttgggattgcctgtgaggagtcaatgtgtgatgtgctggtggaagacgaaggcacttaccggtggatggcccccgagatgatcaagcgtaaggcatacaaccggaaggtcgacgtctatagctttggactactcctatgggaaatgatctctggaagaattcctttcgatgacttaacccctctccaggcggcttatgctgttgcaactaggcatgcgcgaccagtaattcctccagaatgtccaatggctctgagaccgttgatcgaacagtgttgctcattgcagcccgaaaagaggcctgatttctggcagattgttaaaatcctggaggaatttcattctgttctctcccaaggtggctgcctcgactcactgaagagcagcaacagccaggatcagaaaaagcgacttctgcattggattcaaaagctgaaaccctcacatagcacctgagttcctgtagtctctagcatcctttctgccagatgtttttatccggttctgtatgctcagtagcttagcataagattttcatttttgttcagaaaaggtgaacctgtgttctaggatgcttggacatgtttatcaggtgaattgcaagtaggtttacagtacctgtatattgtgctacccttctgctctcttctctgtttttgtgaaatttagtagcagatcattc

SEQ ID NO: 19163 - DNA, 1842 bp, Oryza sativa
  ref <308>: DATABASE ACCESSION NUMBER: AK069538
  ref <309>: DATABASE ENTRY DATE: 2001-12-06
gagtcgacggagagggggagaagaagagggaggagtagacgcaagcccacgcgaaccgaatcgaatcgaatcgagaggagaggggaggagagagcgcaaggaataatccgtaatccgttcgcggcgaggaggaggaggtgggcccagcgatgcaggcgcacagatcgccggcgatggtggggggcggcggcgcgggggccgtcgggccgccgtcgccggcgacggtgccggtgaggcggcgctgcgagggcacggccatgggggccatcacgctcgacctccgccccggcaacggcgtcgggcccttcaccctcgggatgccgatttccggtgcgttcgcgcagatagagggccagccaacactctacgacgttgtccacgtgaagtacttcgatgaggagcctctaaagttggattttgtcataagctttcctgaccatgggttccacctgcgcttcgatccttggtcacagaggcttcgtctcattgagatctatgacgtgaaaagactgcaactgcgatatgcaaagtccttaattggtggcccatcaacattagccacttttgtggctgtttatggattattcggacctactttcccgggtatatatgacaaagagaggggcatttacaccctcttctatccagggttatcctttgcattccctatccccagtcaatatacaaatttgtttaccaatggggaagtggcagatttgcctctggaatttcctgacggaacaactcctgttacttgccgggtttctatatatgacagttcaacggatagcaaggttggggttggatcactgatggataaagcagttgttcctgcattacctgcaggcagcctgtacatggaggaagtgcatgcaaagcttggtgaagagcttttgttcacgataggcgggcaacatattcctttcggtgcatcaccgcaggacgtgtggactgagttgggtcgtccatgtggcatccaccagaagcaggttgaccagatggtaatacattcagcatcagacccccgccctcggacaactctttgtggggattatttttacaactacttctctcgtggtattgatatcttatttgatgggcagacacacaggataaagaagtttgttttacacacaaacttccctggtcattcagatttcaattcctatatgaagtgtaactttgttatctatgatgccgaagctgaagggacagatcagcctggtagtatccctaagagttgcataacgcctcgcacaaagtgggaacaagtcaaggagatccttggtgattgtggtcgagcagcaatccagacgcaaggctccatgaataatccatttgggtcaacttttgtctatggatatcagaatattgcttttgaggtcatgaaaaatggatatattgcaactgttaccctctttcaatcatgaggtatgtatttgtccttgctgcacatagtatgcaaaatctgtaacactgagtcactgaccaacagtgaaacgggacaaaaatttcaatctcagtgctaacagctgatggtgatgcatatccagccgcatctgcattaatggttagacagtgctgctactccaaatgggactctagaaagtgcttggttctggccatggaatgcagccgcagcgctcagcatggataagcatcactaccttgtattcattctgtagatacaactcattgtacaggaactaattgtatcctgcaatcttacgttttgtacatatgatatttatttgttgaaacaagaattcagatataccagctgtactgcctgtttaattcgatcccagtgatgaaataatgggcgtgctttcctttccatcc

SEQ ID NO: 19164 - DNA, 1276 bp, Oryza sativa
  ref <308>: DATABASE ACCESSION NUMBER: AK069539
  ref <309>: DATABASE ENTRY DATE: 2001-12-06
ttgatatggtgtgttcagagctaagtaattttgaggaactggatggagttgaagaagatggaaactatattcctgctattgccattgtcggaagacctaatgtcgggaaaagtagtattctcaatgctttagttggagaagatagaactattgtgagccctgttagtgggacaacccgtgatgccatagataccgagttcaccacagaagatgggcagaagtacaaactcattgacaccgctggcatccgacgaagggcagcagttgcttctgctggcagcacaacggaaacactttcagtaaaacgtgcatttcgtgcaatccgccggtctgatgtggttgcccttgttgttgaagcaatggcctgcattacggagcaggactataaaatagcagaaagaattgagaaagaaggaaaagcatgtgtaattgttgtgaacaaatgggacacaatcccaaacaagaaccatcagagtacaacatattatgagcaagatgtaagagagaagcttcgcatactcgactgggctcctattgtttattgttctgcaacacatggcagcagcgttgacaagataatttctgctgctgcactagttgaaaaggaaaggtctagaagacttggtacgtctattcttaatcaagttgttagagaagctatagcattcaaaccaccaccacgaacaagaggtggtaaaagaggtcgtgtttattacacaacacaggctgccattcgtccgccaacgtttgttttctttgttaacgatgcaaaacttttccccgagacattccgtcgttacatggaaaagaagcttcgctctgatgctggattcccaggaacccctattcgtttattgtggcgtagcaggaagagaccagataaaaaaggtaaatctgcagacaacagcttgcagagctcagtaatcccaagcagaatggcgttagccacatgagttacacatgcttttcctttcttgagagcggaaaaagggagagaatacagaatgctttgcctgcattttttcccaagaggtcaagactgccggtaaaaaaagagtacaaattgtatatgtagtggacgagtactaggactggaggtcatctactaggtgttgtgactacatggtgctagtataagttctgtatccttggatgtctaggatgaccagcaatttgccacgtttggtgttctgacatttgcttgtgccttggacgaatactgaatagtactctctccgtttcaatttcaggttataagaagttttgactttgatct

SEQ ID NO: 19165 - DNA, 1994 bp, Oryza sativa
  ref <308>: DATABASE ACCESSION NUMBER: AK069540
  ref <309>: DATABASE ENTRY DATE: 2001-12-06
gagggagcggaggctgctcgccgcgccgcgccgcgccgccgcgcttggtcatctccgccgccgccggccgtcgccatgggcatcaagggtttgacgaagctgctggcggagcacgcgccgggggcggcggtgaggaggcgggtggaggattaccgcggccgcgtcgtcgccatagacaccagcctcagcatctaccagttcctcattgtggtaggaaggaaaggaacagaagttctgaccaatgaggctggtgaagtcacaagtcatctgcagggcatgttgaaccgaactgttaggattctagaagcaggaataaaacctgtttttgtgtttgatggtgagccacctgacatgaagaaaaaggaactggcaaaaaggtctttgaagagagatggttcttccgaagatctaaatagagctattgaggttggagatgaggatttaattgaaaaatttagcaaaaggactgtaaaggtcacaaaaaagcacaatgaagactgtaagaggctgttaagcttgatgggtgtccctgtagttcaggcaccaggggaggcagaagcacagtgcgcagcactctgtgaaaatcacaaggtctttgctatagcttcggaggatatggactctctaacttttggtgctagaaggtttcttcgccatttaaccgacctgagttttaagagatctcctgtaacagaattcgaagtgtcaaaggttttggaggaacttggactcacaatggatcagttcattgatttgtgtatccttagtggctgtgactactgcgagaatattagaggttttatcacgttttttcttttttcacacacttaatattagattctaccaatgatatcatattaccatgctgtattcagaatttagaggttgcttcattactttctcatgtcatgggtgctttagacatagcattctccattgctaatgtatctataatagaaatgtggaagtgtgatatcctattcttgagttaaaaacttcaaattatattttctgcaattgcttttatagctcaacgctttgtgcttctgttggctaaatcttgaataaatgccactcaaagttctaagaagattgtagagatatcataatgctggagaattgaatgttgtgtatgctgcatccttccttgactatctttatcataaatttatacaagtccttgcattttattattacttcttgtcttgttttgaataggtattgggggacagagagctttgaaacttattcgtcagcatggttatatagaagaagtagtgcaaaatcttagccagacaaggtatagtgtcccagaagactggccttaccaggaagttcgggcattgtttaaggaacctaacgtttgtacagatattccagacttcctgtggaccccaccagatgaggagggccttataaactttttggcagccgaaaataatttcagtcctgatcgagtagtaaagtctgtagaaaagataaaggctgctaatgataaattttcccttgggcgagggaagcttttggcaccagtagcgaacttaacaggatctacatcaactgcagggaaggaacccaaatgtatcctgggtggtccagggcaagtcatgaaggctaggtcacctctacaagtgtgcaagagatcaagcttgaacttcatacatgacaattcaaaagcgttcatgctgggcaggcgatcaggatttctcagaatatctacatatgcttccatctgaatctggagctgctctatttccatgagttggttggctgaagctttgactgacaccatctacagcttcatgaagaattagtgatttcttgaaatgcgttgagcctatgctattattgtagttcagccttttgccttgtaaaatcaagctgaatgcttgagctttctcacatttagcactggttctcgcttgagtgttgaacggtgaccatgaagaatttgatcaccttttggctataatctgaaattttgtcaaggtgcc

SEQ ID NO: 19166 - DNA, 1995 bp, Oryza sativa
  ref <308>: DATABASE ACCESSION NUMBER: AK069541
  ref <309>: DATABASE ENTRY DATE: 2001-12-06
ggagcagtacacccacgtctactcccgttaaccccgtgtatagactcactgacacgccgggcccatccccgacctcctccgtccacgtcagcaacgtcacgtggcgcgcccgccacgctgtccccattggctacttgcgccctactccgcctactcccctcatctccttcctcctcctccgccgccgccgccaccactactaaaaccctagctgctcgcctcgcccacgccctcgctcgcctcgcctgatcccgccgcgtcgtagcagcagggcggagccatgtcgtccgggaagggaggtggaggcggcggcaagggaggcggagggaagaagaaggaggtgaagaaggagacgaagctcgggatggcgtacaagaaggatgacaacttcggggagtggtactccgaggttgtcgttaacagtgaaatgatcgagtactatgacatatccggttgttatatcttgaggccatgggcgatggagatctgggaattgcttaaagaattctttgatgcagaaataaaaaagctgaagctgaaaccttattatttcccattgtttgtcactgagaatgtcctacagaaggagaaagaccacattgagggctttgcaccagaggtagcatgggtcactaaatcaggaaaatctgatctggaagctcctatcgcaatccgtcctacaagtgagactgtcatgtatccatacttctccaaatggataagaagtcatcgggacttacctttgaggtgtaaccagtggtgtaacgtcgtgcgatgggagtttagcaatccaactccattcataaggagccgtgagttcctttggcaagaagggcatacagcttttgcaactaaagaggaggctgacgaagaggttctccaaattttggaactctaccgaaggatttatgaagaatttttagcagttccagtttctaaagggaggaaaagtgagatggaaaaatttgctggtggactgtatacaacaagtgttgaggccttcattccaaacacaggacgtggtgtacaaggggcaacatcacattgtcttggtcaaaactttgcaaagatgtttgatatcacttttgagaatgataagggctcaagatccatggtgtggcagaactcttgggcatacaccacccgctcgattggggtgatggtgatgacacacggagatgacaaaggtttagtgcttccaccaagggtggcacctctgcaggtcattgttattcctgttccatacaaagatgttgacacaacagctattgtaaacgaatgcaaaaagactgttgagacactggagaaagctggtattcgagcagacttggatacccgcgaaaactattctccaggatggaagtattcccactgggagatgaaaggcgttcctctaagaattgagataggtccaaaagatatggcaaacaatcaggcccgtgttgttaggcgagacaatggtgcaaaagctgatattcctacggctgacttggttgagaaagttaatgggttacttgatgaggttcagaaaaacttgtttgagacggcgaaacaaaagagagatgcctgccttaaggttgttaacacctgggatgaattcatagtggctctgaatgacaaaaaattgatcctggctccatggtgtgatgaagaggaagttgagaaggatgtgaaggctcggacaaaaggtgacctgggagctgccaagacattgtgtacaccatttgaacagccagatctcccagaaggaaccacatgctttgcttctggaaagcctgcgaagaaatggtcattctggggccgcagctattgatctgtaacggatctcggttgtgatcattcattcctgctggcgaagccgttgattcaccatagacatgtattgcagttttcatactagcaaagcatgatacacatacatctatttaccgtgcagttttgctgcttgtcagaaatcttgacattggaatgtttaagtaacatcttgtttggttc

SEQ ID NO: 19167 - DNA, 2075 bp, Oryza sativa
  ref <308>: DATABASE ACCESSION NUMBER: AK069542
  ref <309>: DATABASE ENTRY DATE: 2001-12-06
ggtcgtcgtcgttgtcgtccgtagcgggagggagggagagagtacgtgcgggcgtccggaggtctcagcgcacgcccgcggccgggccgtcgcgccgatcgcgatggggtcgtggcggcgcaaggcctacggcgccctcaaggactccaccaaggtcggcctcgccaaggtcaacagcgacttcaaggagttggatattgcaattgtgaaggccaccaaccatgtagaatgccctcccaaggacaggcacgttagaaaaatattcgtggcgacctccattaaccgccctcgagcggacgttcaatactgcatctatgccttgtcaaggagattgtccaagacaaagaattggacagttgcattgaagacattgatagtggtacataggctcttgagagaaggtgatcctacattcaaagaagagttcctggcctactcatacaagggaagcgttttgcagagagcaaacttcaaggacgattcaagccaattagcttgggattgctctgcgtgggttcgcgcctacgcgctcttcctagaagaacggctcgagtgtttcaggatcttgaaattcgacatcgaaaccgagcgtctgatgagatctcctgagtgttccagcaaggcacacagtagaactagaaccctgccttgcattgaacttctggagcagttgcctgccttgcagcagctacttttcaggctaattggctgccagcctgaaggtgcagcaggcacgaactaccttatccaatatgcattagccctggttttgaaggagagcttcaagatctactgtgcaatcaatgatggtatcatcaatcttgttgatatgttctttgatatgccaaagtatgatgctatcaaggctcttgttgtctataaacgagctggccagcaggctgaagatctttctgacttctacgattcctgcaaacaacttgagcttgccaggacattccagtttcctactctaaggcagccaccatcatcattcattgcaacaatggaagagtacatccgagaagcaccccgtccctcgattaacagcgtggagaatggtgagaggaagctagtgacctacgaccaagaagctacagaggagtctgaaaaaccagcagaagaggagaaagatgagcctgcagagtctgaacaagaacaagagcctaaacaagaaccaaagccaccagaaaccactggagatctactaaacttggatgcagaggtgagtccattggttgcagaactggaagaaaacaacgcatgggccctagcaattgtgggaacaggtgatcaaactaaggcatcaacttccctggacttgttttctggcaacacatctgggtgggagcttgcactggtcactgctccaagcagcaccagccaaacagttcaaaccaaattggctggaggctttgacaagctgctactcgacagcctctacgaagacgagacgaggcggcggcagatcgccggagtcacctacaccggtagcattggaggaggagcacccaaccctttcgacaccaacgatccatttgctacgtcgagcagcttcttgcccccatccaatgtccagtttgcaatgctgaaccagcagcagcatcagtactaccagtctcaacaccagcaacaatactaccagcctcatcatttccaggatcatcaacatcaccataacatgtattttcagacacattatcaacaaaatcagatataccaacaacagcagcagcagcagcatcagtaccctgcacctcaggctggatcttccaatccgtttggtgaccctttcggtgacctcgtaccaatggcaatggctgtctctcaaaaacatggacattcaagtttgatatgaatttgccatattcatgttgttaatgatcccaggcaattttaacatagatgggttaacttagtcaccttctcacttgacttgagtagagcatcttgtacaacttgatcttcttcgtgctaacttgagaattatgatgctgtatttgccatctcgctctcttgcaatatccacatttactcgaaccattgtagatttgtgatgctaatctagtgttgatccc

SEQ ID NO: 19168 - DNA, 1199 bp, Oryza sativa
  ref <308>: DATABASE ACCESSION NUMBER: AK069543
  ref <309>: DATABASE ENTRY DATE: 2001-12-06
gggaatctcaaagcggacagccacacacccctcacaggcgagctcggtcggagcggcggcggcggcggcggcgaaccgaccctaccttgccggcggcgagcggcggcggcggatgggcatggaggcgaggaggaagatgaggttcgcgatggtgtgctcgtcgaacatgaaccggagcatggaggcgcactcgctgctcggccgcgcggggctcgacgtcgcctcctacggcaccggcacccacgtcaagctccccggcccttccctccacgagcccaacgtctacgacttcggcaccccctacaacgtcatctacgacgacctccgccgcaaggaccccgacctgtacaagaggaacggcctgctgccaatgctgaagaggaacacctcagtcaagctggcgccgcagaggtggcaggacaatgccggcgatgggctgtttgatgtgatattcagctttgaggagagggtcttcgacttaatcgtcgatgatatgcataaccgtgagcaaaggatgctaaagaacgcgctgataatcaatatggatgtgaaagataaccatgaagaagctggtgttggtgcaaagcttgctttagatttgtgtcagaagcttgaaggggcagatgaagattgggaggaaattattgatgacctgattattacatttgagaagcagcacaagcggaagctcacatacaacatggcattttactaacttctgtagttcatcgtgcggattatacagaggcagcagaatcattcttaaattaactcgatcgtgtggatggctggtagcttggcatgcagggaaatgtacaaaaactgaggtaccaactggatccaagtgtggttcctgttccatgccaacaaatgggggaagatgtgtgaaacttgattaaagaaaatatgttctgcgttgagtcgctcgattgttgttagaggataattggatattcagatgttgatcttgaagctacccatcatctcaaaaccatgcagcaccgaatgttactcatttgctttagtggctgcctaaaattcatggtgagcctgatgaatggtacagtacatgttaatgaattggcctatcagtacagtacagtaagattcagaaggtgaacgaggcagacagtgaccaaaaccatgaatttcagtggtgatggctttcaaaatatagctagaaatgcattatatttttc

SEQ ID NO: 19169 - DNA, 2936 bp, Oryza sativa
  ref <308>: DATABASE ACCESSION NUMBER: AK069544
  ref <309>: DATABASE ENTRY DATE: 2001-12-06
gggtgctcctcttcgtcttcctccggcctcctattgtaattgctgctttggttctttttctccgtgacttgcgtctcccattcctctcgcgccatccaatctttctatccaacaattaatccccttcctctctcttctcttctcttcttccccaaatgcttcttcctcgcattcgcaatcgcaatcctgccctaatccccaatcccaatccaatccccccgcattaatcctaatcctaatcctaatcctaatcccaatcccatggacgagtaccaccaccgcatgggcgccgccgccgatttccgccgggacctcgaggacctcgtctgcgaccacctcgggggatgcttctccccgacgtcgtcctcgtcgtcgtgctccgcggcggggggaggggtcgccgcggggcaccagcccgacgaggagcccgagtcgtctgccgcgcggaggcggaggcgggagtcgcgcctcctcagccggtgggtcgcgcgccaggccgaggaggtgctctcctccatggagcgcgaggtcgagcgacgcaaccgggaggccgagctcctcgcgctcgcacgcctccaccccgtctccaccctcgacccctcctccttcctcctctcctcgcccaccgcgccgccgccgcgcccccaggcaccctccccgaccgcgcccccttccctcctccagatgtggcgcgagctcgagcaccgccgatccgacgccgaccagcccttcgaccgcgagccctcccccgacaccgccgaccgcgagcgcgtgcgccagatcgcccgccgcctcaccgccaacaccgacgtccccaccgccgccgccgctgccgccaccaccggggagtggctcggcgagacggagaggcagagggtcaggctcgtcagggagtgggtgcagatggccagccagcctcgcgactcccgcgtcgcctcgcgcagggacgacacagccgctggcgagagggagaggcgaggggagcctcctcgcctccgtggccgacaagcgcgtctcgatgtcatcactcggatggcccgagagcgccaacgcgagctccaggggatatcagggtatcacattgtgtccgagttccctcaccgcagccgcaaccgcatccagggattgcttagggggaggttcttgaggaacgtggttcttccagttgaggaggaggaacgaccaccatccgtggcggcgagggagctcgggcagttgaggcagagccatcgtgtgtccactttgagatcagagagtgctgtaagtagtgaagatgttagccggtttgattcttctgtggctgaaagtgttggagtactaggtagtgacgaacctcaacaaggggctgaggtcagggccctcactggtactgagaatacgacccaaattatgcttgaggatgtgggtttacaggaggcagatgcagaaaatgctgccatagagtcaccaagtgtagctttggataacatggttgagatgcatgaaactcaagttgacaataggctgcaagatgaggcaggacgggatgcaagattttggcagccatctctggacgactcacttgataggtggcccaatgaaactgcagaggatgctgaaagaaattgggaagataatgcagaggaactacacagtgaaactatggaggatgatgccagggagcatgatcatcttcaagatgagcatgatgaatggcatgatgacgagtctcatggtactgagaactggcaagatgatttccaagattctccacttgacatgggccccattcctagaactgaaaatagattcatcccgccagatgatgacaatgtgtacagcatggaactgagagaattgcttagcaggcgaagtgtatccaatcttcttagtaatggtttttgtgaaagtttggagcgattaataaggtcatatgttcaaagacgtggtcgtggacccctcaattggaatctcgatgcagctattccatctgtgaattcaccaaacgaaaatcaggaacaagagaggaatgctgaaactcggcaattccaagctcctgttaacagacctgcgcttgttatccctcccccaccctttgccaccccgacagccactatggcacagagaattgcgtcataacaactggagcactagacacagggaatgggatgctattaatgatttgaaagctgacatgggtagacttcaacaagggatgagcagcatacagaggatgctggaggcgtgcatggacatgcaacttgaactccaacgctcagtgagacaagaagtgtcggcggccttgaatcgctttgcaggacctgaagggtatccgacggatctatctgacgatggatcaaaatgggatcaagtgaggaagggaacctgctgcgtatgctgcgatgcgcaaattgattctctattatacagatgcgggcacatgtgtacttgctcaaaatgtgcaaacgagctaattcgcagtggtggcaaatgcccactatgccgagcgccgatcgcggaggtggttcgggcatattcagtaatgtaaagttgtggaaatacagtagggaagggaataaaactgatggaaaaagcgaagttttgctgcacgaagctttgttcaggaaaaaggggaaacaagagctctgctgctgcttcttcttcattctttttcttcttccatttttgtctgtcctctctcgtcttcttcttgtgtatctatcgatctactacaggtttacatatttgttgccttgctgttggccgcagcgcgagcagcaaagggcgtgttaattgattgttggaaagagtttgcgatgggtaggactggagtaaaaagagagcggctgcccattgtaagttctttccctgtatttatgtcctgaactgaactgaacagaagagacactggcagttactcatatagattattaatctaatcccacctcttttgaccg

SEQ ID NO: 19170 - DNA, 2911 bp, Oryza sativa
  ref <308>: DATABASE ACCESSION NUMBER: AK069545
  ref <309>: DATABASE ENTRY DATE: 2001-12-06
gtggagcagctctgcactagagcaatcagatgggcagagctgaagaggaaaactaaggaggagaagaaactggcaatcactgttttcagcttcccaccagacaaaggcaatgttggcacagcagcatacctgaatgttttcaactccatctactccgtcctccaagatctgaagaaggatggctacaatgttgagggtcttccagacacagctgaggccctcatcgaggaggttattcatgataaggaggcccaattcaatagccccaacctcaatgttgcttaccgcatgaacgtgcgggagtaccagtcactcacttcctatgcctccttgctggaggagaactggggcaagccacctgggaaccttaattctgatggtgaaaacctccttgtctatgggaaacagtacggcaatgtattcattggagttcagcccacttttggctatgaaggagatccgatgcggcttctgttctcaaaatctgctagccctcaccatggctttgcagcatactacacctttgttgagaagatcttccaggctgatgctgttcttcactttggtacccatgggtctcttgagttcatgccagggaagcaggttgggatgagtgatgcatgctatcctgacagtctcattggcaacatccccaatatctactactatgcagcaaacaatccatcagaagcaactgttgccaagcgcagaagctatgcaaacaccataagctacctgacaccaccagctgaaaatgctggtctctacaaggggctcaagcagctttcagagctcatctcttcttaccaatctctcaaggacacaggacgtggtccgcagattgtgagctcaatcattagcactgcaaaacagtgtaatcttgaaaggatgttcccttgcctgaggaaggtgtggagcttccaccaaatgagcgtgaccttattgttggaaaggtgtatgccaagatcatggaaatagaatcacgcctcctaccatgcggtctgcatgtgataggtgagccaccaagtgccatcgaggctgtggccaccttggtgaacatagcttcccttgatcgcccagaggatgaaatatactcactgcctaacatacttgctcagacagtgggcaggaacattgaagatgtgtacagaggaagtgacaagggaatactggcggatgttgaactgttgaggcagataacagaagcttcacgtggtgccatcactacctttgttgagaggactacaaacaacaaagggcaagttgttgatgttacaaacaaacttagtaccatgcttggttttggtttatcagaaccatgggtacaacacttgtccaagaccaagttcatcagagcagacagagagaaattgagaaccttgtttactttcttgggagaatgcttgaagctaattgtggcagataatgagctgggaagcttgaaacttgccctcgagggaagctatgttgaacctggccctggtggtgatccaatccgtaacccgaaggttctcccgacagggaagaacatccatgctcttgaccctcaggcaatcccaactacagctgccttgaagagcgccaaaattattgtagaccgtctgctggagcggcaaaaggttgacaatggtggcaagtatcctgagacaattgcacttgtcttgtggggcaccgataacatcaagacctatggtgagtcattggcccaggtgctgtggatgattggtgtgcgcccggttgctgacacctttggccgtgtcaaccgtgtggaacctgtcagccttgaggagcttggacgtcccaggattgacgttgttatcaactgctcgggtgtcttcagagatcttttcatcaaccagatgaatctactggaccgggcagtgaagatggttgccgaactggatgagccagaagagatgaactacgtgcgtaagcatgcacaagagcaggcacgggaacttggcgtttcattaagagaggcggcaacaagggtgttctcaaatgcatcaggctcttactcatcgaatgtgaacttggcagtggagaatgcatcatggactgatgagaagcagctccaggacatgtacctgagtcgcaagtcttttgcatttgattgtgatgctccaggggcaggcatgcgagagcaacgcaagacatttgagcttgctctagcaacagcagatgccacattccagaacctagactcatcagagatttcactaacagatgtgagccactactttgactcagacccgacaaagctggtgcaaggactgcgcaaggatgggcgggcaccttcctcatacatagcagatacaaccacagcaaatgcacaggtgaggacattgtcagagacagtgcgccttgatgcaaggacaaagctactgaaccctaagtggtacgaggggatgatgaaaagtggctacgagggagttagagagattgagaagcggctgacaaatactgttggatggagtgcaacatctggacaggttgacaactgggtttatgaggaggcaaatgccacatttattgaagatgaggctatgaggaagaggctcatggacaccaaccccaattcattcaggaagctagttcagaccttcctagaagccagtggcagaggctactgggagacatcagaggaaaacttggaaaagctcagggagctctactctgaggttgaagacaagattgaaggaattgaccggtaaatttatttgatctatcagatcctgcattcaaccaaggaggagaaatccttctgtctcactgaatctagagttgagacttgtacactttgtataatttataaaaagttgtaacatgacatacacgaggataccgtgttttaacaaagagggtggctgtgaatgaaaatggagcatgggtagaagtacttgaatgaatg

SEQ ID NO: 19171 - DNA, 3135 bp, Oryza sativa
  ref <308>: DATABASE ACCESSION NUMBER: AK099095
  ref <309>: DATABASE ENTRY DATE: 2002-08-28
ggttcccatctcttcctctccctacctcgctccgccgccgccgctcccctcccgacccgcctcgcttcctccctccgccgccgccgccgccgccacggcccggccggatcccacccggccgctcgattcgaggtcagatccaaaccccagccctcccaggtccgaatcgcgccgaatttttttctaggttttggtacggatctagggtttggcttgccgtgggaaattttcgtggggggaattctgtcgaatttctctcggcttccacggtctggttggattcctgctcatggccgctgggcgccacggaggatacagggactacgaggcaagggagcgggagctcgacgcggaggcttccaggaggagcaaggagcagcagcaccaccaccacccgagcggccgacaccaacgcggcgactccgacccccgctgcgaagctgaccggcgccgtgacggcggtcgcagcaggggcggcagggagttgtcgaacgggtacggccaccgccgctctccgcctcccaggagtcgcctctcagcgaggctcggggatcgcgagcctggcgaagttctgagcggtagtgcgtcagatgactctggtgggaggccgcatagagcgagggagaatggtgtatcaagttctagtagggatggtgaatcggtggtggctgcatcggcctcatcacctagcaagaaaaggaaattctcaccgataatatgggatagggatagcccaaagccaatgcattctgatgtggcgaagggcaagaaggcggtggactctgtgcctaccgagcttcctctccctccccctccccctctgcctccgcaggatcacatccctgagaggttggctgtggagaagtcgccgatggatgtggagcctgctgttgcttccgagagtcctgagcagttacaggagcatgcggagagtagagtgatggaggaggaagaagagtactcaacaatgaggaacatatcaacttcaaggtgggctggtgctaatgatgacgaggaagagggggcaccacacaggaagaagaaaagtgcatcgcctgcagactctgctgagttggggcagaggaagaaggctcttagcccagaacttggtgaggttgtggccagtgatatctctggagggaggaccatgtcaaggtcgtctgattcagggaggttgggtgctgatgagaatgaggatttggaagttgataaagatgattatatggacgttgacagagatgatgatggtaacagtgatattgcaaatcatcagtcaggtatggactcagagtatgaagtgcgccggtctgagacaccagaaccagtgaagccaccgcacagatgtataaatatgcttcaaggttgcagaagtgttgatgaatttgagaggctcaacaagattaatgaaggcacctatggtgttgtatacagggcaagggataagaagactggtgagattgttgcgttgaagtaggtcaagatggagaaggagagagaaggtttcccattaacatctcttagggagataaacatccttttgtcttttcaccatccctcaattgttgatgttaaggaagtagtggttggtagtagcctagatagtatttttatggtgatggagtacatggaacatgatcttaaaggtgtcatggaggcaatgaagcagccatatagccaaagtgaggtcaaatgcctgatgctccagctgttggagggtgtgaagtatcttcatgataattgggtacttcatagggatctgaagacctcaaatcttttgctgaataaccgtggtgagttgaaaatatgtgattttggactatctcgtcaatatggaagcccgctaaaaccttacactcaattggttgtgactttgtggtacagggcgccagaactattattaggaacgaaggaatattctaccgccattgatatgtggtctgtgggctgcataatggcagagcttttggccaaagaaccattatttaatgggaaaactgagtttgaacagctagataagatatttagaacacttggcacacctaacgagaagatatggcctggctatgccaaattgccgggtgtaaaagtcaattttgtcaaacaaccgtacaaccgattaagagataagttcccagctgcatctttttctggtcgtccaattctgtctgaagcaggttttgatctgttaaataatcttctaacatacgatcctgagaagcggttatcagcagatgctgctttgcagcatgagtggttccgtgaagttcctctacctaaatcaaaggatttcatgccaacattccctgctctaaatgaattagacaggcgtaccaaacggtatttgaagagtcctgatcctctagaagagcaacgattgaaagaactacaagggaacattggcaaccgtggtctttttggctgagctattagcaacttgtttgggctctattgatcctgactgtcatgcatcattctgaatctatgaggtcagatacactctgaggcatggtgctggtttaagttgataggtacctggcccatcatagaaattttgttgcaggattaactccaaccagattgatcataaaagcagtctaatctgcctgcatcgtaaggtgtggcatgttggcttttattggttaacagcagtttcacctttggaacttctgtatgtaaaatattccagattggtacgttgtaaacaatgttcagtgcgttggattttaaaataagaatattccatcattttttttctatattctcctagtgccttttcttttgatctttccattttgtttgcaagagacaagagaagcgaaggggaaggatgccttttgcttttcaccaggaaatcaatggacagtaatacaacttgaaagcttaagctgtggctgcttcaagataggaagcttgatggccctcagcttgttgtacctaagtgactaaattttgtggaaggtcttcaagagagttcacctgttactttagtgaaccatagtggtcactggtcagtctacttatcctatcctgtctattaatatacatcatacttctgactgattgtggggaccgctcgtccatttctttgggatggttgaggtgtaacgccttctcttaaatgacattatcttcatg

SEQ ID NO: 19172 - DNA, 1841 bp, Oryza sativa
  ref <308>: DATABASE ACCESSION NUMBER: AK069546
  ref <309>: DATABASE ENTRY DATE: 2001-12-06
gatccaggactttgatgatctcttctcttgagtcttgatccatccatcacccacaataatcctaatcacaagtgggcgtgagagagagggggccagaaggtcaacctttgatttaattagcaggcaggaattaagaggcagctaacagtagcagtagcacacaatcaagctcaaccctcatatatcccgtgatccattgttcagacctgccttattactagctgtagagatcttaattttattgtaaagcaaagctctcacctttatttataactagctgcccttcccttgcatcctattccttccctgcatcagagcagcgagctcgctctccatcccctgcgtgccatgggcaactgctgcggaaccaagattagctccgacgccatctcccggaacgcatctggttcaagaagaagaagatcaggaagcaggaggaaggggacggggctgagcagccgggtgtcgtcgtcggtggcggcggtgaccccacggagcgagggcgagatcctgcggtgtgccaacgtgaggagcttcgcgttcaacgagctcaagacggcgacgaggaacttccggcccgacagcgtgctcggcgagggaggcttcggctccgtcttcaagggttgggtggacgagaacaccttcctccccagcaggcccggcaccggcatggtcatcgccgtcaagaagctcaaccaggacggcttccagggccacagggaatggctggccgaagtgaactaccttgggcaactgtcacacccaaatcttgtaaagcttgtaggctactgccttcaagatgagcagaggcttcttgtctacgagttcatgcctcggggaagcttggagaatcatcttttcaggaggggctcacattttcagcctctctcctggaatcttcgaatgaaagttgcccttggagcagcaaagggacttgcctttctccacagcgacaaggccaaagttatctaccgtgatttcaagacttccaatgttcttctcgattcgaactacaatgcaaagctgtctgatttcgggttggcaaaggatgggccaactggtgacaagagccatgtctcaacaagagttatgggcacatacggatatgctgctcctgaatatcttgcgacagggcatctgagtgcgaagagcgacgtgtacagcttcggggtggtgatggtggagatgctgtcggggcggcgcgcgctggacaagaaccgccccgccggcgagcacaacctggtggagtgggctcggccctacctcagcagcaggcgccggatcttccgcatcctggacgcccgcctcgccggccagtactcgctcgccggagcccacaaagcggcggcgctggcgctgcagtgcctctccgccgacgccaagaaccggcccaccatgcaccaggtggtcgccgcgctggagcagcttcaggagacgacgaccacgtctcatcatcatcggtcgccgcagagcaggatgttgctcggcggccgtggcttcaacgccagcggcaggtcgtctgctggtgctggtgctcgtccgaggcggctgtcggcgtcgcctctgcctgcctgagtgacacatatggcgacggcgtgttaattagtagattattatattccttgatgatgagtgacttgtaaatcaagaggcatgcagattgattgcttgattaagcttcttcattcatgttggccgctgcaaatccgaccgactcttctccttccttccttccttcctttctcccttttgcaacaacttgtacagttctttttttcattttttttaacgtactacaccaattatatatatgtaccttgaataaaacagaaattgacgcc

SEQ ID NO: 19173 - DNA, 712 bp, Oryza sativa
  ref <308>: DATABASE ACCESSION NUMBER: AK069547
  ref <309>: DATABASE ENTRY DATE: 2001-12-06
gccggcccaaatccgtcaaccatgtcgctgatccgccgcggcaacgcgttcgaccccttctccctcgacctctgggatcccgtcgacggcttccccttcggctccggcggcagcagcagcagcagcggcagcctcttccctcgggccaactccgacgcggcggccttcgccggcgcgcgcatcgactggaaggagacgcccgaggtgcacgtgttcaaggcggacgtgccggggctgaagaaggaggaggtcaaggtggaggtggacgacggcaacatcctgcagatcagcggcgagcgcagcagggagcaggaggagaagtcggacaagtggcaccgcgtggagcgcagcagcggcaagttcctccgcaggttccgcctccccgagaacaccaagccggagcagatcaaggcgtccatggagaatggcgtgctcaccgtcaccgtgcccaaggaagagcccaagaagcccgacgtcaagtccatccagatctccggctagagccccgtttgtttattctgctgcttctcctcaatgctgcaattgatctcctcctttggtactttgcttgtgtcgtgagggacacagtccaaaatgtgtgtgatatgatcatgtgtttatgaatgtgtggtctcctccaagggtcccaaatgtgtttgtctcctatgcgtttatgtacgggaaataaactttaagcttgattaatgtaccg

SEQ ID NO: 19174 - DNA, 1137 bp, Oryza sativa
  ref <308>: DATABASE ACCESSION NUMBER: AK069548
  ref <309>: DATABASE ENTRY DATE: 2001-12-06
gagccattagcagcacattcaccggcagcacacgcgcgcacacatggccggctcgtcagccgcaacgtcgtgtgctcggttcctggcattgctggcgacatgcctcctctggaacgaggccgcatcgttcacggcgtccggctggaacaaggcgttcgccaccttctacggcggcagtgacgcttcaggaacgatgggtggggcgtgtgggtacggggacctgtactcgacggggtacgggacgaacacggcggcgctgagcacggtgctgttcaacgacggggcgtcgtgcgggcagtgctaccggatcatgtgcgactaccaggcggacaggcggttctgcatctccggcacgtcggtgaccatcacggcgaccaacctctgcccgccgaactacgcgctccccaacgacgccggcgggtggtgcaacccgccgcggcagcacttcgacatggccgaaccggcgtggctcaagatcggcgtctacgtcggcggcatcgtgccggtgatgtaccagcgggtgccgtgcgccaagcagggcggggtgaggttcaccatcaacggcagggactacttcgagctggtgctcgtctccaacgtcggcggcgtcggctccatccagtcggtgtcgatcaaggggtcgaggaccgggtggatggccatgtccaggaattggggcgtcaactggcagtccaacgcctacctcgacggccagagcctgtcgttcaaggtcaccagcagcgacggccagacgctcaccttcctcgacgtcgccccggcgggctggacgttcggccagaccttctcgacctcacagcagttctcttaagtaattaaatattaatgagttattactggtccattcatatatgtgtttaattccgagcgtatattatcatcggcgtcggcgtgtaaagactaaagatatattactagtagctgtttgggttgcccacaagtttggagcatgcgcgcacaagtgtttggtgtggcgagctatatatatgatttgcaagctaaggacacctgcttttttcaatgcgaattaaaacggtatatatatgtacagtttgcgaggtgcttgccaatcgatgatcggcatgctttactgtaacgaccacacagggagttttcact

SEQ ID NO: 19175 - DNA, 1233 bp, Oryza sativa
  ref <308>: DATABASE ACCESSION NUMBER: AK069549
  ref <309>: DATABASE ENTRY DATE: 2001-12-06
ggcttctcccccattccgcgcaaaccttgcaagaacgggaggagagaggagaggggacgagaccacggcgatggtgatgctggaggagttcgccgccgtcctacgaggctaggagacaccccctgtgtttctcgacctggaggaatcccttcgggccaagggcgatatgacgctgcgcgaggaggccacattgaaggtcttgaaggtggtcgcgaccctgggcaaggccatctccaccggggcgatcgccgccgtggggtattatgttcccggcattgttggagctaaatttggtgaaccatctcttcctcggctaccaagattcgccatggctgctgtcacttcatggtttgctggaaaggtgatgtattatgcaatcttgcaaggaagtactgaattcattttgaaacatggagaagaacgcatgaagatggagctatctaacataatactcaataagcacagtgatgataaaacactggttgaagctgtaaaaacgcagttctttgctgagcgtctgtttagtgatcagtatcaagataggacacttttcaggtggcatctacgccgtacttatgttgacagcgcctttatggaaagggtgaaggagatcgaagtgaagagctcaaatgatgggcctggattaatttctggacagagaattataagcactagaccatttggagacctcatggaggacccactggcgtgtatacttggttctccagacagcaacatggaaagcaacaagtctgctgagcacacgggtactatcgtgaagagaagggaggtacgagcccacagaagaagtcaccggcatcatcatcgacacgccgacaaattttccgcactgtgatttgtgttgtctatatcagagctttcagatgtggagtagtatgaatgctgggattatccttcgagcctccagtcgcaggcaactattaggaatagaattctgggatggttattcgcgtccaagagcaaaatgaagttcatagggatgtttctatgtttcttccatgtctaggaagtttctgcttggcgcaatgcggccttctactttaactgaaacatgtgttttttgatttgcgatctgatcatcacagattgcttgcccacctgcagttctggttgaaccaatcaggttgcaacctaatgtgcccatctgcagtttgttagcacgatgtaagcaacatctatatctcaaacatggagaaattgttggcagaaact

SEQ ID NO: 19176 - DNA, 2419 bp, Oryza sativa
  ref <308>: DATABASE ACCESSION NUMBER: AK069550
  ref <309>: DATABASE ENTRY DATE: 2001-12-06
gtggaggccgaggggttttttactttacccattgccctcccacctgctccccctcctgccctcccaccctcttgtgcgcattccgtcgagcacgtcgcgggcgcacctcccgccgctgcctcggcttgccccaccgcggatcgcagagcgaagcatccccgctaggctactaaagatgcctcatcatggtggtaggaagaagaagaacaagggtgggaaggggaagcctcggaagaagaccgacgaccgcggagaggccaatgtcgggtcgggcgacagctcgcccgccgtccgcgtcgaggaggaggcggaggtggaggcggaggcggaggtggggacggcggtcgagccgcagcgctcgggaacgttggcctcgcccactgacgtcgtcgaggcagcccaacacggccagcggcagcagcaggcctcccagtcccaacagacaccaagccctcgaagttatgcagctgcagtggtgaacaaaagagaagatgaaacagttggctacaacttccttcagttccttcgaagcttcacagtagagcacagagaagggcctttctatgctggggaactaaagagtatggtctatcagaacagcaaaactttttgtgtctactatgggcacttccaaggacaatatgcaaacctgggtacaaaaatatccaactcatatgcgagggtcgtgggcttcttgcgaagtgctataggaagattcatcaccgaatatgaacttgatgatcaatggagagaaatatcaaatgaccccccaaagattcatattgatgccctgcccccagctggaagcattgtttcacttcaatatttcctgggacaagcacataacaaacttgtggagactgcacgcatctatgatcccaatggtagcttagtcgctgatagtactaagctgggaaggagagtgttcctagggttcctcatatatatcatcaatcagcataaagatggacgcagttggtgtggtgaattttctattgatgatctactagtcagaaatgaatcaacatttggaatcacgaaggcagcttcttcccatgcaagttgtaaagcaatggctaaggatctgaaacagttggcaaagatactagagaaacactttcgcacagctcaagggcaggtccctggctacttcattaagcttttttctgaactaaaagagagcgcaggagagctcgggcagtacaactcagagaaaaccaggaagttccataagtatctgagttcgcatcttgcactcaggtctgcgatgtcaaggaggcacctgtttatggatttgttccgagcgtaccagctacttgggaaaactgcaaagaaggatttgatatcccttctaggatccatgtttccagaagataaatggcttgaccaagtagacaagcaccaaatgtttataaaagtatctgagtatggcatcgtggaaggtgacgcagataaggcatccaacagtcaagatcagaagaagaaaagatcatacagtggcgatcttttagatttgctggtgtttatccgccacgttactgagcacggggcggatcacacgaaagatgataacatggagcaaaaactcaagagtttggttgaaattgacttgataattgctaagtatctttcggctgctgttgtagaccttatcaaggctttggtgaagagtgacttgctaaaagacacgttttctgacccgtggaatgcgttttctaattcttcctaataggtgggttagcacgcttgttggagaagagaggcaccactgcatatcttgtattcaaagtgccgtcaaggacttgagagtgcctcgttcagtaatcatagttagctgaagtctgtggtgtaggtgtttagcttccaaacttggttagaattttgagtttcctgcttactggcgtagtatgcttcatatttttttcctttttcttgtgttgaggttgggccaggtgaggtaccccccgctctccagtaaggacccctgactgttagttctatgccaggagagtagttttggtgtgatgtgttgggacttgggagttgttcagtctttttgagcttaacctgtaaagttggtacccggcgtgcgtatggatcggagctggtgaacagagaaggaagacgcgcacattggggatgattttggagcgtgttgactgttgaggactggtaggttgctagggaaatcagcataacctggattacagcccttgtttggggggtttgttctctgtcggttggtctgcaatgtttattttaatcccctttcttattgttggctatttcttgtcatgctaccctcatggaaatatcgatcttttacattagcatataaaatattaattattggaccataaataatgcttaaagatataattccatagcaatttaaatcaatggaatatagaatactttg

SEQ ID NO: 19177 - DNA, 1824 bp, Oryza sativa
  ref <308>: DATABASE ACCESSION NUMBER: AK099096
  ref <309>: DATABASE ENTRY DATE: 2002-08-28
gagtagtaagctcccagtccaaacatttctcctcctcggtctggagccgctcccccctccccgccgccgctgctctcgacgccgacgccgacgaggcagctaggccggcgacgaacctcgatctcgatccgctcgccgccgtccgtcgccgatccgcgcgccgacaccgacaccgaccttgatcctgatccgcgctccccgcgacgtacgccacggtttgcagtaagcaggaaagatggtgaagatctgctgcatcggagctggatatgtcggcggcccaaccatggctgtcattgccctcaaatgcccagcaattgaggtggtggttgttgacatctccaagcctcgcgttgatgcctggaacagcgaccagctcccaatctacgagcccggtcttgatgaggttgtgaaggaatgcaggggcaggaacctcttcttcagtacggacgtcgagaagcatgtcgctgaggcagacatcatttttgtgtctgtcaacacccctaccaagacccgtggacttggagcaggcaaggctgctgacctcacctactgggagagtgctgctcggatgattgctgatgtctccaagtctgacaagatcgttgttgagaagtccactgtccctgtcaagaccgcagaggccattgagaagatcttgacccacaacagcaagggcatcaactaccagatcctctccaacccagaattccttgcagagggcactgcgattgaagatctcttcaagccagacagagtgctcattggtggccgggagactcctgaaggaaagaaggctgttcaggctctcaaggaagtttatgcccattgggttcctgaggacaggattatcaccaccaacctgtggtctgctgagctctccaagctcgcagccaatgcgttcttggcgcagagaatctcctctgtgaatgccatctctgcactatgtgaggcgactggtgccaatgtgtccgaggtggcctatgctgtggggaaagacaccagaatcggccccaagttcttgaatgccagtgtcggctttggtggctcctgtttccagaaggacatcctgaacctcgtgtacatctgcgagtgcaatggccttcctgaggttgccaactactggaagcaggtcatcaagattaatgactaccagaagagccggtttgtcaaccgtgttgtggcctccatgttcaacactgtctctggcaagaagattgccgtccttggctttgcgttcaagaaggacaccggtgacaccagggagacacctgccattgatgtgtgccatggcctgttgggtgacaaggctcaaatcagcatctacgacccacaggtaactgaagatcagatccagcgggacctttccatggccaagtttgattgggaccacccaaggcacctgcagccaactagccccacggcttttaagcaggtgagtgtggtctgggatgcgtatgaggccaccaagggagcccatggactgtgcatcctcactgagtgggacgagttcaagaccttggactaccagaggatctttgacaacatgcagaaacctgcatttgtcttcgatgggcgcaatgtggtcgatcctgagaagctcagggagattggcttcattgtctactctatcggcaagccgcttgatgcatggctcaaagacatgcccgcggttgcataattctgaatccccacctggagcgctctgctggagctgaagaaattcgataaggaaacagaaccggtcgaccactattttctgtagtctgtttttgcaggagacagctaccattttctcagtcgtaagttgaatatctgttagtatcg

SEQ ID NO: 19178 - DNA, 1164 bp, Oryza sativa
  ref <308>: DATABASE ACCESSION NUMBER: AK069551
  ref <309>: DATABASE ENTRY DATE: 2001-12-06
tcaacacctgagctgaggccgccgccgcgtcgtcgtcgtcgtccgtacatcgccgccggatcgagccgcgccgcaagcggtaggagatgaggcccgcggtgagcagggccgccttcgcgtccgtgcttctggcgccgcgcgcggtcggggtcgccgcccgctgcgcctcctcctcctcttcggccgcctccccgtcggtcgccgccgccacttacgatcacgcgtcgtttattaaggaggtcgccgcaaccgatccaccggagcatcttagctcgttgctgaatgtgctccaggcacgaggtgaaaagctagtttctccaggggcgaaaagaggcctgattccacttgttgttccgttagcagaaagtccagcaggtaatttaacatcactactgagatggccaactgctcctagcgggatggaaatgcctgtggtggaagttcgtaatcacggcctatggcttttggctaagaatgtgaaccaatatattcacagagtgctcgttgaggctgatatcaatggttacgctgatgatttatggtctgctgtgggggacactggtaaaaaactttacacaaaaggtgatttcaaagagtcacagatggcagatcttgatgcctatttgttgaagaaggttgagggttaattataacacctcatttgtcaatttctggctaagaagatataagacaactattttactgatatgctactgtaggttggcctctttccagatgttatagagagaaaaacatcacgccatttcgaaaaaggagattatgtaaatttcttccttttcctccttagatacatttgccatgtctatatggcacaacataaatgtgaattgctcgtgcccatcaggtgtcagctctaattactggagaattctacactagagatcaatttcctggatttggaaggccctttgtgttcaacgcagagatattaaaaaggtatcggactaatggtgtacatggaacagtataattctgtgtttttctcatctagcaatagcatcttttagctgaatgattgtatttttctgtcaataggctatcactatgtagttatgctacatatgaacatgtattttatactgcttatcagttgcaaaatatgaggaatttgttctcaggcaattctacattgtctggccattc

SEQ ID NO: 19179 - DNA, 3226 bp, Oryza sativa
  ref <308>: DATABASE ACCESSION NUMBER: AK069552
  ref <309>: DATABASE ENTRY DATE: 2001-12-06
ggccacccacgcgtgcgtacctctctcctccgtgtcgccggcgaacccgccgccgccccatcaccggcggcgacgtccgcccggccgcgcgccgccattgccccgaccatcaacagattgatcgaggcgtagagtagaagcttctcctcggcgaccatggagagaaccctactgaacccgccgccgtctctccgatcgccggcatgccgtaccaccaccgccaccaggatcaggccctcctcctccatggctactatgatcccaacgcctccgccgatgcggcacgcccgcctcgtcaaggcatcggccgcgggccggcgagagctccacgctcccccgatcgcgccgccaatattactcggcctccgttcacccgcggcggcgtcgtacgggcgtgcgagcggcggcggcgggaggaggaggggggcgcgggtggtggcgaggatggggttcgacatgttcacggacaaggcgatcaaggcgatcatgatggcgcaggaggaggcgcggcggctggggcaccacgccgccggcagcgagcagctcctcctcggcgtcatcggggagggcaccggcatcggcgccaaggtgctcaggggcgccgggctcagcctcaaggcggcgcgcgccgaggtggagaagatggccgggaggggccccggcatggtccccatggggatcaagttcacccccgccgccaagaacgtcctccaggcctcccaagaagaagcgcaccagctagggcataactatgttggatctgaacacctcctacttgggttgctccgtgagcatggtgccgcgcttgttgtgctgaagaactttcaggctgatcccagcaacatccgcagtgaggttatccgaatgatcagtgacacctctgaagatcatcaacctgttagtgctgcagttgggggaggaagcagtacaactaagatacccacacttttagagtatggtactaatctgacaaaactagcagaggaggggaagctggatcctgttgtcggaaggcaaaaccaggttgaccgtgtagtgcagattctcggcaggcggaccaagaacaacccctgcctgattggagagcctggagtagggaaaacagcgatcgcggaagggctcgcgcagcgcattgctgcaggaaatgtgcctgaaacaatcgatgggaaaacggttatcacccttgatatgggtctacttgttgctggtacaaaataccgtggtgagtttgaggagagattgaagaagctgatggacgaagtgaagcagaatggtgagataattctcttccttgatgaagttcacaccctggtgggtgctggagcagctgaaggggccatcgacgctgccaacatcctgaagccagcgctagcaagaggtgaactacagtgtattggagccactaccattgatgaatacagaaagcacattgagaaagacccagcactggagaggcgttttcagcctgtcaaggtccctgagccaactgttgatgagaccataggaattctcaaaggtctccgggagcgatatgagatccatcataaggtccagtatactgatgagtcgttgatcgcagctgctcggctctcataccagtacatcagtgatcgtttcctcccggataaagcaattgacttggttgatgaagcaggttctcttgtcaggctgcgaaatgcccagctacctgatgaagctaaagaactcgagaagaagctcaagaagatcatggcagagaagagcgaagccatccgaagccaagacttcgagaaggcgggagcgcttcgcggcgaggaggtggagctcaagtcggagatcatgtcgctggtcgacaagagcaaggagatgagcaaggcggcggtggactccggcgagtcgccggggccgacggtgacggaggcggacgtccagcacatcgtctccagctggaccggcgtccccgtggagaaggtcaccgtcgacgagtcgagccgtctcctcgccatggagtcgtcgctgcaccggcgcatcgtcggccaggacgaggccgtgacggcgatcagccgcgccatccgccgcgcccgcgtcgggctccgcgacccgcgccgcccgatcgcgagcttcatcttcgccgggccgacgggggtcggcaagtcggagctcgccaaggcgctggcggcgtactactacggctcgccggaggccatggtgcggctcgacatgagcgagttcatggagaagcacacggtggcgaagctggtgggctcgccgccggggtacgtcggctacgccgagggcggccagctgacggaggcgatccggcggcgcccctacgccgtcgtgctgttcgacgaggtcgagaaggcgcaccccgacgtgttcaacatgatgctccagatcctcgacgatggccggctcacggacagcaaggggaggacggtggatttcaagaactcgctcatcatcatgacatccaacgtcggcagcggcgtcatcgagaagggcgggaggcagctcgggttcgccggcgatggcagcggcgacggcgggtacggggtgatcaagaacatggtggaggaggagatgaagcgctacttcaggccggagttcctgaaccggctggacgagatgatcgtgttccggcagctgacgaagctggaggtgaaggagatcgccgggatcatgctcgccgaggtcaccgggcggatcggcgggaaggggatcgggctgcaggtgacggagaggttcaaggagctcgtcgtcgagcaaggcttcgacccgagctacggcgcgcggccgctgcgccgggccatcatgcggctgctggaggacacgctcacggacaagatgctcgccggggagatctgcgccggcgactcggtgatcgtcgacgccgacggtgacgggaacgtcgtcgtggtcggccggcgcagcgccggcttgccggacctgaaatcgccggcgtttactgtctaggattactactacggctgctgcattttcagctattactatctttttgtgtttgtgtatacattagctagggataaactgtcatagtatttcttatcttttttttttgaaaaaaaaaaacctattattagcatcttggtagagagacagatggtaggaatagcttagttaatcttacgcactcaattcttttatggttgatgcactttaattcctttgttaggaatctcaaaagttatcttcatattcttgtagtcccattttagtgcttgcg

SEQ ID NO: 19180 - DNA, 1647 bp, Oryza sativa
  ref <308>: DATABASE ACCESSION NUMBER: AK069553
  ref <309>: DATABASE ENTRY DATE: 2001-12-06
gggtaattacccaattgtccctccccccgcgaatcttctcttctcttctcttctcttctccggtggcgatctgagtggccgaccggcggcgagatggcctccgccgccgtgacgctcccgcgggtgatgctggcggcggccgcggtgcgggcggcgatgctggcgctcggggagtggcaggacgcgcacctcgaggtgcggtacaccgacgtcgactacctcgtcttctccgacgccgcggcgtccgtcgccgcgggcgggtcccccttcgcccgcgccacctaccgatactccccgctcctcgcctacctgctcgtccccaactctctcctccaccccacgtgggggaagctcctcttctccgcagcagatttgcttgttgggttgttcattgacaccattctgaaactacgtggtgtccctgacagcactcggatctggtctgttgtagcttggttgttcaaccccttcacgttcacaattggcacaagaggaaactgtgagcccatagtctgcgctgtcatactttggatcctgatatgtttgatgaatggtagagtattgcaggcatcattctggtatggtctgattgtgcacttcagaatatacccaatcatatatgcaattcctttcgttatagttctgggcaagaattatgctggtcctgctggaaggcctattcttacacagtggacttctaagcaacatttacaaagcgataaatccagtccaagtgtggaaagggcaacatcattgttaactaatttatggaattttctgacaagccttataacaagaaatacgatcctgtttggattactttcaggatctatgttctttctctggactggtgttttcttctacctttatggatgggaattcttaaatgaggcactactttaccatctttctcggactgacccgaggcataacttctcgatatatttctaccacatatatctgcatcatcagcaagggttctcaagtatacagaagctcgcttcttttctgccacagctgatcgtgcaactggcactcattctacgcttctctagggatcttccgttttgtttgtttctccaaacagttgcatttgttgcgtttaacaaggtcatgacagcacaatactttgtgtggttcttttgcctgctacccctcatcctcccttggactaccatgaagctgaagtggaagggtctggcctgtatattggtgtggatggggtcccaactgcactggctgatgtgggcgtacatgcttgaattcaagggccaaaacgtcttcataccgctctgggcagcaggtctcatgttcctggctgcaaacatctttgttatgctcatggtgatcaaccaccacaagttcactccgctcttctcatcatcaacggtgaagtctgcaagcaagattgctgccaagaaggaatagcatataccacccttcttttttattactttaccagctgatgtatttctggagacatggatactgatttttctttttaatgttctactagtatcttatgcgacttgcatccttgctctttttttttttaaccctgagacccggcttggttggttttgtactattaacttcttgtcttaggttgtatggtaagtctggaaaatgcagttgctttggagaggg

SEQ ID NO: 19181 - DNA, 1872 bp, Oryza sativa
  ref <308>: DATABASE ACCESSION NUMBER: AK069554
  ref <309>: DATABASE ENTRY DATE: 2001-12-06
gggcatcgtcttcttcccgcggcgcgacgccatcccttgccccgattccacggctgcggctgcgagatcagggtcggataggtgtagggtatatacgttgctccgggcggcgatcgatcgatggagcaagcggcggcggaggcggaggcggagaggatgaggagggagaagaaggacggggtggtgaaggaggtgatacggctggagagggagtccgtcatccccatcctcaagcctaagctcatcatgaagctcgcctacctcgtcgagcaagataaggatcgtggcgagttcttgaagctatgtaggagggtggagtacactatccgtgcttggtatcttctgcaatttgaggacctaatgcaattatatgccctatttgatcctgttaatggcgtgaagagtttggagcagcaaagcctgacaccagatgagattgaaacgcttgaactcaatttcttaacttatatgtttcagataatggaaaagagcaacttcaagttgttatctgatgaagaatatgatgtagcccagtctggtcagtatcttctgaacctaccaatcaaagttgatgaatccaaggtagacaagaagttgttgacaaggtacttcaaagcacatccacatgataatctaccagcatccgttgataagtacattatatttcggcggggcattggaatcgaccggacaactgattacttcttcatggagaaagtggatgtaataatatcacgggtgtggagatcattgctaagagttacaaagattgacagactcttctctaagaaaaagcaattgagggccaaaaaggacccaaagaagactgatgaagttaatgaagaagtagaagaacaagaattttctgttgagcgcattcgcctagaaaagatggagctgagcataaagaatctactaagtcaaatgacaattcaagaacctacatttgaaaggatgattgtggtatataggaaatcaagcacagaagccaagccggatcgaggaatatttgtaaagcatttcaagaacattccaatggctgatatggaattagttctgccagagaagaagaaccctagtttgactccaatggattgggtgaaatttcttatttctgctgtgttaggtttggttactctaataggttctcttgagatgccaaaggctgatatatgggttgtcatagcaatcttgtctggtttaattggatactgtgctaagatctactttacatttcaggccaatatggtgtcttaccagaatttgattacaaaatcgatgtatgataaacagcttgacagtgggaaaggaacacttctgcatttgtgtgatgatgtgatccagcaagaagttaaagaggtcattgtttcttactatattttgatggagcaaggaaaggcaactgtacaagatctcgatttacgctgcgaacagctcatcaaggaagaatttggtgtggagtgcaattttgacgttgttgatgctgtgaagaagctagaaaagcttggaattgtatctcgggattcaatcgggagaattgtatgtgttccattgaagcgtgcaaatgacattatagggcaaactactgaagaaatggtgatgcgagctcaacaagcttcaaccggttcatagattctgcatactgttgaagtgatcttcgtttctttatatgaagatgaaattaattgtgatattctcaaacgatagtttttttttctctgtgcagttctgtgatgtacgataatgtcaaaaataattccatcttattatttcgttctttcatttattctgtaaataagagcgatatatttcatttttcagtgtggcaaagatggtgtatacaccacaaaatgaacattgcaatttcagtat

SEQ ID NO: 19182 - DNA, 1905 bp, Oryza sativa
  ref <308>: DATABASE ACCESSION NUMBER: AK069555
  ref <309>: DATABASE ENTRY DATE: 2001-12-06
gggatggacgtgcgccggggcgggggcggagggcgcatcgtcggggcggcgcggagggcgctcacctggggggcgctgcccctcccgatgcggatcaccaacggcctggccatggtctccctcgtgctctcctcctgcgacctgctccgcctctgcagcgacagggagcggcccctcggcggccgggagttcgccaccgtcgtctacctcgtcagcctcttcgcccaccctgacgcccccgccaccaccaccggcgacgacgacgacggccaggggggctcccgccgcgcgcgccccgccgccgcggagcccgcgccaatgcatgggcatggtggcgggatgatggaggccgacgacgaggagatcgtcgccgcggtggcgtccggcgcgctgccgtcgcaccgcctggagtcgcggctcggggactgccgccgcgcggcgaggctgaggcgggaggcgctgcggcgggtgacggggcggggagtggagggcctccccttcgatgggatggactaccaggccatcctggggcaatgctgcgagatgcccgtcgggtacgtgcagctccccgtgggggtcgccggcccgctgctcctggacggccgcgagtaccatgtccccatggctaccaccgagggatgcctcgtcgccagcgtcaaccgcgggtgcagggccatctccgcttccggcggcgccttcagcgttctgctccgggacgccatgtcccgcgctcctgctgtcaagctgccttccgcaatgcgggcagcggagctcaaggcgtttgctgaggcgcctgcgaattttgagttgctggctgctgtcttcaatagttgttcttggcagctagaaccatctacccaataccgacgcaactctatgggttgcatatatgggcaagtgtcatggttccatggatacctttttgcatagtgtattctccagggacttttccggagctaagtgtccagcagatttggtaggcttcaagacattcgttgtgcactcgctgggaggaacctatatatgagatttagctgtatcactggagatgctatgggaatgaacatggtgtcaaaaggtgttgagaatgtcttgggctatctgcagaatgtcttccctgacatggatgtcatcagcgtatctggtaactattgctcagacaagaagccgacagctgtaaactggatagaaggccgggggaaatctgttgtttgtgaggctattattaaaggagatgttgtgcagaaagttcttaagacgactgtagaaaaacttgttgagcttaacattatcaaaaatcttgctggatcagctgtagctggggctcttgggggttttaatgcccatgcgagtaatattgttactgcattattcattgctacaggacaggatcctgcacaaaatgttgaaagctcacaatgcatcaccatgttggaagaagtaaatgatggagatgatcttcatatctctgtcaccatgccgtccattgaggtaggtacaatcggaggtggtacatgtctggcctcacaggcggcttgtttgaacctgcttggtgtcaagggttcaaatcatggctcacctggtgcaaatgctaaacgtttggctaccatagtagctggcagcgtgctcgctggcgagctctcgctccttgccgctcttgcctctggtcaccttgtcaagagccacatgatgtacaatcgatcaagtaaggatgtcgccaaggctgcttcttgagcagcccttcgcatcattcaaatgctggacatatttagacagggattgccctgagcttgtggagaagcgaatgagcaatgggcttgtacatactgctgataagagagcgattctttagttccaaactcaacctgtattatactagcataatgtgtgaggaggcattaacct

SEQ ID NO: 19183 - DNA, 1656 bp, Oryza sativa
  ref <308>: DATABASE ACCESSION NUMBER: AK069556
  ref <309>: DATABASE ENTRY DATE: 2001-12-06
gccagcgccgccgctactcccgctccccaccggcgcgcgccgccgtctccccccacgccggcgccgccgtgtaccggggctcccgacttccccttccaccggagctgctcttcggcctcctcccccttcgccggccgcagcagcagaagcacccagcgcccgtgagcccgagtcgccccccacctcggcgaggccttgacctaggctggaataccggatgtgaatttgattgtcagaggtcttcagaccagatgtgctgtgagcactctgtcgctcagttctcttaagatcaacaacttaaccctgaagaaaatttagctttatactgcaagccacttgagttgtacaactttattcgacaccgagccattgaaaatcctccttatcttcaaagatgccttctttataagatacgtgcaaaacaaaaaaaaaggatacagataactatatcattacctggaagtaacaataaggaattgcaagcacagaatatctttcctctgtatgttctgtttgctagacctacttcaaatgttcctatagaaggacattctccaatatatcggttcagtcaggcccgtttgcttacttcctttaatgactctgggaataatgaccgtgctgaagccacatttgttattcctgatctggagactttaattgccacccaagcttatggtcttacttttatccttgttagccgcggtaccaaaaaaaataaagggcgaactggacaaaatctttgtgaaaatgactgttctgagaaacatgtggactactcttctctccgaaagcttgcagggaaatgtttctggggtagaattccgatcactttacttaattcatctttggagacttgtgcggatttaattttggggcatatagtggagtcacctatcagtatatgtatgagcccaggctacttagagccaacatttcttgagcatgacaattgcttgtcattttgttcccgtaaagctgatgctatggttccatatcagttgcaagtaaaagtatctgcagcagaggctggtgcaaaagacatactcaaatctccgtataattccttctcatatagtgacgtcccaccatccttattactgcgtattgtaaggctaagagttggaaatgtgctctttaactacaagaacacacaaatgagtgaagtaacggaagattttacttgcccgttttgcttggtacggtgtgggaacttcaagggtctggaatgtcacatgacttcatcacatgatctgttccactacgaattctggatatctgaagactaccaggctgttaatgttacgctgaagaaagataacatgagaacagaggtaaattagtgataaaggacatacactgtacctaattgacctaggtttgatgtatcagggttgtgggatccagcccatgcaaactagcataaattttacgtacatggcttaaaagctccatttctatttaatattgatttaagtgaaaatctttgttttagaaccattactctcttgaaagacggtgttgggcatgatgatgtgttctacacccactccactataaagtcttttgtggctataaatgtgtactcatctgtgtattgtttgtaagattttctaaaacaattgtataaagcacacaaggttgccaatgggtccc

SEQ ID NO: 19184 - DNA, 2004 bp, Oryza sativa
  ref <308>: DATABASE ACCESSION NUMBER: AK069557
  ref <309>: DATABASE ENTRY DATE: 2001-12-06
tgtggagacctagcatatccaaatccgtcttcattttcatatgaacggcgttttttctgccctttcgagtatgccctccagcctcctgcttggtataaacctgaacatatagcattggagaaacctgaacttccccttggagtttctgagctcaggaaatatcgtggaccacagtgttttatgattcctggaaaccatgattggtttgatggactgcacacattcatgaggtatatctgtcataaaagttggctgggtgggtggttcctacctcagaagaggagttattttgccttaaagcttcctaatgggtggtgggtttttggccttgaccaagctcttcatggtgacattgatgtctatcagttcaagttttttgcagagctatgtcaacaaaaggttggagaaagtgattctgtaattcttataactcatgagccaaattggcttcttgattggtactggggtgataaaactggaacaaacgttgagtatttaatacgtgaatacctcaagggaagatgcaaactgcggatggctggggatctgcaccattatatgcgccattctttcattgaatctaaagaaccagttcatgtgcaacacttacttgtaaatggttgtggtggggcctttctgcatccaacacatgtctttgagaatttcagagaattttatgggaacaaatatgaaacaaagattgcatatccttcttatgacgattctagcaagattgcacttggtaatattttgaagttccgaaggaagaattggcagtttgatgtgattggtggttttgtgtactttgttttggttttctcgatgtttccgcagtgtgattcctttcgtatcttacgtgaagactcttgggctgaccgtgtcaatagtttcttcactgcaatgtggaatgttgtttttgagattctggagcattcctatgtatccctggctggtgttgttactctattgatggtatcttttttctttgtacccacaaaactatcgcgtagaagacgtgccttgcttggttttcttcatgctgtggcccatctaacttcagcagtgatactgatgctgcttatggaattggctattgagatatgcatccgcaacaatctattggcaacatcaggctaccataccctctacgagtggtatcgcaaggtcgaaagtgagcattttcctgatcccacaggacttcgcactcgtctggaacaatggactttaggtctttaccctgcatgcattaagtacctgatgtctgcatttgacatccctgaggttatggcagttacgaggagcacaatctgcagaaaaggaatagagtcccttcctcgaggaggagcgatcatctactatgtttgcgtcttcctgtacttttgggtcttgtcaacaccagttgtatcactggtgtttgggagctacttatacatatgcataaactggtttcatattcatttcgatgaggccttctcctcactgcgcatagccaattacaaggcatttacacggttccatatcaagaagaatggagaccttgaagttttcacctttgctgtcgacaaggtgccaaaagactggatgctggatccagactgggacatggagccaaaggagccattccagatgagctacaccaggaagttccccagcaaatggagggccgcctccggctcggacccaaccaatgcggtgcggatcgtcgaccatttcgtcatccctcggacacccccagattccccaacctcaggatctgctagttgatcaattgtagcctagcttaagatcatagtgttgtaatgtacagtgtagtagctatcttgttctatctccctgtataaattgtacagcaacacaagaagccttctgacatactctagcatagaagaaatagggaaagaaaaagaaaatgagaaaagggtaggatggggcactgcttgtaatgctacagatgtttttgttaaacgaaacattattggttcagtaatgatggttcattgttgt

SEQ ID NO: 19185 - DNA, 1763 bp, Oryza sativa
  ref <308>: DATABASE ACCESSION NUMBER: AK069558
  ref <309>: DATABASE ENTRY DATE: 2001-12-06
ggtgaccatccccctccgagagagacgcacggttgggttggtttcctcttcttcgctcttgagagatttgagctgagagagagagagagagagagaggagggctctcgatcgtcttccttgttgcgcgcgcgcgttctctaatcgaagtcgataggataggaggatagtctcccccgcttgactcgatcttctccttcctctcaaccggggaaagcaaggccatgggcaactgcgccagcgccatagattccttcttcttcaccaaaagggccaataacgagaacgacgatgacgatgctgccccaggaatgtctgcatccaagaggactactagctccaccaccaccgggaagctgtcaacacttagtaacagtactttcattccatccaccattagcggtgtaagcactgacgatgcttatccagacggccagattcttgagtcccgaaatctcaggatcttcacctttgctgaactcaagaatgctaccaagaatttcaggactgatacagttcttggggagggtggatttgggaaggtttacaagggatgggttgatgagaggaccatgaatccatccaagagtagcaccggtgtggtggttgctgtcaagaagctcaaccctgagagtgtacagggaacggagcaatgggagtctgaagtgaatttccttgggaggatttcacaccccaaccttgtcaaactcttgggctattgcaaggataatgacgaactacttcttgtgtacgagttcatggcaaaggggagtttggagaatcatctgttccgcagaggagcagtttacgagccactgccttggagcctcagactgaagattctcattggtgcagctcgtggccttgccttccttcattcatcagagagacagatcatctacagggacttcaaggcttccaacatcttactagattcgaacttcaatgcaaagctctcagactttgggttggccaagcatggtccagacggtggattgtcccatgtgacaacacgagtgatgggtacttatggctatgcggctccagagtatgttgctaccggccacctgtatgtgaagagtgatgtgtatggcttcggcgtcgtgctgcttgagatgctctctggcctgagggcgctggacccaagccgccccagtgggaagctgaacttggtagactgggcaaaaccgttactggctgaccggaggaagctgagccagctgatggacagtcgtcttgaggggcagtatcattccaggggagccctccaagctgctcagctcactctcaagtgtctgtctggtgatcccaagagccgaccatccatgaaggaagtcgttgaggctctcgagaagatcaagttgattaagagcaagtcgagggagcccaggaacagctcctcactggtgcgtggacaggggaattctccgaggagcgatagcgcgaggacgagctccaagggcagatgatcgtagagatacataagattgggctgattctgttggtggtggtgtaaagtttaactatagtagatctcaattcttgatgtcatgacgaagtttgcaccgatcatgatgatcaatgtaacagtacaaaaatatactaaatctttatagctgtcatatagtcatatgcataaattcaattatttttgtattgaagcatcacgggttgcatcaggttgcactgagaacagcaagaagtcattgtcagtttatatgctttcctttcatttggttatagttttatacaagtgatgaaattc

SEQ ID NO: 19186 - DNA, 2010 bp, Oryza sativa
  ref <308>: DATABASE ACCESSION NUMBER: AK069559
  ref <309>: DATABASE ENTRY DATE: 2001-12-06
gcccggtttcgtcttcctctgatcctctcgccgccgctgctcccccaaccgaatccgacgacctcgccgccgggcacgcccgccgcacgcgacctcctcttcctccgccggaagccaccggacctcctcgccgacggattgcacccggcaatgacgatggtggaggccgaggccggcaaggaggcgatccggcgagccctgcggtctctgcggcggaggcatctcgtcgaggagggcgcccaccgcccggccatcgaggcgctcgcccggcccttcgccgcccaagcggtggagtggaaagagaaggctgagaagcatgaattggagctgcagcaatgctacaaggctcagtcacgttttgtccgagcagctcgttaccgagatagaagaggggaaagcatcaaaagcgctgcttaaagagaaagaaacactgattactaccatgcagactgaactcgagcaaaccagggaagaaaatacgcagctcaagcagtcgcttgaagaaaaaacaagcgctttagatcttataattcaggagcaccaggcagttaaagctgaacttgaacaggcattaacaaaacagaaagtggcagaagatgaaaacaggaatctgattgatcgatggatgcttgagaagatgaaggatgcagagaggcttaatgaggcaaatgcaatgtatgaggagatggttctaaagctgaagtcagctggtgttggtggtatacaacacaatgcactacaagaagctgatggcatcattcgtcgttctgaagctgggtacatggacatcatggaaacaccaatcccatctacatgcagaatcactatccgtgctcatgatggtggctgtggatctataattttcagcataacacagacaagctaatcagtggtggccaggatcaaactgtcaagatttggtctgcacataccggtgctttaacctccactctacaaggctgtttggggtctgtcaatgatcttgctgtgactaatgacaacaagtttgtgattgctgcctgtagctctaacaaattgtttgtatgggaagttaatggggggcgcccacgtcacactctgactggtcacacaaaaaatgtttcatccgttgatgcaagctgggtgaagagctgtgttcttgctagttcatccaatgatcataccatcaagatttgggatcttcagtcaggcttctgcaaaagcaccataatgtcagggagcaacgccaactcactagctttcattgatggtgtcaccctttgctcgggtcatagggatggacaccttcggttatgggacatccgaagtgcaaaatgcactagtcagacattcgctcatcttgacgtaagctctgtcagtgtgtcacggaatagaaatttcattcttacaagtggaaaggataacgtgcacaacctttttgatcctagaacaatggaagtttgtggaaaattcaaggccatgggtaacagagtggttagcagctggggcaggccttgcataagccctgatgaaaactccatagctgctggtgctaatgatgggtctgtttacatatggtcaagattgaaaaaggatggggtaccgacgatcctacagggccattcttcgtcggtagtttcaagttcatggtgtgggttaggacctcttgctaccgctgacaagcatcatatctatatctggacttgagatctttggttcctttggtcattgaatccaggtttttgagagttttgttccaatgtattgatgtctacctcgctttcctctcaaagatgctagtttacatgtaaatagcttagtttataagcattgtgaataacttaatccgcaaattgacagtaaacctcattggcttacttttctctgacatctgttaatggttggtcaatgctcagctgggctgggcttttaaagcagcaaattttctctaggttttagtatgtgcaattgctgatccatatggctattttttggatgaaaaatggataatcattcatcacagcttcaacc

SEQ ID NO: 19187 - DNA, 884 bp, Oryza sativa
  ref <308>: DATABASE ACCESSION NUMBER: AK099097
  ref <309>: DATABASE ENTRY DATE: 2002-08-28
gaccccaaccatcccggaggcggagagcttgacgccgccgccgacgagccgcagcggcggagcaagcgggagcgggaggtggggatggggtcgagcgacggggacaagccgctgcggcggatcgcggcgtcgttcgaggagctcgaggcggtggccaagcagcaggcccccggcccggccatggaggtgggctccttcgcccgcgcctgctccaacgtctccgtcctcttcggctgcctcggcatcgccttcaagttcgccgagatggactacgtcgccaaggttgatgatttgctggaggcatccaagtcaatctcaaaattgcctgagatggttgagttggacattcagaagggcaccgtcaggcaagctgggagccatactaggaatatgctgagggttaagcgtgggattgatatggttaaaattctgtttgagcaaatactggttacagagggcaactccttaagggatgcagcatctaaggcttatgctcaggtttttgctcctcaccatgggtgggccataaggaaagccgttgctgctggaatgtacgcccttccctcaaaatcgcagctcctgaagaaattgaatgaagatgaaaattcggcaaaggttcaaatgcagactttcatcagagcatctggaccagtaattctctacgttgaagatctgtttacctcaaggaatttaggcatggactggtgaaccaaagcctacttatccacttcgaatgtactaatccaattagacggtgtcaatacgcacgctttgtatgtactgatccaatatgatggtgtgctttgagctatgactacaatcagttgtatctggtttcgacctgttaaataagcttcagtctatgcgaatcagctcagtgattg

SEQ ID NO: 19188 - DNA, 3418 bp, Oryza sativa
  ref <308>: DATABASE ACCESSION NUMBER: AK069560
  ref <309>: DATABASE ENTRY DATE: 2001-12-06
gacggaagcagtagtcccgcaggcggagctctctctctctctccggcaaatcggcgaggtgagctctctcttctcccatcgctgaatgaatccgcgcctaaggctctagggtttcgtttgcttcgactatcatccaccctgctcggatcgccgccggttttgctcttttggttaggggtgtgtgggtgcagcgagtctaggcggatctggcggcgatcggtgtgtacgggatctcagcctcctcgttggggcggatggtcgccgggccgccgcggcggcggttgacccgaatttcgtgtcgaattttgcgtgttagtgattgatctcggtctgcttcccctcccaattacttggaggttcttcagagttggggttgctggtcttcagaattgggtggggcatgagacaattcgcatggcatacacctctttcgatttgtgttgtgcgtctgtgttagttgcgccatcaacgaccgggaaggctttggtgaaatgccgcgccccactttgtgggggaatgagagatgattgcggtattgacgcgtgcagactgatcttagtgctttgttgtcgttgaggttcacgaaacatgagcgaagaggtgaggtgaagaataaccgagacgtttatggtccttatcatataatcttgtctaactagtggtaactaccatgatgccatggaccaataacagctactagaactcataagactacgtatccatccacaataggaatatacgcgtgaccaactcttagttagcacacttttttcctaaatgcacacatcatgtttcagtcctttatggtaacatcttgaccttcactgagccatttctctgaccaagtggcaaccttgagtccttgaccatacaagaagtcgagtgtctcttggtgcgccgttggccaccaacatagatagacaatgccattcatgtagcaggggcaaggaaactcttgtaagaatctgatatcatttggttaatgaaatgggagaggagctcctctctttctcaaaaaaaaaaaaaagtagcaggggcaatggcagcatctccatttttttcccaggatgtactcatctagcttgactttgtaagtggttttattccttatgatgtctaatagggttatgcactgtttctccgcccttttagaaaatctagtttgctaaaaggtatgaatgctgtttttagtagaacaaaaatgattgatctagcatggcactgagtaagtgtgttatgttatatttctcactttgtaaagcaaacactcctgaaagtactatactctattgcccttgtaattcatttagggtaatgtagaatcacagaaccagctaaattaatgtcctccatgtctcccccattagtaaaggtacaatgcgttgcttcaacttaccaggcttctcttttgctctcacatgcgcatgcatgctgtttgtttgagggtgatgtgagtatgcttaattatcatgacggtattatttatttcctcatgctcaagtgtgttgcttccacgatcctcatttctgcttttttaaactacatttactaccataagattatttatgttcatttggcatggtttctccaggatggaaatgttctttggcagttttcttaatgaatcagcatcacaagagtacttctctggtcgtccaaatgtcgagagatgcccattcctgagaaacatcaatggagctacaacattttcattttcttctgctttgccagtagctgtaagatcttctttacatgacctctggtgatggcattatcaatatcaaaagtgcatttgatccttaatctgtgctattgtgcaggcccgaggagccaagggtccaatttttgaggacggaccaggctttgattcagcatttaaacttttccatggacgggatggaatagttccgctttcaggaaagtcatatgtacctgatgagaacaacagcgagagcgttgatgccaagcctgaacctgctctgccgtttaacccattggctgctagagctgccacaataagtctatctgcatttgggccattcggctttaacttctttaatggcaagggcaaaaggcagaacaagaagctcaacaatctaaatcagtcaaacaagaagcccagcaatccgaatcagaattccatgaaagtttgtcctcattccttccttttattttctttcttttcgcatatggatatggtgctatgtttgtgaagtcctatctagtttctcgctatcatgtcctaatagcaatgcaaactttaatgtttctcgctatcaagtccgaatagcaatgcaaactttaatgttttgtctattattccaagtaagaatgttccgtctaacagttttaccattttattataaagaactgatccagattttgttcagttgaagttaagtgatcgtgattttggttcacaagtaggcattttggcatttccctgggtgtttggctatatgttatttctcatgtatgatgtatccaagtgcacagtgttcttgattggacagcagtagttgcatagctaggattttcatctatccaatcagtttttctcatgttctgttttgaaccattttcagcagaaaggaggtaattcatcatcgcacgaggcaatgagcaacgaatggctggaaaatgggcagtgcccacttgcccggtcttaccgagcaatgagtggcattctgccccttgttgccaaggctttacaaccaccagccggtgtgaagctgaagtgcccacctgctgtggtcgctgtgcgtgcagcccttgcacggactgaacttgtgaagtctctccgtacccagcctctgcctgcaaagatggtagccattgcgttgctcggaatggcagcaaacatccctcttggggtgtggcgtgagcacaccaagaaattctcccctcagtggtttgcagctgtccatgccgctgttccattcattggaatgctgaggaaatctgtcaacatgcccaagactgccatggcattcaccatagcagcctccattgttggtcagacaatcgggtcgagggcggagcgcattcgtctgaaggcactggctgcaaagaacgacgctgattccaccaccgtggctgacatgtatccaaacaagactggaaattgcagtgacaccgagggcaaggcatgggatccgctcgcgatgaagatgatggcgggacgggcttctggtggtgctgctgctccaacaccaagcatgtgtttctgattgctcactgattggaaaatttgtatctaccagtatccctggagagtggagagttgatattgagtctattttatcttgtgatgtaattgcctttgcttgtccctcagaagtattcgtttgtttgtggggtgagacaagtggaataagagtgctactatatacacgatcattctgttgttaagtttgcc

SEQ ID NO: 19189 - DNA, 2140 bp, Oryza sativa
  ref <308>: DATABASE ACCESSION NUMBER: AK069561
  ref <309>: DATABASE ENTRY DATE: 2001-12-06
gggtgactcctcctcgtctactccctcgccgttccaccctcgccgtcgagccgcaccaccgccgcttcgcctcgctccggcggacggggaagcgagagcgaggaggcctcgggagaggagaggagaggaaggggaggaagtgtacgagatggtgtgggcgctgacccccgtcgacacagtgcgcggggcgcagaggtgctacatcttcgccgccgggacgtacaaggtcggccgcaaagattgcgatgtcattgttcaaacggacacatcgatatcgcgagtccatgcagagattgtggttgaaaagatggtggcctgggatccacaatctggcgcaccagctaacccttcctatgtccgtgtagttgaccgctcaaagtatgggacatttttcaacaaggtacagggaacacagggtagtcgccttcataaagatgaagatgcaatgcttgctgatggggatactgtaacttttggaactggcaatgcaaccttcaggttgtcatttgtccccatagtagtcttttttcatggaaaaaagtcagggaggattagtccatgtttgcaggcagtaatgacatccattggtgcatatgctactcggaagtggagtgatgaatgcactcatgtccttgttgacgagtcatgttcattgacacctgagctcctagatgcggttttggcgaaaaagcagatcgtcctgggagactggtttaaggtgatggctgaaaagaacatacacaccgaaatgccttcttctacacagtatattccaaagttgacccttgatgggatggagatacaggtggtggagatcaagctcatagagagctgccttgcaggctatacttttatcttggggtcatcagaaaagtataaatttggagacaaactacatgctttactggaatctactggagcaaaatatctgcacgttgatgagttttgtgcaaacagccaggactctggagctggtgaaaatgataaagatattcttcttgttcctgcaaaatctcctttggaattcagtaagatacgcgggctatttcctttgtccaagataaccgatgtaaagctctttgctgctattttatctggtcacttagaagcaactgccattgaaccgccagcttacattgttgcatcctcaaattcgacggatgagactattgtggtggactctgatgtagaaattgatactgcaacttctgatcatactgttgctgctagcaagtctgaacatcacattgagcatatttctgatgataaaaaggaagtcgttgctatatctgaagaagatgctgtaaatttggtggaagcaaagaccagcattaatcttcacagtgaccaggagaaagatgagattgtgaaacctatggaggaggatgtcaaggtcatagagaaaacagcaacaatgcgtggtttcaaagttgaaggcgaggacattcctgttatgaccaaggtgccaaaggatgaaactttggacagcagagatgagacttgtcatgttatatatacccagaatctggttgtggaaagcatccttcagtcagctcgtgccgaatccatagaaactggtggcattaacttcaaacgctttagaaagagaggagcagtgtctggaaacagcttcaaggacctaatcccgtattcacgagaaccatacagagaatctgattacgagcgtggaacggtaactgacttcatgcgagaggagaagaagcggaggcaaatggaagccattgcagaggacctcttcaacaatgcaaagccaaagaagaaggcagctgctggtagttcgattcacaccatgcttaccggccgcagatgaaacccaggaaaatcaccacagaacatgtcctctacctgaccctttgttggaagaccagagaaatcaatcgcatatgctgcatttttggctatcttctggatgattgccttctatcatctatgtaaacgttttctggagtcgatgactgtaagttggttgacatggaaggggggtgtgagatgtgaatcgtgtatcataggcagttcttttcctgcccaaattttggagttactaccacatgttggatgagcttgcgtacaagcccagaatccgagcaattttcacactgatacaccggttataagagcc

SEQ ID NO: 19190 - DNA, 1937 bp, Oryza sativa
  ref <308>: DATABASE ACCESSION NUMBER: AK069562
  ref <309>: DATABASE ENTRY DATE: 2001-12-06
gacctcccttgacttcgactccacacagcagcgacgccacctactctctctctctgtctctcgctctcgccgtcgccgagctagttgagccgcggatggatagccccggtggtgcggcggcggcggcggcggcggcggagtccagcaatcgcgcgggagaagatgctaaaagtgatggtgtatcttgtcagaattcgcgacggccaaacctttcattacaaataccaaacagggcatttgatgacactctgccaacgtcaactagaatcaaaatatcacccagcccaaattctgcaagaagtggtttaccaccaaggccgaattcaactagaacaaaatcatccatcaggggcatcattccacaaaggagcttcaaagcaaagagttcattacaggatggtgaccagacaattcttctaattcctgacacaccatcatcatcaggacagcaggtgaaggcaactacatcaagatcattttctttcacaaaggtcatcaactccttatcagcgaagcgaacccactctcttccagttactcctgttgcagcttcaggaccttcttctcatgaaggtcatgcagacaacctgccaagtacagttaagaatgaggttgaaacacaaattaggcgctcactctcagcaccaggaaatcatgatagtaaggatctgaggaggacggcttcatcaggccttatacgtgtgattcccacaaccccacgacctgttcctgttgaaactgttgcatcaaatgatggcattgaagaagcagtagatgctcctgaagatggaggtgaagacattcctgaagaagatgctgtctgcagaatttgcctagttgaactcaatgaaggaggtgaaacacttaaattggagtgcagctgcaagggagaacttgctcttgcacaccaggagtgtgcaataaaatggtttagcatcaagggaaacaagacatgcgatgtttgcaggcaggaagttcagaatctacctgtgactttattgagaatacagattcgaactgttaacagacaaccgcggaatggtgttcagcaaagagcagcacatccacacagattttggaaggagactccagttctagtcatggtcagcacgcttgcgtacttctgtttcttggagcaactcttggttgctgatatgaagtcacgtgcactagctatttctttgcctttctcctgtctcctgggcatattttcttccatcctcgcatccacaatggcaaccgataattacctatgggctttcgctacgttccagtttgctttcctaatcctatttgctcatattttctacaacttgttaaaaatgggggcagtccttgcaatcctacttgcatcgttcactggtttcggcatcgctattagtctaaatgcaatgctaatagaatacctgaggtggagactcctgcggaatcaacggttaactcaacgtagaaatcacagacatggtcaatctggaaacaatgcttcaaacgagaacactgcaagtaatgctaggcagcaaggcagcggaagcgatcaacagtctgcagaacatggctgaagatgatccatctgtggttttgcaggtatcatggtgatgataaaattcaaaatcaaaagtgttaatgaatgaatggaataaaggcgccactggtaaaaccgcaaatctgcaattccaagaatgccatggccggttgccacctaagttgatcgtgaaacaaagttattattcagaaaaagggggctctcaagtctctcaactctgaaccaaaaaggtccagcagtctccatttactcccggttatagtttagtagtccagtgtgatatgtgtgtttatgaaatgtataaattgcgaaagcaaatactacacaccgacctttgtatcacaaccatgaacaaactgtatatagctcatcgttgtcgattttactttgctgc

SEQ ID NO: 19191 - DNA, 2802 bp, Oryza sativa
  ref <308>: DATABASE ACCESSION NUMBER: AK099098
  ref <309>: DATABASE ENTRY DATE: 2002-08-28
ggcctacaggcgcaggaagaggaggagaagaagcggaagaggagagaaaaaaaaaattcgcagcaaaaaagaaaaaaaaatcgcagctgcaaggtagaggaggagaagttggggtttgggagggccagcgattgagccgacgaactcaaggttcttcaaagtgatgattgggatcgaaccctggtaacctccatgtctggggcgccatgctccaaccttggacttgttcccagggatatgcatggtagtatccctattagcactacaaattcctctgggccaagcattggtgttagctctttggtgacggatgctaactcatcgctctccggaggtgcccagttgcagccaagtacgagcatgaatgctgattcattcatgcgccttcctgcttccccaatgtcgttttcatccaataacatctctggatcttcagttattgatggtcccattgtgcaacaaagtcctccccaagagcagatgcagaagcgaaggtcttctagtgtaacatcacaacctgttattgatgctgctggtgcattgcatgctcagaagaagtcaagggttgatattaggcaagatgatatcctgcaacacaatttaatccagcaactgctccaaggccagagttctcttcatctgcagggtcaacagaaccctcagattcaagccttgatccatcagcataaactggcacagattcagcagcaacagcagcatcagatgttgcaaccattttcacagatccaacaatctcaagttggcatacctcggcagccacagttgaggcctccactagcgcagcctggaatgcagctagctggacctgttaggactcctgtcgagaatgggctttgttctcgaaggttaaagcaatacttataccataagcgtcaccgaccagagaataatccaataacatactggaggaagcttattgatgaatattttgcaccacgagcaagagaaagatggtgtgtatcctcgtatgagaaaagaggaaatccttcaggtgctgttccacacacagctccggattcatggcgctgtgacatttgtaatacacatgggggcaaaggatatgaggctacctatgaaatacttcctagactctgtcaaattagatttgaccatggtgttatagatgaatacttattccttgacatggccaatgaattccggttgcccaatggactaatgctgctggaacatactaaagttgttcagaaaagcatttatgaacatatgcatgtgatacacgaggggcagttgagaatcatattcacaccagaactgaagataatgtcctgggagttctgttcacggcgacatgatgagtatatcactcgcaggtttctttcaccccaggttgctcatctgctgcaagttgcccagaaatatcaaactgttgccactgaaagtggtccagctggggtctcaaacagtgatgcacagaacatttgcaacatgtttgtgacggcgtcacgacagctagcgaaaaatatagaccaccacaccttaaatgagcatggtctatctaaaagatatgttcgctgcttgcagatatcagaggtggtgaatcacatgaaagacctgattgaattcagccacaagaacaagcttggtcctatagagggtctgaagagctatcccaagcaaactgcagcaaaacttccagtacaaaacatgcacgagccaaagcaactaatggcagctgctggccttcctaatgaccagactaacctcaaagccatgggtgtcaaaacagaaatgaacacccatgcgaatgagacgcacggtattggaccaattggaaatggtccgcagaatgctgctgcacttaacaattaccagaatcccattggaaatggtctgcagaatgctgctgcacttaacaattaccagaatatccttagaagttcagtcgcaaaccagagtttgcttcagcaggaggcatcaagcatgtttaaaggtcccacagcaatgcacaatggcattcagctggaagcatctagatccttccgtggaccaaaccaggtgcatctcgcgcagttccaacatccggcctcatttcagcagcctatgcctcagcagagcagcctccagggcttgggtgtgagcccacaatatcagcagcatgtgctccatcagttgctgcaagaggccaagaacactaacaaccgtgtcttggcgcagcagcagcagcaacaacaacttcaacatgctcctgctaacagtggtcttgcatcaggaggaacggctatcaccggcagcgccgctagcggggatcatatgaataacaacggcgcggtgaagggtgggactccaatggttacaacaggtcctagcagtgtgatcaacaatacagccagcatcctccccagcagaagtaacagcttcaagtcagtgagcagcaacccccaagttgcagctgctgcgggcggcggcattggcagcggcggccatgcggctacccccaaggctgatgctctgcatgagttggatgatcttgacaatcttgggaatctgatcagtactgaactggaggagagtgggctgttcctgggtgaccaggcaggtggtggctactcatggaacatgtgacaaatgcttgcctgcttggcttcttggtgatgatggaaactgccgtagattctagcttctcgtcttgttcttttttgttttgggtatgtggagtttttgtttggggtgtctgaaacagtttctgatgatgatgatacactgatgtaatttaagcgttatgtgcgctggtaagtgagttggcttggaatgctgagatcg

SEQ ID NO: 19192 - DNA, 2377 bp, Oryza sativa
  ref <308>: DATABASE ACCESSION NUMBER: AK069563
  ref <309>: DATABASE ENTRY DATE: 2001-12-06
ggcttgccttaaacgggcggcgtgacggggacacactgccgacgatcgaacgaacgaacgaacgatgcgtccctcctggtgctccgtcgtcgccaccccagatgggtctccttgaggacctcctcctcgccccgcgcgtcgacggcggtggcggcggcgacggcgaggccatggcggcgcccgactacgccatccctcccctctccccaaccgccgcctccgtcgtccaccgatgcgcccggatcgccggcgtggaggtggagcagctgctgcggcggttcgagccggagaagggggaccagccgctggcgtacgccaggagcgtcgtggagtactgctcctacattgccctgcgcgtcgagaccaagcgccatgactacctcagcgacagcgagttccactcgctcacctacgacatgatgatcgcctgggaagcccccgacgacgagacggacgccgcgttgcagaaaatgtcatttagcttcgttgacggcaaggatgacgacgattgtgggtccatgttctgtttgagccccacacaaatggccattcaggttgatgggaggagaacggtcagtcctgaagcatttgccaagattattcctgcgtgtcctgcaatggcacacgcgatcactgttcgcaacttatttgatgcgctcacaaactctacgggaggccgcctgcattttctcatctaccataagtacctcaaatgtttagacaaggtgctgagatttgcgaaacgtatatcaggtggacacaaagctccagctcttcaactttctgatggagaagtgatccttgatatctatggtgccgcgacaaccaagccgattcttcaacacattgggacgtccacttggcctgggaggctcacactgacaacccatgctttgtactttgagccagtcagtgttgatttctcatacaacgaggctgtggtgtatgatctgtcaagggacttgaagcagtctataaaacgtgaatcaactggcccatggggtgctcagctatttgacaaagctgtcatgtacaaatctagctctacaagagagccggtgttcttcgaatttcctcaattcaaaggtcacactcgtcgagactactggtttgcaatcatcaaagaggtgttgcacgctcacaagttcattaggaagtacaggatgatcaatttacataaggccgaggcgctttctgttgcgacactaggaattctcagataccgcacggtgaaggagggattccacatactgcctgcacatttcaagactacccttgccttcaatttggcagagaaattgcccaagggggacaagatactggaagcattgtatggtcagatgaaagattattcctcaaggttcagagtagatgaagattctgttcaaagcagttcagatgatctgacgcttgctgatcctttcccactttctgcatatactttggtgaacatgggtttgttgacactcaaagaggaggacaatcccgaggaatgggatctcactgtccgagatgtgcagacgggaggaactagctcagtgcaaatggctctagagagatctgtaggttactctggcagagtggaggctgcgagggcgacccttgatcaggtcaaagtggaagacatcgacactaatgtggctgtcctgaaggaactgctatttccgttaattgaaataggcaaaaggcttctcttttttggctgagtgggaagatccacttaaatcatacgtcttcttgttctgtttcctcttcatagtttacagaggctggatttggtacattttccctgtctttctgcttggttctaccatcttcatgctatggcaaaggcataccgggaacgggcagatgataggcgcatttgaagtcacaactccacctaggagacgaactgtagaacagctactggcgctgcaacaagctatctcgcaattagaggcacaagtgcaagccggaaacatttttcttctcaagctccgatccctcctgcttgcagcgttccctcaaagcacgaacaaagtagcagctacaatgctcgtggcatctgcgatattcgcgtacctgcccttgagaagcatacttgtactgattgtgctggaagcatacacgaggcatatgccggcgaggaagaagagcagcgagaagttggtgaggagactgagagagtggtggctgcgaatcccagctgctcctgtacagctcttgaggcctcaggataccaggagatggacatcgaggttgagatcgagatgacccacatcggaaatgtcggtactttacacatgtattatatgtacctgtaaattcatcatgttgttagaaatgttgatatatacgatcagatttttgtgttgaaatggaaagtacatattgt

SEQ ID NO: 19193 - DNA, 1455 bp, Oryza sativa
  ref <308>: DATABASE ACCESSION NUMBER: AK069564
  ref <309>: DATABASE ENTRY DATE: 2001-12-06
agacctgccgcattctcccccccaagatccagatcgccggtcacccccacgaactcgctcgagatccagagagagagagagaggcagtttcttggttgattttcgaggatgaagaggaagactcggaacaagataatcctgacgacgctgctggtgtcggcggcggcgatcctgatcggcgggacggtggcgctgatcctgacggcggggacatggaaggtgaagatgaaggagtcgcgcgagaagatctgcgacaaggggtgggagtgctcgggtagcaagtactgctgcaacgacaccatcaccgacttcttcaaggtgtaccagttcgagaacctcttctccaagcgcaacagccccgtcgcccacgccgtcggcttctgggactaccagtccttcatcaccgccgccgccctcttcgagcccctcggcttctgcaccaccggcggcaagcagatgcagatgatggagctctgcgccttcctcggccatgtcggctccaagacctcatgtggatttggtgtggcgaccggcgggccgacggcgtgggggctctgctacaaccacgagatgagccctaaggaggattactgcgacaagacgaacctgcagtatccctgcgtcgagggcgccgagtactacggccgcggcgccatccccgtcttctggaactacaactatggcgcggcgggcgacgggatacacgaggacctgctccaccacccggagtacctggagcagaacgcgacgatggcgttcatggcggcgatgtggcggtgggtgacgccgatgaagaagaagcagccgtcggcgcacgacgtgttcgtgggcaactggaagcccaccaagaacgacacgctcgccaagcgcctccccgggttcggcgccaccatgaacgtgctctacggcgaccagatctgcggcaagggctacatcgacgacatgaacgtcatcatctcgcactaccagtactacctcgacctcatgggcgtcggccgcgagcactccggcgacaaccgcgactgcgccgagcaggccgccttcaacccctcctacaagaagcccgacgatcagcagcaacaaagctagaacagatcacccccaattccccccaattccacggtaaagaattcacccaatgtgttgttgtatacatcttcttgctactgcaatcgctattgccaatgcaaaccaaccattgccattgctgttgcctcgtgagctatacagattaacggattcttcatcagtgtgaggagctgtggtttgcattggtgtatttctgagtagcggattttgagggaagtgtcaactgtgtgtgtgatgcctatgggatttgggaaatttgttgtagcccttgttgtaccatagtgtacattttcattccatttgatttttgtcacatatacatgtttaaagaggaggattcaggataaacataccatgattttgatg

SEQ ID NO: 19194 - DNA, 2085 bp, Oryza sativa
  ref <308>: DATABASE ACCESSION NUMBER: AK069565
  ref <309>: DATABASE ENTRY DATE: 2001-12-06
gacagtagtaataaaacctcctcctgtcggcttcctccttcctcctcccgccgccgcacagcgcaaaccccgcccaaaaccctagctaagcctagccgccatggacgccgccgcgcaggaatccctcatcctggagctccacgccatcgaggccatcaagttcggcaccttcgtgctcaagtccggcatcacctccccgatctacctcgacctccgcgcgctcgtctcccacccgggcctcctctcctccatcgccaccctcctccacaccctcccggcgacccgcccctacgacctcctctgcggcgtcccctacaccgcgctccccatcgcctccgtcctctccgtccaccgctccgtccccatggtcatgcgccgcaaggaggccaaggcccacggcaccgccaagtccatcgagggcgccttccgcgccggggaggccgtgctcatcatcgaggacctcgtcaccagcggcgcctccgttctcgagaccgccgcgccgctccgcgaccaggggctcgtcgtcgccgacgccgtcgtcgtcgtcgaccgcgagcagggcgggagggagaaccttgccgccaatgggatcacgctgcactcgctcatgaccctcacggaggtgctcgccgtgctgctcaagcacgggaaggtgaccgaggagaaggcgagggaggtaaggcagtttcttgacgccaataggaaggtgaccgttcccggagcggcgggcgccgttaagcccaaagcggtcaggaaggggtttgctgagagggctggattggccaagaacccgatggggaagaggcttttcgaggtgatggaggcaaagcagagcaatttatgtgttgctgccgatgtgggaactgcaaaggagctccttgagcttgcagagaaggttggtccagagatttgcatgctgaaaactcatgtggataccttgtctgactttactccagattttggagctaagctttgctcgattgccgagaagcacaactttttgatatttgaagaccgcaagtttgctgacattggaaacacagtgactatgcaatatgaaggaggaatatttcgcatattagactgggctgatatcgtcaatgcccatataattcctggacctggaattgtggatggtctgaagcttaagggtttgccaaaaggaagagggctgcttttgcttgctgaaatgagctcggctggcaaccttgctcatggagagtacactgctgcagctgtaaagattgctgagcaacattctgattttgtaattggatttatatccgttaatccagcatcttggtcagttgcgccatcaagtccagcatttatccatgccactcctggagtgcagatggtttctggaggagatgctcttggtcaacagtacaatacccctcattctgttataaacgacagaggcagtgacataattatagtcggacgagggattataaaggcgagtaatccagccgagaccgcgagggagtaccgcatccaagggtggggagcataccaatccagcttgccatgagaaattgagaatgtgtttaggccatgtttgtttcagcttatgattattataatctagattattaagccagattgctataagctggattataataagctgacatagaataagctgtgagttgtttgtttgtctggattattggaggcatggattattgggtttgaaaggctaaagtctataataccctcagctatctgttcggttgatggcatagtggttaatttttctcaagcatgtaggggtagtgggtctttagccactcaataatctgaaaaaagctcctttagagcagcttattagattataataatctggcttatagattataataatctgctacaataatctacttgtttgtttcagtttactcctaataaggtagattataataatcctaaactgaatcaaacaggcccttagtccacaccctatgccaaataatgggcattcactcattcaggcagctactgtaataagagcatgctctgcgttccatcagtattggctcgcgctgtttgcaacaataatttagagttcaagatgatgaagcc

SEQ ID NO: 19195 - DNA, 2349 bp, Oryza sativa
  ref <308>: DATABASE ACCESSION NUMBER: AK069566
  ref <309>: DATABASE ENTRY DATE: 2001-12-06
gtgtgatgatgatgagggtgttgggtttcatgggagatggtggtggtggtgggatgatgacggcgcaggctgcggcggaggcggcggtgggcgcgatcgggtgcgggtacgacctcacgagcgacctccgcctcagccgcgtcaaggcgggcgggaggctggtggacatcgacggggcgagcggcgcggcgagacgggagctggtcctcccctggggagccgtcgtggggggcgtgccggtggggatcgtcgccgacaagggggagcgcacccggttccgctccgacgtcctctccttcgctcagatggcggagcaggtgaaccagacgatgtcggtggcggggaagatcccgtcgggcgcgttcaacgccatgttcgactatcacgggtgctggcacaaggacgcggccgccacggggagcctctgcttcgacggccgcttcatcgagctctacgccgtcgaggccccccgcgcgcacctcgccctgctcgaccgcgtcaagcgcgacgtcccgcccttctgggaccccgctgctctcgccgaattcatcgacaagtacgggacgcacgtcatcgccggggtgaagatgggagggaaggatgtggtctgcatcaagcagctcaagggatccaatctcacacagagcgatgtgcagtctcggctcaagaaactctccgacgacaagctcgctcaggattcacctgaaagtttaactgcaagagacgacaagttcttgctgggattaaacgggagtttattattgggtcctggatctgctgcttggcggtcgttcagaccatcagtcgtgtcacacaaagatgacatcctcagtatccacatcagaagagggggcgttgataatggccaaggccacagtaattggctttcgacgatcagcggttcaccggacgtcatctctatggcttttgtgccgattacttctctgctcactggtgttcgaggctgcgggttcctgaatcatgcagtgaacctctacctcagatacaaacctccaatagaggaactccatcaatttctggaattccaggtgccacgacaatgggctccagagtttggggagctccctctggctttgggcccgagaaagaagaagaacagcctgccatctcttcagtttactctcatgggtcctaagcttcatgtcaccactgccaaggctgattctgggaatcgtccggtgaccggcattcggctgttcctggaaggcaagaagaacaaccggctgggcgttcacctacagcatttgtcagcgacgccgggcacgatcacgatcgccggcgaggtggcgtcggcggaggacgccaccgtgagggagcgcgactacatcgagcccatcaagtcgccgctgctgtcgcacgtgtgcacggcgccggtgcagtacaacggcgcgcggatcgacgactgcgcggcgatcgtgacgagggcgtggctggaggtgcaggagacgtgcctcaagaaggtgctcttcctgcggctgggcttctccggcgtggcatccaccaagatccggcggtcggagtgggatggcccgttcgtcgtgtcacgcaagtcgggctcgctgtcggcattgttcagcgcgcggctgtccgccgccggtgccggtggctccgcgcagatgatgcagcagcagcagccggtgggggagaaggtggaggtgaactccgccatcttccccaagggcccgccggtgcctctcccggtgcagaggatggcgaggtacgtcgacacaacggaggtgatgaggggccccgccgacttgccggggtactgggtggtcaccggcgcgaagctctgcatcgaaggcggcaaagttgcactcaaggtcaagtactcgctgctcatcgcggaggtgctagactaccctgagtgactgttgagaagaactgcacggtgtgtgcatctttttggctcgtttgtgatgctgttgtgtacagtacagtacagtacaggatgtaactggttcaatggaaggagagagagaagacaccggcatggttgagggtcgaagaggagacgagatcgtccaatcgatggctagttgcaagcgcatgattagttatttatgtagttcacaaatttgttgaataaggggttgaatcgagatctcctatatgttttttgttctagggtttgaatggtgcacccacaaggagacacggtcgtggaatatttcatctttctaggaataaatcgataaaatgtgtaacttaaatcgatgcaaatcttcggtgatattttaaccaatcatgtttgtgaaacacaatataaatctcttcttgtaaaacaaaatatatatctcaaaagaaataaagggaggagttttgacg

SEQ ID NO: 19196 - DNA, 3841 bp, Oryza sativa
  ref <308>: DATABASE ACCESSION NUMBER: AK099099
  ref <309>: DATABASE ENTRY DATE: 2002-08-28
gactgtgaactcccccctctcgagaaaaaaaaaaagatccaaaattttttcgcccttgggttcgaaatcttcgtgccttcctcctcctcgcggcctccaattcgaacgccccagttgctcgcgccgccgcggattccccagatcccacctcctccccagctcgcgcggcccaattcgaaggcggttctagggtttcccggcacgaatttagggtttcgggggagcttcggggggtgttgttccttgttccgcctagggtttggaatttggggggcgtggagagatgggataaggagagtgttgggagggtgggagctttgcttggggtgtgtgtgtgtttgggtggtgctgagctgagctagggtttggtggtgaggtgctgaggaagggaggtggggggtggaaaatgttctactcgcagttcatcttggccaagaaggggcccctcgggaccatatggatcgcggcgcatttggagcggaagctgcggaagaatcaggtcgcggatacggatatcggcgtctccgtagattcaattatattccctgaagttccgattgcacttcgattatcaagccatcttatgcttggtgtggtcaggatctattctcgcaaggtgaactacctattccatgattgcagtgaagcgttgttgaagataaaacaagcctttaggtctactgccgttgatcttccccctgaagaatcaactgctccttatcattctataacacttccagagactttccatctggatgattttgaattaccggaggctgcatttcagggtgacattgatcatcatgtaagcacaaaagaacagatcaccttgcaagacaacccagagaaaactggatactcaacatcccaatttggcttagatgaaagatttggtgatggcaattcttcacatattgggttggatttggaagaggaattaatgctgaacaaggaccagtcaattcaacttgaggctgatgatggcattattattcaaggtcgatcagcagttcatcctaccgatatggaagttgatgataaccaaaataaagatgaaagcgctgaaggatacaacatggaggatggaccttccagtcacaacaaactaaatccgttaagtgcagatggtctagtaggaaacagtcttcctaattggcatacatacaatgtgcaaacacctgatctgaatgatatgctattgaacaatgatgggaatgcaggaccatcagcttcatactatcaacctagtcccttcccttgtgatgagcctgcatcaccagagtttgtaagtgcccaggccccggctacacctggcctaatggaagagactgttccttccagagtgcatgaaagtcctgttctgagtccacagcgaaaagcttcaccatcaagcaatgatgaaactgcaaagacagctgaaaatgctaatgatcttgtgggtgctgagacgactgaacttgcattgacaaagcctgtgcaaattgaatcttctggtgctgtacaggagattgattccttgagtcaacaatgtgcaactgaggagttgccaccccaagctgaaacctcaaacttggaagctaccatggacaagtcaatgataaatactgatggtgtagctgcatcaggtgaagctacagctgctaaagaaaccactgaagtgtcattggttgaaaattctttagagctatgcgctgatggtcctactgaacctgtgattgagaaccaaacacagtttaatgatggatcagttgatgtgcaagggggcggtcagcatgcacctcatgctatcttagcaactgcagattcccaagtgaatgtagaagcatcaacacaagaaatggcatctaacgatataccaagtgacctaccaaccttggaatttccagaacgtgagaaaatgctgtcagctccagacgttgaattgtaccaggcaaatgacttgggccaggtaactgcagaaaagggaaccactgaatctgatggaagtaacaaagtaggtagtctcactagcagaaaaagacacttggaggacagtttgccagctctcgaaagtgcaactactgaaaaattgtctagcagaccacgtggtaaaagaaccattgatggtattcctgatgatgatgatttactggcgtctatattagttggtagaaggacccctggactgaggcttgattcaacaccaataccacctaagacgtcatctttgaaacgtccaaggttgacgtcaaagagtaccacaccgaagagaaaagtgcaaatggatgatgccatggttatacatgctgataccatacggcagcagttgatcagcactgaggatataaggcgcattcgtaaaaaggctccatgtacccgttccgaaatatggatgatcgagaaaggttccttagaagatgatatattccatgagcccatcttttcctgcatgtgcaaggagctaaacgatttgcaatatcggacctatgagattgttgctcatcccaccattcataatatggaaatacatgtacggctagacatgtcccaaactatggcagatggcagcaatgatgttggcacctctggcgcaaaggacagtggaaatcaccaagatcatgtagtgctaccagatggagctgagtcagatgcgatgcatcctgaagcaactgatgcagcagatactagaactgattttgattcacacatgccatctgacaaacaggttaacaatgttgaaggagtaactgaacaattaactgataatgagaaagaaactgcagttgttgagaaagcaaccactaatatgggtgacagtgctcaagttgattcacttgataaggaatatcttcaagatgttccagctgatctgcagaggagcacaaatacaaatacacctctgtttgtgctagatgacatgcctggtccagatgtggttctggatagctctgatccagtttctgcacaagcagtggatgatatgaaaggggagttgagtgacattgtccatgacaatgtcaatgcatttgacaataaggatatgccgacttctgaggttaccgtactggaatttactcaaaacgcttctggttttcctcagccaacagaggatgaaaatgttctgtccgcaatgggtgaaaattctggattgcaagaaaatcatgtaggatctgttatggatctggacaatatggggcatgacttttcactaaaggaatgcagtgattttggcagtgcgattcagggtgttgacacagattttctgatgtatgatgatgaggtggactgtgatgaggctaatgatgatgagcctaatcctgaggaattccagtctcttgataacagtggatggtcttcacgtactaggggtgttgcaagatatctcaaaactttatttgatgaggaatctggtctgggaagaaagagtgtggccattgatcatctgttaagtggaaagactaggaaagaagcatcaaggatgttttttgagacattggttctgacaacaaaggacttcataagtgtggatcaaccaaactcctttgattttgtcagcgttaagccagggccaaagctcctgaagtcagatttctagatcaaaaaccagctagcgtggcgcgatacatacaatcttaccatatctgtcacattaccaacaacatacagatctcgcatcgccgtgaccgtcatttttgttttgttctttttaatttatcctccctctgtagtatccccgcactaatctgtgtttactaggcttcttgggtaggattctgttgtacccccctccgtgttggctattcagtgtatatatgattagctcttgtaaagttgcttgtgtaatgtgatagcatcagctcct

SEQ ID NO: 19197 - DNA, 1545 bp, Oryza sativa
  ref <308>: DATABASE ACCESSION NUMBER: AK069567
  ref <309>: DATABASE ENTRY DATE: 2001-12-06
gttgggggagttaatggaggaggcattggagtagttgagctcgatcgatgaggaagaagactagaagaggaggagggacggcggtggtgagtgacaagcgccaaccgcgattaatggcgacgaggacgtgcgccgtaatggcggcagtgaccgatcggagaggctccaggttcttggcggttgaggctggaggcgtcgaggccagccgcgtcatccaccccctttaaatgcttcccgccccttcgttctgctcaatcactcgcatccatccatccatcgatcgatcgatcggcgatggtcgccgccgaggagaacccggagtccttcttcgcggcggcgccgccgctgcgggacgccgacgccgtggccgcgaggctgggggaattcatcgcccgcaactcctccgcagcgggcgcgggcggcggcggcaggcggatcgtgtgcgtgacgtcgggcgggacgacggtgccgctggagcagcgctgcgtgcggtacatcgacaacttcagctccggccaccgcggcgccgcctccaccgagtattttttgaaggctggctatgcagttatcttcctccatcgacgaggaagctgccagccttattgtaggttcctccccgatgattcattcctcaaattctttgatgtcgatgcagaatcgaaggttcaagtggcggagtgccacgcgccagtggtcaagaaagcaattggagattattgcaaggcaattgaaggcggctatctgttgaaactcccattcactacaatatttgaataccttcagctattgaagatggttgctacatctataagttcggctgggccactcggaatgttctatcttgctgcggctgtgtctgatttctatgtcccttgggatagcatggccaaacataagattcagtcaggtggaggccctctggatatgaggctcagtcaagttccgaaaatgctttcagtgttgcgaaaccaatgggcccccttggcgttctgtatatcatttaagttggagacggattcggacatccttattcagaaagcagatatggctctgaacaagtacaagatgaacatcgttgtggccaatttgcttgcaacgtacaaagaggaagtcattattgtaacagacaaagaaaggagtactatccgaaagatgaacaaggatgaggatctggaaatgcagataatcaaaatcctatcacagaatcactcgaagtacatatgcggaagcacaaacgggtgcgtccagagcccatattgaattgcgggaatctgtactgtaccgtttcacattagaggttttacttaaattactctactaaagagtttgatttgctttctgggcgttgaaatgaaaagaaagcccaactgaatctggaatgagaattcagtatacggtgtaatccgtgatgatgccgataggtacacaaacagcatcacttttttttctctctttcagaattacaaaaaagagagtgaagttaacagcgacagccccaaatataaatggcttattttattttaatcaaaattaatattccatgtt

SEQ ID NO: 19198 - DNA, 2008 bp, Oryza sativa
  ref <308>: DATABASE ACCESSION NUMBER: AK069568
  ref <309>: DATABASE ENTRY DATE: 2001-12-06
gactccacgtctccacccggccgagctcaacctccgcgccgcaccggacggtcgcacccgcgtctcccacctccccggcggcggctcccctcatctccgccggtcgcctcctccaagcctccgcgacgcgcacggcagagatgtaccgcatcgccgggagccacttgcgctctctcaagagatacagttatagtaggtttgctagtacaagtgttgtgaagcagtcttcaggtggtttgtttagctggcttcttggggagaagtcaagccaattgcctcctcttgatgtccctctcccgggtattacccttcctccaccactgccagactttgttgaaccgtctaagacaaaagtcaccactctcccgaatggcatcaagattgcttcagaaacgtcagtgagtccagcagcatctgtgggactgtatattgactgtggttcaatatatgaaacacctgcttcatctggagcatcacatctgttggagagaatggcgttcaagagcactacaaacaggagtcatttgcggctagtacgtgaagtagaagccattggagggaatgtctctgcatcagcctctcgtgaacaaatgtgctatacctatgatgcattcaaggcctatgtacctgagatggttgaagtgcttattgatagtgtgaggaacccagccttttttaactgggagattaaagagcagctggagaagatcaaggctgaaatagctgaagtttctgataatcctcaaggtttacttctagaggcactccattctgctggctattctggggcactggcgaagcccctaatggcacctcagtccgctattcataggttggacagtagtatccttgaggaattcattgctgaaaattacacagcacctaggatggtccttgcggcatctggagttgaacatgatgaactagtttcaattgctgagccacttctgtcggatcttcccagtgtgaagcgtccagaagagccaaaatcagtttatgtgggaggagactatcgttgtcaagcggactctgacaagacacatattgctcttgcttttgaagtaccaggtggatggtttgaagagaaaactgccatcattgttactgttcttcagatgctcatgggaggaggtggttctttctctgctggtggtcctgggaagggcatgcattctcgattgtatctccggatattaaacaactaccatcagatcgagtcattctctgcattcaacagtatctacaaccattctggtctttttggaattcatgcaacaactagcccaaattttgcttccaaggctgtggatttggcagcaggagagcttcttgaggttgcaactcctggaaaagttacacaagaacagcttgatcgagctaaacaggcaaccaagtctgcagttttgatgaacttggaatccagagtcgtagcatctgaagacatagggaggcagattttgacgtatggggaaaggaaacccattgagcatttcttgaaagatcttgaagcaatcaccttgaatgacatttcttctactgccaagaagatcatttcatcaccccttacactggcatcatggggtgacgttattcatgtcccgagctatgaatctgttagccagaagtttttctcaaagtaagcaagcctatcgcatggcttgcccccgacttctaaagttgcagacgtgtaactctactggtccttggccctaaccgctggaattcacaataataaattgtctagacttatttttcttagatattttaattttaagcaaataatagttactcaaacggcgatgatgctgactgtcctttttattcttttcctttattatattgatccataattttgcgtcaggctggaactatttttagttccgcggtggtgttgttgttttttgttttgttttttttttgtcgtgctgagcttagcacagctgagctgttgcgtatgtgtcgtgacttcaagtctatgcatgctgaaatcgtcttgatgatttttcct

SEQ ID NO: 19199 - DNA, 1422 bp, Oryza sativa
  ref <308>: DATABASE ACCESSION NUMBER: AK069569
  ref <309>: DATABASE ENTRY DATE: 2001-12-06
ggtggattttctggtcggctccggccgccgcgggcgcgttggcttccgcttcggtttagcggatgcgggcttccgctagggtttctcccgctctgttgttaaatgaagaaagcacttggaatacacccagtagttgcactttacctgctggagagatgcattgactggtcaaattctgaatgattgctctgagttgtctaacttgagcaacagaacaggaatggctaagtgggggtgtcaagactcaagaagttcagaaagtaaaatacttttcatgccacatgcgccacaagacatgggctgtggatgccagatgattggagaagagaccagccagcatcgtgacactgctgagtctgatacacatcatgaggccaagtaacatggtttgcgtggttctttctgacagtgtaggcctccaagtcgccttctcaccagcactttatctcctgttgttctgagcttctcccacttgcaaggggcaatacacgagtagcagaacatacactacacatcactcctcagtatggcctgtccctctcttccatctctaagagttcctcttcccaattcatgtttctggcatgtgactgccattggggccatattgtagtgtggcccctgttggtcagagccttgagctaggtgacacacttgttgtaaacgggaaggtcactctccctcttgcctgatctcatcaggttcctctatttgcagctagtagtagtctatttaacacgccagtagccacccatttctttctcccgtgcggctgtcttgtgtttctcaaactttgtcttacgccagccaaccgtaaacagacactgtctgcgcgtctctcttgcaagaacagctagctctcccatacatctctcctacgttggctgagatcgattgctgccacctacattggccgatatgtcaagccggaggtcacggtcgaggcagtcaggctcgtcgaggatcaccgacgagcaaatcagcgatcttgtatccaagttgcaggatctcctccccgaggctcgactccggagcaatgatagagtgccatcttcgagggttctgcaggagacttgcaactacatcaggagcttgcatcaggaggtcgacgacctgagcgagaggctgtcggagctgctggccacgtccgacatgagcagcgcgcaggcggcgatcatccgcagccttctgatgtagccgccggcggccgtcgtcgccacattgtcttttgctgctgggcaatcagcgcgcacacaccctcggaatgtttgtagcttagagagtgatcttaattagtactggaggagcagggattcctaattcactctacgttcataagtaatgtaatgttgttgtcatgtcatcttctaaaccagatcaatcttttttgtgtacttaatcaaaatccatcctgattcgtgc

SEQ ID NO: 19200 - DNA, 889 bp, Oryza sativa
  ref <308>: DATABASE ACCESSION NUMBER: AK069570
  ref <309>: DATABASE ENTRY DATE: 2001-12-06
ggttttgctccaccactagtctttctctcctctcgtcgccaagcgaagcgagacagtctcgtgcgcctccggctttcctctccgacggcgacgcgccgacgtacgacgccgtggacgagcagcagcgctgtggatcgacgagcggcgatggcgaaggcgcggaagcagcagccgcagggcccgttcgccggcggggccgccgccggggagaggtcgttcctcgggttccagtaccaccaccaccaccgcggcggctccgtggcgccggcctacggcgacgacgacgacctccccgatttggcggaggctgatgtctggtacgcgccgtcgtcggaggggggcgcggatcatcgaggcggcggcggcggcggagggggagggggagggctggaaatcggcggcggcggctggggcggagggaagcacaaggtgggcgggctgagccgggcgttcgcggacgggcggcaggtggcggcgtcggcgccggtgcaggtgcccgcgtggcccggccgctacgccgaccccgaccaggcggcgttcgcggaggaggagaagcgccgcgaggaggaggacgacgccggcgacggcgacggcgacgggtgggtgccgccgcacgtgtacctggcgcggcggcaggcgaggtcgtcggtggtggagggcgtcggacgaacactcaaggggcgcgacgcctcccgcgtccgcgacgccgtctggagccgaaccggcttcgacggctgagccagattaaaccggggagacaagccaattaggatttaatttcttctcttcttcgatttttccccctctcctaattttcttcctcttaaatttttgtgaaaaaattttgtaatatggtttaaattttgctctctcgttttatcttctcatc

SEQ ID NO: 19201 - DNA, 2556 bp, Oryza sativa
  ref <308>: DATABASE ACCESSION NUMBER: AK069571
  ref <309>: DATABASE ENTRY DATE: 2001-12-06
gacaagcagccacacagagagaagaacacccgccaccttcgcggccacccaccaccgatcgccgccgctccggcggctcccagctcgcgcgccgcgcccccacgaccaccgccgcctccacctcgccggccgccgccgacatgaccggactcctcctgcattcttcccttcccccacgtgcatcccgcccgggtttcccgaggttgatggaagctgacgaatccggtgtaccgccgcggccggtcgccggagatgttcacatcccggcgagccgctctgccaaggagccaatcttcatggtaagtttcgggccgtcttcatggttaacgcagatcacctgatcggagcacgagtatgaacagtcgcgtgccggtgtaggagcggcacggcggcgacctgctcaccgccatggcgtcctccccggacaccacgctggcgttccacgcggctcgcccggtgtccatcagcctgccggcgtcgccgaccgggttcgacgtcgccaggtccggggtggagctccagcgtcacgccatgacggacgccccgtgcatgctgccgctgcccgggtggccggcgatgatggccgtcgcgcagcccgacaggatgatcttccgctcacagccgatcgccgtcctcggcggcgcggccgctctgccccagcagagcagaagctcccaggtgcacgacggcacgagccgcgatggcgcgccgcgcgcggcggcggcggcggcgacgacgacgggcaaggcgcgcgggcgcagggacacgagctacgactcgttcaagacgtggtcagggaagctggagaagcagatcaccacccacctgagaggcggccggcaacagcagcagcagcaacagccagagcagcggcggcaggatgaggaacccgaggacgacgacgcggcggcggcggcggcggcggcggcgacgacggcgagcagcagccggtcgtactcgtcgatgccgagagtacagcgcttcttcgcggcgctggaaggccccgagcttgacaaactacgggtacaccatgagcaaccctctccctgtcgtctcgcattggtcgaacagttggcatgcaccctagtacgtagtcgctcacaacgcgccgccgtggtggtggtgttggtgtcgtgtcgtcggcagtcgtcggaggcgctggtcctgccgtcggacaagacgtggccgttcctgctccggttcccggtgtcggcgttcggcatgtgcatgggcatgagcagccaggcgatcctgtggaagaacatcgccatctcgacgtcgacgaggttcctgcacatcaccgtcaagatcaacctcgtgctctggtgcgtctccgtggcgctcatgtgcgccgtgtcggcgctgtacgcgtgcaaggtcgccttctacttcgaggccgtccggcgggagtactaccacccggtgcgcgtcaacttcttcttcgcgccgtggatcgcctgcctcttcctcgccatcggcgtgccgccgatggtggcggcgagcctcccgcactggctgtggtacctgctcatggcgccgatcgtgtgcctggagctcaagatctacgggcagtggatctccggtggccagcggcggctgtcgagggtggcgaacccgtccaaccacctgtccatcgtcggcaacttcgtcggcgcgctgctcggcgctaccatgggcctccgcgagggccccatcttcttcttcgccgtcgggctcgcccactacatcgtgctgttcgtcacgctgtaccagcggctccccaccagcgagacgctcccgcgcgacctccaccccgtcttcttcctcttcgtcgccgcccccagcgtcgcctgcctcgcctgggccaggatcaccggcgagttcggctacggctcccgcgtcgcctacttcatcgccatgttcctctacgcctcgctggcggtgaggatcaacctgttcagggggttcaggttctcgctggcgtggtgggcgtacacgttcccgatgacgagcgcggcgatcgcgtcgatccggtactcgtcggaggtgaagaacgcgttcacgcagtcgctctgcatcgcgctgtccgtgctggcgacgctcacggtcacggcgctgttcctcaccacgctgctgcacgccgccgtccaccgcgacctcttccccaacgacatctccatcgccatcaccgagcgcaagctcaagcccatcgccgagatccacgagcagcggcagcagcagcgcgacaagaacgccaccaccgccgccgacatccaccccgactcagcctgcattaaggacctcgaagccggcgtgccgccgccgccgtcgtacgccggcgatcgatcgacgacgacgacgtcgacggacccgtgcccgctcggcgccgggcagttctgaccgtgcgatcgatcgatggttcttcagacagcgacgtggacgtgcatgtcagtgtaattaattagcttaattaatttgctgtagctactcgtatcgtatgcgtacgtggcgatgtagataggagattgagtcgttgacgacttgggataaggctaagctagcgccagtaataagtcc

SEQ ID NO: 19202 - DNA, 2047 bp, Oryza sativa
  ref <308>: DATABASE ACCESSION NUMBER: AK069572
  ref <309>: DATABASE ENTRY DATE: 2001-12-06
tactacgatagtagtagtacactgcgagctctctccctcctccaatgcgacggcttcccggagattgcgagcttgtgaagtagtagccgccatgggtggacgcggcgcgctaccggtggtcgcgggggtcgtgcttgtcctcctggtggtcgcggcgcggggagcctccgccgctggaggtggaggtggtggtggggcggcggcggcggctgtcaacggggaccggctcagggcggagcagatccggaagcaggcgaaggacgcggcggcctccgccgccgcgctggccgcggcgtcgagcaggctccacctcgaccgcgcgcgccacctccggctgctctcctccctccaccgcaacctcaccgccacgctccgtgacctcagcgccgccgcgtcggcgtcggcgtccgcgtccgcgtccgaggccggctacgcgtcggcgggggacgaggtgcggcggctcgaccttcaggccaaggacctgatccgcgccgcgcgcgccgccatcgcggacgccaagccgctgttcgacccgcagctcaagatccagcggctcaaggacgccatcttcgcgcagaacgagttgctcgcgcgcgccaagaagcgcggcgccttcgcctccctcatcgccgccaagtccatccccaagccgctccactgcctcgccgtccgcctcaccgccgagcggatcgcacggcccgagaattacgccgacccggtgccgccgccgcacgcgctcgaggaccccgccatgttccactacgccatcttctccgacaacgtcctcgccgcctccgtcgtcgtgcgctccgccgtcgcgaactcgctcgacccctccaagcacgtcttccacgtcgtcaccgaccgaatgaaccttggcgccatgcaggtgataattcgcctaatggacttaaaaggcgcgcactatgaggtcaaagcatttgaagactacaagtttcttaactcctcatatgttcctgtgcttcggcaactggagtcagcaaacctccagaagttctattttgagaacaagcttgagaatgctacaaaagatgctagtaatatgaagtttaggaaccccaagtatctctcgatgctcaatcacttgcggttctatttgccggagatgtacccaaagctgcaccggatacttttcttggatgatgatgttgtggtacagcgggatcttacaggattgtggaagattgacatggatgggaaggtgaatggagcagtggaaacatgctttggatcgtttcatcggtattggcagtatatgaacttctcgcacccacttatcaaagagaagtttaatcctaatgcatgtggatgggcatatggcatgaacttctttgatcttgattcttggaggagagaaaagagtactgagcaatatcattactggcagagtcagaatgagaacaggacattatggaagctaggaacgttgcctcctggtttgatcacattctactccaccacaaagcctctggaaaaatcttggcatgttcttggactcgggtacaatccaagcataagcatggaggagattagaaacgctgctgttgtgcatttcaacgggaacatgaagccctggctggatatcggtatgaaccagttcaggcacctatggacaaaatacgtggattacgacgactcattcattcgccaatgcaattttgcaccaccgtagaaggaaaagcctttgccattgttctacagatatcaaggaagattggtaactagagctagagccactgtaacagttaacacatgtactatcgcatgttttgtggaaatctcaggagcctgcgaattagaactgcggaggacaagaaattctttctagatcttgttgtatgtcatcgattaagttatggtgaaaatgctgttcaaaacatgaacattattttcatcccgtttgtaataatcttatgcgtgtcagcgtgtgtatgccaaagtcatgtgctatgttcataatatgaagacaatcttactaggacaaattatcagaagatcaatgaactcctgtagagaaatattgtgc

SEQ ID NO: 19203 - DNA, 2620 bp, Oryza sativa
  ref <308>: DATABASE ACCESSION NUMBER: AK069573
  ref <309>: DATABASE ENTRY DATE: 2001-12-06
cttatattctgaaaattctcgcttgcgggggttggaccctggagcctggagtcgaagagcttgccgccggtagaatccatggtgcggattcgcgccagcgtggaccggccaggtccgtggccgcgcagatcgagcttgcatgggctggctagctccctggtaggtccctgtcctcctctcctcgctctgctctctcttcctccatcccggcatggattgggcgcaggtgacgcggatcaacgcagccgctcccggccagcatcaacctcacttgaaagaagcagagcgattttccaccttggctggatcagatactatttgtcttcgattctgtgagtttatatttgattttctgtcttttcttcaactcgattttgttaaagtatatctctgtgtaatccgtgtgctttggattaggatggccggtggattaagctatagattagcttaggttgttgtgatcacatgtaataaggatccggccgttctatccatagcgcatgcctatttgtatcttctccatcgccgttttgtgcgataggttaacacgcatcgtcgacccgagtgcaaaggacgacgttcccatccatcctgttttcccacatggtatcagagcgctgaagttagatcccatctaccatggctagctcctcctcttccacctccacaaattccttgttctgcttcaatgtttctgagaagttgagcaagcaaaattatcagctgtggtgcgcacaagtgctgactgcgattcgtggggcacgcctcaaggggcatctgaaaggcaagaccgtcactcccgccgcccacatcgaagcagaaaagaaagaagatgacaagacgaagatcaagatcatgatcgacaacccagcgtacgaaagagtggtttgccgcggatcaacaggttctcggcttcctcttttcatcgctgtcacggaatatattatcccaggttgccacggcgaccacagcgacagatgcctggaagatgatccaggagatgttcaactccagggcgactcgcgcgcgctccctcaacgtgctgctatctctcaccagcactaggaagggaacccagaccatctcagagtacttcgccaagatgaaggccttagcagatgaactagcgatgtcagggaagcaagtcgatgccgaagaactcactgcttttatcttaaatggtttagatgatgattatgattctgttgtatcggctttagcggccaaaactaaacctattactctatcagaaacatatgcccagctattgaactttgagaacaggcttaatctacgacgagaaggcaacatgacggccaatgtagccgggcgcggccgtggcaacgctccgagcaaccggggtggtgccggccgtggacgtggtggtcgcggcggcttcaatggtgctggcacaaacgccggctgtggaggacgtggcgctggacagcagcagcgctccggcaacgacacacgacccgtgtgtctggtgtgctacaagcggggacatgttgcagcagattgctggcataggtatgatgattcttatgtgccagatgagcgacaccttgctgcagcagcctcctacgcctattttttttagataagtcaccggaggggagaggttccccacctgaattgcattaaataaatagagtaagggttacaactgagtttacatgacatgaagagattgcaagggggaggagaagatccctttccaaattgaaactacaactctatcaggaggcttaagacgttcagaccagagagaacattcgtccacacatttcctaattgctgccggaactgaagcatccaggttgcggaaaacaacgtcgtgtctgtggttccatagtgcccataagcagagaagatagaagacatggtggtgcagctcgggcaggtttccattggggcgcagacgtccgagttgacgaacatcctgaataagcgggtcaatgccgatcgtcgtccagaattgctgggcaaaggggcaaaggaagcagatgtgacttgcaatttcagatgcagctccacaaatggagtcgactccaatcggtacatggtctcaggcgccacggaccacatcaccggtgaactggacaagctcacggttagcgacaagtacaaggcgaacgatcaagtgcacactgccaatggagcaggctacgagggcaacaatgcttgagggacggcgatacaagggactctacccgcttcctccttcatctcctgcatcctctccaaaggctgtttacggtgtggcgccatcttttgcaagatggcatagtcggctaggtcatccttcaagtcctatagcgtctgaagttattagcacaaataatctaccttgtcatgacaaggctagtaaagagtctgtgtgtgatgtgtgtcagatggccaagagtcatcaacttccttacaatagatctactagtgtttctcaatttcctttggaactcatttcctcagatgtctacggacctgctcctatttctgttggtagacataaatattatgtgagttttgtggatgattatagtaagtttacctgggtttaccttcttaaagcaaaatcagattttttcaggtcttccatgaattccaagctcttgttcag

SEQ ID NO: 19204 - DNA, 3174 bp, Oryza sativa
  ref <308>: DATABASE ACCESSION NUMBER: AK069574
  ref <309>: DATABASE ENTRY DATE: 2001-12-06
ccaggggagcacctccattgggcatgtggaggtgtggcccaagggcgggacggacctggcggtggcggcgtgggcgcgggagatccgggtggaccacctgtcgccgcccagcgagcggtgcccgccgctcgccgtgctgcacgccgttgccgcgggcggtcgctgcctcgtgatggagtccaggcccacggccaccgcggatgagcccccgccgccgctcgtcgccatgcacgccgcttgcctcagggacggaaagactgctgtttttcctctaggaacagaagagatccatttagtggcaatgacttccaagagaaacttgccgaatcttgcttgtttttggggctataaggtgccatcgggcttgtataattcttgcttgagcatgttgaatcttcgttgccttggtattgtgtttgaccttgatgaaacattgcttgtcgccaataccacacggtcctttgaagacagaattgatgcacttcagagaaagttgagtaacgagattgatcctcaacatattagtggtatgtcggcagagatcaagaggtaccaagaagacaagtctatcctaaagcagtatatagaaaatgatcaggttattgatggtggcaaggtttataaagtacagactgaggttatcccacctttacctgataatcatcagcctatgacacgtccaatcataagattacaagagaaaaatattatcctgacgcgtataaatccattgataagagataccagtgttctggtacggttgaggcctgcatgggaggatcttcggagctacttaattgcaagaggtcgcaaacgttttgaggtatatgtgtgcacaatggctgagagggactatgctttggaaatgtggaggttgctcgatccagattcaagattgataaactctgttcaacttactgacagacttgtctgtgttaaatctggctctcgaaagtctctgctgaatgtattccatgatgggtcttgccacccagaaatggccctagtgattgatgatcgcttgaaagtttgggatgagaaagaccagtgtagggttcacgttgttcctgccttttctccatattactctccccaggcagaggcaaacttctctgttccagttctctgctttgctagaaatgttgcatgcaatgtcaggggtggttttttcaaagaatttgatgaggtccttctgccacggataagcgagattcactacgaggacgaaataaatgattttccgtccgctcctgatgttggcaattatttgattaccgaggacgagaatgctgccattttgaatgtaaacaaagatcctcttgcttttgatggtatggcagatgcagaagttgagaggagattgaaggaagtgtcttgcagtgttcaagctgtgaatccaataccaactaatgctgatgtgatgcctgtggcccctaaccagcaacttattacatcatctgttccagaagcaccatcattgggcatgattcctttgaataatgatcaaggtcctcagcctccttcaagctggccggttgctcaatctgctcctgtggatccatcgcaaagttctccagctagagaagagggtgaggttcctgaatctgagttggatccggacacaaggagaaggcttctcatattacagcatggtcaagacacgagagatcctgcaccaccctgtcctgcaggatcacccgtacagacctcagtattgccagtgcaatctcatgggaattggtcacatgtagaggatgagatgaatccaagaagcctaaataggacctcaacagggttccatttagaatctgatgatataaattatgataaaaagcaaccacataatccaccgtattttcctgatgaggataatcttataacttctgatagatataaccgtcggatccatagatacccctcacagctgcctcacagtgaggatcatcatatgctgaatcgttcatctatagcctacagatcttttcctggagaggacatgggaaaccgatttggtccttcgaatcatagaagcagtaaaatagaaccaggacaccagtttgtacaaaacgcagagacctcagctggtgtgttggaggaaattgcagtggaatgtgggtttaaggtggagtaccaatcaactttgtgtagtactgcagagttgcaattctccattgaggttaggattttaggagaaaaggtaggtgaaggaattggaaaaacaagaaaagcagcaaaacgccaagctgttaatatgtccttaagaaatctggcagaaaaatttctaacgtctgatccggataagatgatgattctgaaggagaatggttttagtagtaattcaaactcattcagatattcgggaggtagtagagatgacacatcaccagttgcaagcacttcaaacgagtctagatacatgggcgagagagttgatactttaagaaaacctgctggttctgttgctgctctcaaagagctttgtacggttgagggttacaacttagtttccaagagcagccatcacgtcctcgtggttcatcaggtaaagaagcttatgctcaggtcgaaataggtggtcaaatcctgggaaaaggagttggagcaacatgggaacaagctaagctgcaggctgctgatgaggctctaggaaatttgaaatccatgcttggtatctttgcacataaatcatctggatttcaaaggtcatcggtatcaaattttaatcgcttcaaaccagatttccagcggagtctacaaaccataccttctggttgggactctaggaacaatggtcgtgttctttgatgttcgtcttctggacatctgaacttgatgggatcaatagcatggaacctgttggcccagaagaacttcaaggactgcaagtatggacgagatggtcatggaaggagaaatcgctgtgcacatgatgcctgcatgtttcgttctgtcgttctcgatttggtgatagaattgtgttgctgtcatttccaatctagtaactcggtaactcccaacaggtgctctgtttgaagatgttgtaacctggcctccgagtgagctcacgccacacggtgctcggctgtgatttgccctgactctgttacccgtgataccccagtggagtgtggatattagaagcatgacagttggtaaaatggcttccttgcgtgc

SEQ ID NO: 19205 - DNA, 1149 bp, Oryza sativa
  ref <308>: DATABASE ACCESSION NUMBER: AK069575
  ref <309>: DATABASE ENTRY DATE: 2001-12-06
gggtgatctgtctcgccggggcatctcgaaaagcatccgactccgacgccgccgcgcgccaccacccggccgatcgccgacgccgcagccgctggaagcagcagggacgacggagaatcggagatggacatcgaggcgttcatccacggcggaagcgggggcggcgacgccgacgccgaccacccgctcggcatcttctccgccgccgacctctccggcttcggcttcgcggactcgagcaccatcacagggggcattcccaatcacatatggccccagtcccagaacctgaacgcacggcatcctgcggtctccacgacaattgagtcgcagtcatcaatctgtgcagcaagtcccacatcagctaccaatctgaacatgaaggagagccaaactctgggaggcacaagtggttcggattctgaaagtgaatcgctgttggatatagagggtggtccatgcgaacaaagcacgaacccgttggacgtgaagagagtgagaaggatggtgtccaatcgggagtctgctcggcgatcgaggaagagaaagcaagctcacttagctgatctcgagtcacaggttgaccagctccggggcgaaaacgcatcgcttttcaagcagttgacggatgccaaccagcaattcacaacttctgtcacggacaacagaatcctcaaatcagacgttgaggccctccgggtcaaggtgaagatggcggaggacatggtggcgcggggggcgctgtcgtgcgggctcggccacctgggcgggctgtcgccggcgctgaacccccggcaggcgtgccgcgtccccgacgtgctcgccggcctggactacgccggcgacgaccccttcacggccgggctgtcccagccggagcagttgcagatgcccggcggcgaggtggttgacgcctggggctgggacaaccaccccaacggcggcatgtccaagtgaaactactggtcctacttctatgtcagctcagctacgtttgaaacgtgatgtgtccaagtgaacggacttgagtttttcagagtcctcgtgtcgaagtgtcatgcactcttccctattcctgtaatagaactgactagctaagagactgaaagtctgaaactacgaagtataaatgtggtggaatttggaact

SEQ ID NO: 19206 - DNA, 1140 bp, Oryza sativa
  ref <308>: DATABASE ACCESSION NUMBER: AK069576
  ref <309>: DATABASE ENTRY DATE: 2001-12-06
gagggggcagatctgggggcaaatctggcaggcggagcggtggggctgcgggcgagggggagggcggggggctgggcggacggcgcggagggaggggaggagggggaggactgcagggggctcaggccctggcggcggaggctgctcgcgtccatggcgctctcctggccctcggccatccgcctcgccgtcgccaccgtgctcctcgccgcggtcggcgtcgcgcttttcacgctccccgttgacaagattttgaaggactttctggtttggatcaaggataacttgggtccatggggtcctctggtattggctcttgcttacgtccctttgacggtattggctgttccagcatccatacttacacttggaggaggttatctgtttggcctgcctgttgggtttgttgctgattccattggagcaacaattggtgcaactgctgcatttttgcttggcagaacgataggaaggccatatgttctctccaaatgcaaagattatcccaagtttcaagcggtagctattgctatcgaaaggtctggcttcaagattgtgttgttattaaggcttgttcctttacttccgttcaacatgttgaactacctgttgtccgttactcctgttggcattggagagtacatgctggcttcttggctggggatgatgcctatcactcttgcattggtatatgttggaacaacactaaaggatctatcagatgtgactcatggctggagtgagatctcaacaactcgatggattctcataatatctggcttcatcttgtctgttgttttgattgtatgtgttacaagaattgcaaaatcttctttggagaaggcattggctgagaatggagatgcaggaattccacagcttcctgtggtggcctctccctcggatttgcaacaaccccttgtgatcagaattgacacgtcaaatgaagatcatgagaagtgaatctgttgtttacaactttacatgtacattctttggctgttcaatctgtatcactttacactgtagtttttgccagatccattttgccagtaaaagaaaagaaaaaggaaaggaaaaattgtattgttaggtaacactacataatttcttaatccacgagataacatccacgagtcc

SEQ ID NO: 19207 - DNA, 1921 bp, Oryza sativa
  ref <308>: DATABASE ACCESSION NUMBER: AK069577
  ref <309>: DATABASE ENTRY DATE: 2001-12-06
ggtacacacactccacctaatcttcttctcctcacacattcacacacacacaccccgcagaccccggcaccttaccgagcggcggctcagcacgctgctgctacgcacatggacaagagccagggagtcctactgtccagcaacgtcggggccggctcccggccgtggccggagctgctcggctccgcccactgggacggcctcctcgacccgctcgacctcacgctgcgccgcctcatcctgctctgcggcgacctctgccaggtcacctacgactccttcaactccgactcccactccaagtactgcggcacctgccgcttctccaggtccacgctcctcgaccgcacgcagttcccggccgccggcgacctctccgtcgccgcctacctctacgccacctccgacgccacggcgttcccggggagcatggtgtactcgatgtcgcgcgaggcgtggagcaaggagtccaactggatcggctacgtcgccgtgtccaacgacgccgcagcggccgcctcgggccagcgcgtcatctacgtcgcgtggcgcggcaccatccggtcgctggagtgggtcgacgtgctcaagccggacctggtcgaccacgacgacatcctccccgaggggcacccggggcgcggccggtcgcgcgtcatgaaggggtggtacctcatctacagctccaccgacgagcgctcccctttctccaagtacagcgcccgcgaccagatgctcgccgccgtgcgcgagctggtggcgaggtacaggaacgagagcctcggcgtcgtctgcacggggcacagcctcggcgcgtcgctcgccacgctctgcgcgttcgatatcgtcgtcaacggcgtgtccaaggtcggcgacggcgcgcacatcccggtgaccgccgtggtgttcgggagcccgcagatcgggaacccggagttcaagaagcagttcgaggagcagcccaacctgcgggcgctgcacgtcaggaacatgcccgacctcatcccgctctacccgagcggcctcctcggctacgccaacgtcggcaaaaccctccaggtcgactccaagaagtcgccctacgtgaagcgagacaccagcccaggcgactaccacaacctgcaggggatcctacacacggtggccggctggaacgggaaggacggcgagttcaagctccaggtgaagcgcagcgtcgcgctggtgaacaagtcgagcggcttcctcaaggacagcaaccttgtgccggagtcatggtgggtggagaggaacaaaggcatggtgctcggccagaacggggaatggcagctcgaggggcccgcagaggagaacctgcccgtgccaccggtggtgaccgggaagatcatcgacgacgacgtcgctgccgtggccacctccagcagtgccaaggaggataagaagacgggcaaagggtctaagcttctgtctggattgattgatcaactgctttgtgtgcctgatacatgtaaagccggagctgcgtgagttgttgaagaccacatcagaaaaagactcgagagcggtggcgtcgaactgatatgcttgtgaagtagctggagcttgggagttgggagcgagctagattacaacaatgtcatttatcggtttttctttggaataaaatgagttgttttgttaggagaaagtagtatttttcctttctgcttttagtgtctcttgagaaagaataaaatgagtcctggcatcataagtaggtgggttagtcgactaggttcgagcctcaccacatctcaataaatatcgatatgtgacccctcctttcatatccagtatcttttaagtgtgccttgtctcctagatataatttctgtttaaaacagccttctacctgaacatgtatgatagaagcataaactgagcacaccaatttttcccttcc

SEQ ID NO: 19208 - DNA, 1112 bp, Oryza sativa
  ref <308>: DATABASE ACCESSION NUMBER: AK069578
  ref <309>: DATABASE ENTRY DATE: 2001-12-06
gggaattctttcttctcgtctccatcgctgcaggaggaggaggcggcggaggacggcgagcggtcagtggcggagaggggagtgttcggggacgcggggtttgcgaggtggggggagctcttgcgcctcggatcggctcacttcccgacgcctcagcccccgccgcgccgcggattattgctgttaggttaaagggattgtggtagcgagaagcggtggggttgatggagtgcgtggtgcaggggatcatcgagacccagcatgttgatgctcttgaggttcttctccagggcctctctggtgtcccaaaagaacgtgtcagagtgcatgagctctgtcttaaaagtgggccaaatctaggagttgtcccatcagaggttcgtttattgtgtgacttagctcagtccacgccatcctggaccataagacatgttggaggtgccatgagaggtgctggtgcagagcaaatctcagtccttgtgcggtcaattgtagagagcaaagccagcaacaatgtattgcgttacttctacggtatagggtacaagttagatcatgaagttctgaagggaggatttgcatttcgtttccaccgaggtgcccagataactgtgaccgttacctctgttagcaagatgacaaaactccatgctaccaacgaagctgtgccaatcactcctgcaatacagctagtggaaatcacggcccctgctgctgctgacaattacaacgatgtcgtttcagccgtcacttcgttctgtgaatatctagcaccgcttctgcatctctctaaaccaggcaattcgactggaatcgtcccgactgcaggcgctgctgccgcctcactcatgtcaagtggtggtggtggtggtggtaaaacgttgtgatcggtcatatgtgttggctgcaatgccatgatgatctccattgaccatcccacttaaaacattgttgccatctttagttctgtaacttttagtcagtagcaccatggtttttcttgtaatgacatgctaaatgctgcctaccttgctttggagactggtaaatgaacactgatcattgcttgcttttactgaagagtggaaactgaatgctgggaaagcttgacg

SEQ ID NO: 19209 - DNA, 2042 bp, Oryza sativa
  ref <308>: DATABASE ACCESSION NUMBER: AK069579
  ref <309>: DATABASE ENTRY DATE: 2001-12-06
gggtttcgacgagctccatcatccaagtacgaaggggataaagggactcatcactccacccagctggagagaaaaaaaatctcagctaggcaagatcgttccagattgaattcgttcggtggagggcgatatattttttttcggcaaggatcgccattctcaccggtcgttcaaattcttctcctgcgttaagtggctgtgtgtgctctgttcgtcatcttcctctgctactcaattgcattggttggttggttagacatgaatccattgcgcgtcatcgtgaaagaggaggagctcgacttcgccgccgcggcggcggcggcggcggcgggtgagggctcgccgtcgtcgtgggcggtcggcgtgatggacctgcctcgtccaatggagggcctcggcgaggccgggccgccgccgttcttgtgcaagacgtacgaggtcgtggacgaccccggcacggacaccgtcatctcgtgggggttcgccggcaacagcttcgtcgtctgggacgccaatgcgttcgccgccgtgctcctcccgcgctacttcaagcacagcaacttctccagcttcgtccgccagctcaacacctacgtaagtccatcaatggcggaatgcgatgcgcggttcgtgttttggcgtgatcaatggcggggttcttgattttcttttcaggggttcaggaaggtcgatccggatagatgggagttcgcgaacgaggggttcttgcgggggaagaaggagctcctgaagacgatcaagcgacgccggccgccgccgtcgagccccccgtcgtcttcgtcgtcgtcgtcgtcgtcgcagcaccagcagcagccggcggcggcgtgcctggaggtggggcagttcgggcgcgacggcgtggtgaaccggctgcagcgcgacaagagcgtcctgatcgcggaggtggtgaagctgcggcaggagcagcagacgacgcgcgcgcagatgcaggcgatggaggagcgcatctcggcggcggagcagaagcagcagcagatgacggtgttcctggcgcgcgccatgaagaacccgggcttcctccagatgctcgtcgaccggcaggccggccagcacggcgcccggaacagggtgctcgaggacgccctctccaagaagcgccgccgccccatcgagtacctcctcacccgcaacggcgagacctgcgccgccggcgagtcggcagctatgctggcggcggacggcgtggcggagccggacggcgacaccaccccgcgcggcgacggcggcggcggcggcggcggcgacaccgagagcttctggatgcagctgctcagcctcggcctggaggagaagcagcgagaggacggcgtcgccggcggcgtccaggagagtaacagcggcggcgctgacgtggacaacgacgaggaggatgacgacgatgacgtggacgtgctcgtgcagagcatatatcacctcagccccaagtgaaaggtcgagaaggttccacggcgaaaacgaagggtacgtttcgtttcgtagggtgacgtaatcgcaacagtagcgagtagtaggaatgtaggggtagcactgcacttgtctttctttccatttttttatagtttcggacatcttgtcgccgccctgcaagttgccaaaaaaagcagccaagccccactgccacaggcgacggaaggttcaagaagtcgagaagcttctcccgcgggggaagcttctagaggtgtccagtaagacagcacagtagctgcgggtgttcaagaagctgggaagcttctagatgtcctctaggacggtggcttcgaatgttcttcttctggaatttgcacctagtatcagctaattatgtgcgctgtattttgcccatgctactgccatatgcaactggtgcctcttatcccccaacagctactgctgcccttttaaaatttgaaagttacggagtaatttcagctgatttttaagtttcttcattagtagtttactttctgtattggttgtcaaatcttaaataaagttctacttataaatatcttggctatact

SEQ ID NO: 19210 - DNA, 1504 bp, Oryza sativa
  ref <308>: DATABASE ACCESSION NUMBER: AK069580
  ref <309>: DATABASE ENTRY DATE: 2001-12-06
gagattttcagacaccaccctaccccaatcatgtctccaaggatcccgacgagggcgaacctcgccctcgccgccctcctcatcctcctcaccatcgccgccaccaccctcgcatcggcgaagtgcatcgcgaagaacaaacccgaaggcgaggagggggaacccagtggtgcgggcgcggctgcggcccacgcttcaccggagaagaaacccggctccaacggcgggttaaccaccatgtccgtcggtgagagcgtaccggagatcaagaaggactcctccgatgatggcgccgccgtgaatgagagcaagaaacctaaatccagtggcggcttgactaccctctccgtcgatgatagtcaagcagaacccgcggacagtatagcagaacccgtggaagatggcaccgacgacggcgaggatgagtcggagaaaaagaagaagaagaagaagaagaaatccaaaagcaagagctccgatgatgatgatgatgatgccgagaagaaatccaagaagaaatcgaagaactcggacgacgatgaagatgacaagaagaaatccaagaagaaacccaagaacccggacgacgatgaagatgacaagaagaaatcgaaaaagaagagctccgatgaagacaacgacggtgccaagaagaagaagaagaagaaatccaagggcaagagctccgatgaggaagatgatgaaaagcccaagaagaaatccaaaagcaagagcaaatcctcctcctccgacgaagaagatgagaagaaatcaaaatccgagggccaagccgcggccaaaccaaaggaagaagacgaggaaggcggctcggcatcggcatcggcatcgacatcggcgccgaagaatgagcaccactcgggcaccatgtcgctcccggacccggacatgatcgcgcagccggtgatgcaggcgctgaacccagtggtgaaggcgctgtgcggcaagacggaccacgccgacctgtgcgagtcctccatcgggcagctgccgcagcagccgccggcgcagctggacgacatcggcgtcctcaggctctccatgaacgcgctgcgcgccaaggtgcaggaggcgatcagcgtggcgacgaacaggatgggggcggcctccggggacgaggtgtccaaggacgccatgggcgactgcctccagatgtacgacgacatgaaatccaacctggactcggcggacgcggcgctcaagaagggggacaaggacacggcgcacaccatgctcgactccgcgcgcaccgacgtcgacacctgcgaggacggcttcagcgagcgggaggggctcaagccgatcatgggcgacctcgacaagatcctcgccgagctctccagcaacaccatcgccattgcctccgccataattgagtgactcatctcattttctctctgtctttctccctctgaccgtcttgaacaaacaactgaagtgtatgtagtatgtaccgagtgtttcaaaagctgaaactgcattatgt

SEQ ID NO: 19211 - DNA, 2213 bp, Oryza sativa
  ref <308>: DATABASE ACCESSION NUMBER: AK069581
  ref <309>: DATABASE ENTRY DATE: 2001-12-06
gaccatccccatctcccaccttctctccttccccccaactcgcctcctccgccgccgccgccgccaccggcggcgacttcccatatctccggaggcctacccttcccaccgccgcatcctcgatctgcgtgctgccaccgcgacgaacccctgtagcggtcgcctcctactcggtagaaccctagatccccccgataccccgcgcccctctccgccgccgccgccgtcccggctgacggtatgaaagtgaccgacgatctccagtaagatcccggagattaggagtccagcttcgcgatggcgatccgcatcaccatgtcgtactccggctatgtggcgcagagcctggcctcgtcttttggcctgcgctgcaccgccgccgccgccgcctcctccggtgcggcgccgggggctggggctcgcttcctccaggacgcgctctcccgccccttctgcctcttcgcttcctcccgccactccgagtaccaccatgacgccgacgatcacaaccatccgaagcccaagcccaagcccaaggcaaaggctctccccgccgcctccgccatcgccgccaatggagggggccattcgctgctcctctcgcggtcgtgcgcaacgaaggctccggtgaatgacccgccatcatcgctggccatcgggttgctgatggtgttcacctccgggatgggctccgctactggccgcgtgggcgcctcatcgctctcggcgtcgccgtcaatatcgtcagcgttcaaccccgcggcgctcctcccattcctgcaggcgaccaagtggctcccttgcagtgacctcgtcacctccgcggcgccatcccgcaaatcggctcgcccagttgatgtagctaaagcgcccactgctgcgcctgctgctacgcctgtgtcacgaactaagcctgcacctgcgccttcgccccgtcctgcacatgtgccctcgcctgcggtggctgccccttctaaggtgggcgtgaaagcattggttggtagtggtgtaatcaactccggcgtaatcaactccagtggtgcctcttctaatgtgggcgtgggcgtgaaaccattggttggtagtggcgcaattaactccggtgctgctggaatggtgagaaagagcagtcctgcacttggtgctgctgcagaggtgagcaggaggaactggctatcaaggtgggtgagctcctgttcggatgatgccaagactgtctttgccgctgtgactgtgccactgttatatagatcatccttagctgagccaaggtccatcccatccaagtctatgtatccgacattcgatgttggtgaccgaatccttgccgacaaggtttcatacgttttccgggagcctaatattttggacattgtgatcttccgtgcccccccagttctgcaggccttggggtgcagttcaggagatgtattcatcaagagaattgtggccaagggtggggataccgttgaagtacgtgatggtaaattattggttaatggagtagtccaggatgaggaatttgtgctggagccactcaactatgaaatggatcaagtgactgttcctcaaggttacgtgtttgtgctgggggacaacagaaacaacagcttcgattcacataattggggacctctccctgtgaagaacattcttggcagatctgtgcttcgatactggcctccatcgaaaataacatacggtctttgagcatgatgcagttcactgcacagcaggcatctcctgagaaatatttattgtggcagaccagaaaccaatccattcttttggccgagcttcaatgtgagctgagccacatttcctcttaatttttgttatgctggacgtcgccttgcctcaaataccctttggcagatgggctgactatcagtttttttgcctgccctggtggcagatgcttggttaaaaggcagcaattcctgtactcagtaatgtaagaaggcacctccttcatatttataaaacgcggataaatgaacatccatagttgtaggcttagctccggatgatctgtttcagacacaaggagagtgggcgtcagatgatgttcaaatcttagtgtaaaagaaatagaaagcatgatgcattgttcctcgtcaagccttgtcaatttatgcggtgttgattgaaagtgaattgatgtattattcctgtgtggtttgtaccggtatgatggtaaattttgctcttgt

SEQ ID NO: 19212 - DNA, 1392 bp, Oryza sativa
  ref <308>: DATABASE ACCESSION NUMBER: AK069582
  ref <309>: DATABASE ENTRY DATE: 2001-12-06
ggcctgaagtactggagagaaaaattaattaagcagcttcttccattcagacataggtcgatccatcgcgattcttccatggacgtcgacgagctgttgttgatagcaatcagccatggaaacaacgaagacggtagcgacggggttgtcgggatatcggacgaggtgtacgccgcggagctccagctccaagagttgatcatgtcgtccgccatggcggccaccgctgcggcggcggcagatcagcttgacagcggtagcgccgtccacgcgtcgagcgaggacgcagcagctgcagctcatgcgaagacgtctccatcctccgctctcgtccccgccgccgagtgctcgtcctcctcggcagcggccatgacccttgtcgccagcgtcgtcaagtgctcctgctcctcgtcagctatggcaccgtcggccaccaccacgtcgttcctcttctgcaagatctgcatggacgacgtgccggcgtccgacgcgcaccgcggcagccacggctgcgcgcacgccttctgcgccgcctgcctcgccggccacatcgccgctaagctccactccggcggcggcgtctactgccccgaggatggctgcgccagcgcggtcgacccggagctctgccaacccatcctcccagaggacaacttcgagcggtggtgcgccgcgctgtgccgggccatggtgctcggaggccgccacgtgtactgcccgttcacggactgcgcagagatcatcgccgacgagcggggcggcgacagcgacggccagccgacggagtgcccggcgtgccggaggcggttctgcgagcggtgcggcgtggcgtggcacggaggcgtgagctgcggcgagtacggggagctggcggtgggggacaggggggagggggacctggcggtggtggagatggccaaggggagcaggtggcggcggtgcccgcggtgcgagttcttcgtggacaggtacgaaggctgctcgcacatcacctgcaggtgcgggctggagttctgctacgggtgtggccaggaatgggggcctactggtcattcctcgtgtcagcgaccttgaaacacctggatggtcgggattcggatgctggacatgccccgtcagtcaaactattataactagtgttatgttatcacctgttaatctgctatctatccgaatttaattcatcttaggtttagatctcggtgccagctctttacacctaaatttggtatctagtaattatagtcgttgagatagataaaaaacaagtgtgcagtccaactattttttactattgctagtattgttagctgttttctatccaatttaattggtggtttaagtcatgtattatttttttttgagaatttatgtcatgtactcatatcttag

SEQ ID NO: 19213 - DNA, 2057 bp, Oryza sativa
  ref <308>: DATABASE ACCESSION NUMBER: AK069583
  ref <309>: DATABASE ENTRY DATE: 2001-12-06
gactccactccaccagaccggccaccacttgcccactccctcgctactactagtactagtcctacactatacgctcccggatggcggacgccgctggcatcgccaccgtcctcgccgccgacggcagggacttcctcctccgcaactccgccgaccaggtgaagatcagcagcatcgaggcaagcaccgttgccctctacttctcggcctcatggtgcccaccatgcaggcgcttcacgcctaagcttattgaagcatacaatgagctggtctcccagggaaagaacttcgaggttgtctttgtttcaggggataaggatcaagaggcattcgatgcatactttgcaaagatgccatggttggcagtccctttctcggactccgaatgccgtgccaaactcaataagcgctttaaggtgagaggcattccacacctcgtcatccttaatgcaacatctggtgaagtttatacggaagatggagttgagcttgtgactgtgcatggtacagaagcttacccttttacaacagagaggatcaatgaattgaaggaacaggaaaaggcagctaaggataatcaaactgttcaaagtgtgcttggtacacccacccgcgactacttactttcgaacaagggagatagggtacccatctctgaccttgagggcaagtacgttggtttgtgctttgtggtgaatggctatggcccagtagtccaatttacctcattgcttgctaaattttatgagaaactcaaagaagtaggggagaaatttgaagttgtagctgtatccttggacagtgatgaggaattatccaatgagagttttgcaggcatgccttggcttgccatccctcaggaagacaagatgggtgagaagctggctcgttattttgagcttagaggcctgcctacacttgtcctgattggtcctgatgggaagacactgaacaacaatgttgctgacataattgatgagcatggtcaagatgcatgggaagggtttcctttcactgcagagaagatggaaattcttgctgagaaggcaaaggctaaagcagagttacagaccttggagtcccttctggtcattggtgatttggactttgtgcttggaaaagatggagcaaaggttcctgtatcagaacttgttgggaagactgtcctcctctacttctcagctaaatggtgcggaccatgccgagccttcctgcctaaacttgtcgacgagtacaacaagatcaaggagaagcacaacgacttcgagatcatcttcatctccagcgatcgagaccagagctcctacgacgagttcttctccggcatgccatggctcgctcttcccctgggtgacgagaggaagcagcacctgagcaagaccttcagagtccgcgggatcccttcgctcgtcgccatcggcgccgacgggaggacggtggccagggacgccaagaccccgctgacggcccacggcgccgacgcgttcccgttcacggaggagaggctcctggagatggagaggaagatcgacgagatggcgaaggggtggcccgggaagctgaagcacgagctgcacgatgagcatgagctcgtgctgactcgctgcaccacgtatggctgtgatggatgcgacgagatgggcagctcgtggtcgtacaggtgcagggagtgtgacttcgacctgcaccccaagtgcgcgctggggaaggaggaggagaagaagggcgatgacgaggctgaggctgaggctgacccagcatgcgagggaggcgtttgcaggaaggcctaaaagagacttgttcttccactggttatctactgctgatttaagcgtgcctggatgtttggatgtgaaattagagaattatgtagtgagtaataaatatggttttgtttacaaagtagtggtattggggttgctggtacattggtatttgtgttgatgaacattagttgagaccagagctttggattattcattattatgtgcaaaccaaaaccatatgtaagtatgagtccggattggtaattgggtatcttgaatcatgttgtgagt

SEQ ID NO: 19214 - DNA, 2431 bp, Oryza sativa
  ref <308>: DATABASE ACCESSION NUMBER: AK069584
  ref <309>: DATABASE ENTRY DATE: 2001-12-06
gattgaatcgggcacgtctcctactttcctcgcgcggcggcggagctcacatggattcggcttcctccactgctgcaaagcgcggcggcgccctcaccctaacggcctcacccagtcggaaggatggagaccccccggcatgacgacgagtcccacggaggggccgcggtgacggcgctgctgcacgagatgctgctccgggctcgccgggatggggaggagccggagctgtcggacgagcagctgcgctccaacgaccagctccaggaagacgagatgctggcactagaggcaatttatggagacaatataagcattttaagtgcaaaggatggactacgttgtttccaggtccatgtgcactgcgaaattcctgatggcatcagtgtatccgcagagctatctcgggatgataatcgtgaccagaacagtcgattctttgacacattcagcgtccagcacttggctccaatttcattcacatgccttatgcctccatcatacccaagccatcatgctccgtactttactctcagttcacagtggttggacactgtgaaagtttcctccctttgcctcatgctggacacaatctggtcacaacaacttggactggaagtagtttatgggtgggtgcaatggctgcagagctctgcactttctcatcttggttttaatgatggtatagtcatacaacagcctgatagtatgatgggtcctgtggatgttcgtgttgttgcagagattgtgtccgtagaatctgctgttcaatggttaatcagctacaatgaggagcaatgccatgaatcttttctaattggccttcatgactgcatgatttgtttcacggagcgtgcaggtaattggtatgcttcagttcatacctgtgttgtgaagataatacttttcccagtgtttacctcctattgtttcataatttcatcactaccagaactgaaattttcaaaacattattccattacaagcttctttaccgagtttgttatcacaaaaagaaaaatgatttgtagtcagtgctctgacaggtaattatattcatgtcccattgttctaatgaataaccatagcagtcaaagttccatcatttatgttcagtctgggcactttaaaattgaatccatatgtctgttcattcccctcaggtattgacttcattaaacttccatgcgggcattacttttgtcagaggtgcatggaaacgtactcaaggatgcatgtcgcagaaggaacagtgctgaaattgctgtgtcctaatgacaagtgcggggacattattcctccaagtctactaaagaggatgctaggagacaaagattttgaacgatgggaaagattgacacttcagaagactctagactcaatgtcagacgtggcttactgtccaagatgtgtaacagcttgcctggaagacgaggagaacaacgcccagtgctccaagtgcttcttcagcttctgcacccgctgcagataccttcgtcatataggagagagatgcattagtccagaagaaaaacttctttccttacaggatcgcaataaggtgcgtcagttaagcaaaggaaactttgccaggagaattaacttggcgaatgagatatccagcatcaaggaagtgcttcgttcttctgttctgtgtccacattgtggtactgccatctcacgagtatcaggctgcgaccacatgttatgcagtaactgtaggcaaccgttctgctattcctgtggcaagccactgcatcgtggccattcaagtgcagaattgatcaggagaattcggcaggagaaacactgaaggtgaatccaagtagtttgatcacagagatgaagaaagaactggtaggggaacgatcaagacagcatccgtgctcgacttgtcgccaactaaatcccaagatgggaaataacaaccatatcttctgctgggcatgccaagttcattactgtgcgctgtgccgcatggtggtgcggaagagctcggagcattatggtccccgtggatgcaagcggcacagtgtcgacccctagatccctccggctcgagataagcaaaaatgtgactctcgttcagaacacatagacttgagaggtgatccgttggcggagcattgatcggtttcagctatggtttacttctttcatccggacaatgtatggtctgtcatgaattgttttgtcaaagcaaccgaactctcaacctcaaacgacatgttctctctataataatgttttccattgaaatgatttcgtttgtttgatgtgtcaagtgtgcgagtgtacctgtaacatagttgtagcagcaggatatagggggaaaaaggtgagtgaattacatatttacagtttgtgtcatcttctattatgaaagttttctccttttcgaattttttttatgaaagatttacttggaacc

SEQ ID NO: 19215 - DNA, 3249 bp, Oryza sativa
  ref <308>: DATABASE ACCESSION NUMBER: AK069585
  ref <309>: DATABASE ENTRY DATE: 2001-12-06
gattggaatatggaagagggattcgtggaatcaggatccttctcccgctcctcctccttcggtgggttcgaggaatggatggcgctggtgaggaaacgcaatgggagtgggacgccctcctcgtcgtctccgcagcagcccaggtctggtggatttgctgcccaatcttcagtcagttcagaaggactagaacttggtcacccttatagcgatgcgattgactatagcttatcataccaactaccaacaacaagcttatgggataggcttgggagggttactatgatggacatcgagtcaagtgacttcaactggagctctctctcttcactgcaccatacaaaacatactgatactagtacagaaccctacgaggatgacaccagcagaagttttgaggttacagtaaattctggaggagttgttttcattgcattattcaaaacatctgaatatgatgaccttccgtccaaggagactgcagcggtcattaaaatagcgccttcaaggatggccactcaatcagaacgctttggctatgaacttgcgaaatggcttggagtgaggactcctcagggcagagtgattcacaacttctcatctgaatggcatcaaatgaaggatgcagttgagaacgctcgggatgcagcgatatcttcttgtgatgaactcgaggaaatgatttgcactgagatgctagaggcgctcgaattgagccgatgcttattcctaatgaattatgtacatggctcccctctgctagagaacacaatgccatttgattcacatgattctgctgaaaaaactgctgaagctttaggaagggtcttgatactggaccttgtactgagaaatgaagacaggttgcgatgccgcccccttggttggcggggaaattacgcaaatttacttgttgccgacaggaatgcttatgcaaacctcgattcattagatgatgtttatgattctgcaatcattcgttacaagccagagatcatcagaagccctcagaatcggaagccgagaagagcagtttcaataagtggcagtattggctcagatacatctgatctcatgttgccggacaatcctagtcagcctgagatttccagctttcacatcatagccattgattcaggtgttccacgcagaccgcctgcttgcaaacgggcgaaagatcaagagagctatccaaagcttgtggaacttacactcaacaattgggattactcttctaaccttttgtttgaactgtcatttggaaaactcggtatcccaggacctgaagaatttgatgtgtcatctgatcttagttaccattctcctctgtccgaaagtgatatggtagctgcggtgaattccttccgaggaggttttcgtagtgctttgagggaccttcaacgattccacattttccttgtcacactttaccagaagctggatggtctattgaaaatctttttcaatcttatgtataaagtattaaatgaatatgacagggaagacgctggttcatctgattcactgtgttccacagagacacacatggattcacatgattctgaagttccaaagcatatgcgtaggccttcccgtactttatcccgtgacaattttgacctatcatctccttccagtcgagagaactttatgattaagaatttcaaaggaagcagtgatgcttcccgtggattgcggctgacaatgaaactacgggattttaataagtatgctaaggcagacggtgaattatgcaaagaaatagaacaatggaatgacatgctcaggacagaagttgtgaaattgtgtcaagacaacagttttaacacgggtttctttgaaggaatagataatagcattgcagttgatgcttatgaattgaaggttcgacttgagcacattcttgagaggatatcattgatttctgatgctgcaagcaccgagcgtccctctcagatcacggattatttgtatattggtggtgctctagctgctcggtcaacatatacacttaaacaccttggcataacccatgttttatgcttgtgcgcaaatgaaattgggcaagcagaatctcagcagcctgatcgtttcgactatcagaacttctcaattaacgatgatgaaaatgcagacatcagtgatgtcttccaagatgcttcagatttcattgattatgttcaacacctacatggcaaagtactcgtccattgttttgaaggaaaaagtcggagcgcaactgttgttcttgcttacctgatgctgagaaaaaaattcactcttctggaagcatggaacatgctaaagaaggtgcaccgacgagcgcacccgaacgacggcttcgccaaggtcttgttggatcttgacaagaaactgcatggtaaaatctccatggagtggcaccacaggaggcctgcaatgaaggtgtgccccatctgcggcaagaacgctgggctcagcagcagctcactgaagctccacctgcagaaggcgcaccggaagatatcgtcggggagcgtcgacaccgccatgagtctggagatccagaaggcggtggaggcgatcaaggctgggcgtggcggcggtgacagcccgacgcatagcgctgagaaggttacttcctgaactctttgtgatgctagggctggtgatgttcgctgagccacagcttgcatcacatcctgcatctcccagatcatgcggcaatgtgttacttcactttatgagcaaaactgtactacacctgaaattttgaccaaattatatatatataggggttgttcagattgtagcctaaataaaccttaccaaattttggcattggcaagttgacaatattaccaaaattttgacaagattccttatgtatttaccaaattttgacaacaaactaaatgtaggcacttttttggcaaccttgttaaaaattggtatggttgaaaatggcatcaatctaaacagcccctagaatacgatttgtgcagtgagatgccgaattagagatgattagcatgattccgaaagatttttcgcttttatctcaacttgttcacctgcacaagtttccttttgtggctgagtaaaagagcctgtcttaacttcagcgttgtctaattttggtccatggttctgagcaacgtggcctgtacaacaatagtgattcaggtctggcttggcgatgggcctgatgtaggcatgtagccacaacactggcagttcagtagcttaacatgttgggacagtttatgc

SEQ ID NO: 19216 - DNA, 1955 bp, Oryza sativa
  ref <308>: DATABASE ACCESSION NUMBER: AK069586
  ref <309>: DATABASE ENTRY DATE: 2001-12-06
gatcctctgctcatcgtagaaatcgcgatcgccatacttgaccttgcagagctctgtctctgtctctcgctctgattgaagtgttctgctgccatctctctcccgcttctgtctccgtgtgtgcatatatatatgctgtattggggacgttgcggcagcggttcttgggtacatggcctactcctcacggtcttgtgatcagtgcagtcacgagaggagatccggcttcatgaagtggctctgcgctttcctgaaggggacgaaggacggcgaggccaaccgacggcgccctcgggtgacggcaggagaagagaccacgctctgggaagaaccagttagaccaaagaaggaagaaccacctagacataacaatgaagaaatggaccatgcacttgcccttgctcttgcagacgatgccaaaaatacaaaagagagaaaccatgacaagggagaaaacgatgaagaactcgctagagcaatacaggacagtctgaacatgaatccttaccagccttacaatccttgtgcaccctctcagacccaggccaggtcgagaggatacagggtctgtgggggttgcaagcatgagatagggcatggccattacttgagctgcttgggaatgtactggcaccctcagtgcttccgctgttcttcctgtcgccaccctatccgtgagatggagttcaccttgctaggtacagatccataccacaagctgtgctacaaggagcttcatcacccaaagtgtgacgtctgccttcaatttatcccaacgaacaggactggtttgatagagtacagagcccatccattctggggacagaagtattgtcctttgcatgagcatgatagaacacctcgttgctgtagctgtgagaaaatggagccaaggaacacaaagtatatgtcattaggggatggacgcagcttgtgcatggaatgcctggattctgcaatcatggacaccggtgaatgtcaaccgctatacgattccatcagagactactacgaagggatgaacatgaaactagaccagcagatacccatgctcttggttgaacgtcaagcccttaatgaagctatggaaggagaaagcaaaggaccgcatcatatgcctgaaacacgaggcctttgtctgtcagaggagcagactgtgaccagtatacttaggaggcccagaattggtgcaaatcggttactagatatgaaaacccaaccgcaaaagctaactaggagatgcgaagtcactgcaattcttgtattgtttggcctccccaggctgctaacgggctccattcttgcccatgaattgatgcatgggtggttgcgcctcaaaggttaccggaacctaaaggcggagattgaggaaggtatatgccaggtcatgtcttacctgtggctggagtcagagatccttccatccacttcaagatatggacaggcttcaacatcttacgcttcatcttcgtcgtcctcctgtcgaccaccaccgtccaagaagggtgggatctctcacaccgagaagaagcttggagaattcttcctgcatcagatcgccaatgacacatcatcagcatacggcgatggtttcagagctgcctatgcagctgtgaacaagtatggccttcgccaatcactgaaccatatacggctaaccggaggctttcctgtgtaacacaagaaagcgctgtctatcagtctatgtccatactggatgcgggtatacagatatcatacacacatacatatggagatcatatgggttatggtaatggagtaagatttcggatttgggtgaccttgagttttcagagaggtcctatcagagtaaatcagttaaggaactgcatttgctcgaattaacaggagctgaggttgcaatctaataaggtgactaagaaacactaatgtaatgcacagtatggcccatgataatgcagtgaagtatttat

SEQ ID NO: 19217 - DNA, 2562 bp, Oryza sativa
  ref <308>: DATABASE ACCESSION NUMBER: AK069587
  ref <309>: DATABASE ENTRY DATE: 2001-12-06
ggccattcattctaccaaaccaaatcaaattctcgcttcttcttggacgccgggaacaccaaaccaacgaacaaacggcgaatccaagtttcgattcgattcggttcggttccaactccaatccgcggcgccggcggcaacaatggcggcgctccacgcactccagcgatctcagtggagaatgaggactgaggagtagtgatctcgaatcgtgcagagcagggctccgcctccagggcagaggcatgtctctcgcctgcgggctcccgctgctggaatgcgtctactgcctgggatgcgcgcggtgggcgtggaagcggtgcctccactccggcgaccgcgacagcgccacctggggcctcgcctccgccgatgacttcgcccccgtcccgcgcctctgccgcctcatcatggccaactacgaccaccacccctgccaccccctcgacgcccgctgcgtcgtccgccgccgcacctacgccgacacccgcggccgcgtcaccccctacctcctctacctcgaccaccccaactccgacatcgtcctcgccctccgcggcctcaacctcgccagggagaccgactacgccctcctcctcgacaaccgcctcggcaagcgccgcttccatggcggctacgtccacaacggcctcctccgcgccgccgcctgggttctcgacgccgagtgcgacctcctccgggacctcctcgccgaccaccccgactacaccctcaccttcactggccactccctcggcgccggcatcgccgccatgctcaccgtcgtcgtcctcctcaacctcgacaagctcggcaccaatctccacaggagccgcatcaggtgctacgccatggcgcctgccagatgtatgtcgctcaatctggctatcagatatgccgacgttatcaactctgttgtcctgcaagtgagcccagcgttgttcccccttttcaattcctgctatacttgcttattcctcctcaccattcctaccacatcacacttgatctgcattcttcatcttctgtctcaacaaaataattatagctccttattgacaggatgatttcttgcctcggacagccactcctttagaagacattttcaagtcaatcctatggtacatatatgcccatgcccaccaatcttttacaaaagtagcgttacacaattctacactggtcatacaaggcagcactatcacatatatgattccagtcacatttaattttccttttacagtaaataccatcactacctttctgcttgttaattccaattgtcgagatggcttccataggcagatcggtaacatatgtgctcatccattgtttcatttgctaactgatgtagttattacttaagctggcttgtgtggctaataattgcctgaaacttatgcgattgcacaatatttcttgttggatgtctatgtaagagctttgtagggacctaaagaagttgatgccgtttacttgtgattttcaaagttatagaaagtttctctgtttatacttcagtaatcacagctagtatctgacttgacccaagcaattagcagctaatagctgatatgtatagtatgacttgaggaaggaaatagaggatctgatggacagtgcaaatgcaccagtgagttagaaaagtggagatagaaaatgacatttagtttgggatggggtggttgatccgattttttctgtttctctgcttgtagcaatgctatgcagtaagttggatgtagcttcatttctccttccagcttattgggttcaaacaagtttaaacttggatcatctcctctttttgggcagcttgccctgcctgctgtgtatcagatgtttgagggacacttgcatacctgaagatgctatgttaaaagatccaaggaggctttatgcaccaggtcggatatatcacattgtagagagaaaaatgttcaggtgtggaagataccccccagtggtgaaaacagctgtgcctgtggatggtagatttgagcatatagttctttcctgcaatgccacaatggaccatgccattatttggatcgagagggaagcacaaaaggcgttggatttgatgcttgagaaggagaaggcaatggaggtgccatcggagcagaggatggagaggaacgagagcctgcagagggagcacgtagaggagcacaaggcagctctgcgcagggctgtgacgctctcggtgccggacgctcggtcgccgtcggcttacggcaccttcggcgagcagccggagagaagcgagagcttcccgccggtgtcagcgatggccaggcagcgtatgagctggaacgacctcatcgagcgggtcttcgacagggacgagtcaggccacattgtgctgcgcagctcaccttctccctagctgtgcctgtacattccattccatcctctttcttcttcctttccttaccctggtatgcaccttttcatcatctctttttatttttttatgtatatgcaacttcaacttctgctgttattttttcttccttattattcattcatggtatctaccgacgcattttttgctgtcct

SEQ ID NO: 19218 - DNA, 755 bp, Oryza sativa
  ref <308>: DATABASE ACCESSION NUMBER: AK069588
  ref <309>: DATABASE ENTRY DATE: 2001-12-06
gatccctcctccccttctccgtccaaactacccgcctccgctcccaatccggcgagatcaccaaacccctctcgccgcctccgccgccgccgccgcagcagcagcagtcactccgccggagcaccatgatgcacatgaccttctactgggggaaggacgtgacgatcctgtttgacggctggcggacggccacgtggaccgggtacctcctctccctcgtcgcgctcctcctcgcctccgccttctaccagtacctcgaggcgttccggatccgcgtcaagctcctcgcgggcgccaagccggcctccatcccgcccccggcgtcctccgacgccgcgcgggccccgctcctcctcccctcgtccgccgccggacgctggccggcgcggctggcgacggccgggctgttcggggtgaactccggcctgggctacctcctcatgctcgccgtcatgtcgttcaacggcggggtgttcgtcgccgtggtcgtcgggctcgcggcgggctacttggcgttccgcagcagcgacggcgaggacctcgtcgtggtcgacaacccctgcgcctgcgcctagggtttggctttgcggctgcccccaggtgtggctcctctgtttggtttcccgatcttgtatgacaagtagaaataaatctgtgtacaaattcaattgcgtgacagggggattccggtgtttctgtaatttggggggaaattgtagagtacaaaatgagaaagctgctacttttgtgtttcc

SEQ ID NO: 19219 - DNA, 2090 bp, Oryza sativa
  ref <308>: DATABASE ACCESSION NUMBER: AK069589
  ref <309>: DATABASE ENTRY DATE: 2001-12-06
gattctctctccttctctctctctctctctctagaacgcgcgcaagaacacgcgcgaggactccccccaaacccccacttaattgcgcgcgaatggagtaatactagtactagtataatcattaattggtgtttatgggaagtggtggtggtggtggtgatcttggtgtggcgcgagaggtgagagaggaggagagaggtggcggcggcggcgggatgaggaaggcgcgcgtgtgcgtccgcgcgccgcacggcgccggcgcgctgctcgtcgtcggcggcgcggtcgtaggcgccgccgtcttcgcgtggtgccgccgccgctgccgaagtgacggcggcgagggcgagggcgagcgcaaggagggcgccaagaaccacggcgagcatccagcaaaggaggagggtggtttggatggcggagttgtcgagggcgagcagggggacgcgcagaggcttcatcaaatttatcagaatctgagcagggacaacgtcgaggttggagtcaatggatcggatggcaaggcaacagatgaactttatcagattcagaaggatgatgaggtcgttccgaatggtgataagatcgttctgtctgaattggttactgaagctgtggagaaatatgatcacggttcaatcaaggactgtgcggagatcgccccggatggcatggttaatgaagctgttgagacatataatcacaattcagagagggactgcgctgagatcactgcacatgttatggacacagaaaatgtgacagaggatgatgataattcaggcaaaaatgatgccgagaatgagataattgtaaatgaaaatgaaggtgaagaaaattctgcggaaaacacttttagcctcagcagccctgacatcacccttgaggaacatgacaacaacaactgtgttgatcaagatactgcatcaacagagacaacaccaactacagagaaggtgatgcatcaagaacaagtctcagagcaggtgaagatggcagaaacagcagaagtgaaaccggcagaagaaacagaaaccacaccaatggttcaaacagaagtgaaactggaagaggaaacggagaccacaccagttgctgaaacaacagaagtgaagccggcagaagaaacagagacctcaacagtggctgaaactttacaggtgaaaccagccgaagaaacggataccacatccatggctgaaacagcagaactgaagctggcagaagaaacagagactgcatcaatggctgaaacagcagaagtgaaactcgcagaagaaacagagaccataccaatggcagaaacagcagaagtgaaactagcagaagaaaaagtcatgaagaaaaatgagtttgaacatgaggaagagaattctaaggaagaatatgttaaaccggtcaattcactggcatattcctcagtgccatctctgcttaagcgaacggtgaagaaagggcaggtgaatcctagatggaatgagacagggatgaagctagagcaagattgcaccaacggtgagctgaatgagcatgacctgaccaaagcaggagctaccgcaatgggaggagctgttttgaccatggctcgtaggcctgattctatggccattcttgctcttatagttgcagttaccatcgcgataactatcgtcgtgcgcctatatgttcctctgcaagcaacatgatctttagatgaacccacggtaagttcgcaaaatgcaacggagttcttctctgatcacttcaaattctgaactgtatgtatggaaaatcaacggagtcgaattgtacaagggggaaaaaagcctctactagtatgagttaattataactcattggatagcctaaatgccaggtgtaacctgtagtagcaaggcttagtatcaagaggcaaaaagaagatagtatgttcagatcatagagtttctcctaagaggtagactgctagtctttcttttctgtagggtatgtcactgcttcagtgctgaagtatcaaaaaaggttgcgacagggcaaccagcaacaaaactatgttgaaattgtgatgaacaacatgcagtttatacgaattattcttctctcttatcatt

SEQ ID NO: 19220 - DNA, 1482 bp, Oryza sativa
  ref <308>: DATABASE ACCESSION NUMBER: AK069590
  ref <309>: DATABASE ENTRY DATE: 2001-12-06
gaccaaccccgcctaccgctccaccactactactacaccatcccctccaccggctccccctcaccaaacttccctccacgcctgcttcgcccaactcgttctcttggagcacctaactcgagctgagctcccttcccgcggaattcgggtccctccctgatggcggagccggagcagcagcagcagcaggcgaatcccgacgaggtggtgctcgggcaggagaccggcggcgcgagggtggcgatcctcaaccggccgcgccagctgaacgtcatctccgatagagtggtgtatctcctcgcccagttcttggagagctgggagaaagatgaggatgccaagctggtcatcttcaagggggctggacgtgcattttccgctggtggggatctaaagatgttctatgaaggaaaatcagatgactcctgtctcgaggttgtttacaggatgtattggctttgctaccatatccacacgtataagaaaaccgcggtggctcttgttaatggacttgtcatgggtggtggtgcagccatggttgctccactgaagtttgcagttgtcacagagaaaacagtcttcgcaacccctgaggctagtgttggattacacacagactgcagcttttcttatatccattctagactccctggatatttaggggagtacctggctttgaccggtgcaaggttgaatgcaaaggaaatgattgctgccggtcttgctactcattttgttccttctgaaaaattggaagaacttgaaaaatgcctgctgaatttaaacacaggagatgagtctgctgttcgagctgctattgaagagttctcaactgatgttcaacctgatgaagatagtattttaaacaagctcccaactatcaacaaatgtttctctgctgagactatcgaggacatcataaaagcttttgaatcagaagggagcattgatggaaaccaatggatcgctacagtactgaagggcatgcgaagatcatctcctacttcactgaagatgactcttcgatcgatcagagaaggtcggaagcagagcctgccggaatgtttgaagaaggaattccgacttacaatgaacactctccgatctgtagttactggcgatgtctatgagggaattagagctctcagcatcgacaaagacaatgcccctaagtggagtcctgctacccttgaggaggtcaagaacgaggacatcgaccgtcttttcgaaccattcagttcagaaaaggagctccaagtcccatctgacgattccaacagatggagtggcaaatttgagcacacagtctatggcagaacttcagagtaattggcagcagaaatagatgttcatcatcctcacaagcatgttttaagtactcgtaaccccatgtattctcatacttccctgtataacattgtaacacaaaaaattgaaaattacataacgcacgaagcaataaagcatctcaaatgttttgtt

SEQ ID NO: 19221 - DNA, 3011 bp, Oryza sativa
  ref <308>: DATABASE ACCESSION NUMBER: AK069591
  ref <309>: DATABASE ENTRY DATE: 2001-12-06
gacttcggaaaacagaaaaaaaagaggaaaaaaccgatcataaaaaaacactcgaagaacacaaacactcgccccgatccaaacccgagaggggacaagcccacgcgcgagaggcgagatccaaccccaaccccaacccgagccaccagaggccgaccagatccacccccgcagccagcgaagacggcggccacggcggcggtcaggatgctgccggatggcggcgccgacgacgaggagcggtggctcgccgagggcatcgccggcgtccagcagaacgccttctacatgcaccgcgccctcgattcgaacaacctcaaggatgcgctcaagtactcggcgcagatgctctccgagctgcggacctcgcggctctcgccgcacaagtattatgatctatatatgagggcgtttgatgagatgcggaagctggagatgttcttcagggaggagacccgtcgtggcagctgctccgttgttgatttgtatgagcttgtgcagcatgctggcaacgtactgcccagactctatctcctctgcacagtaggatctgtgtacattaaatcaaaagaggctcctgcgaaagacgttcttaaagaccttgttgaaatgtgtcgaggcatccaacatcctcttcgtgggcttttcctaagaagctacctatctcagataagccgagacaaactgccagatattggttccgagtatgaaggggatgctgacagcattaacgtcgcagttgagtttgttcttcagaatttcatagaaatgaacaaactctgggtccgaatgcaacatcagggccctgttcgagagaaggagaagcggggaaaagaaagaaatgaactgcgtgatttggtaggcaaaaaccttcacgttctaagccagattgagggtgttgaccttgacatgtacaaagaaactgtccttccaaggatattagaacaggtggttaattgtaaggatgaacttgcacaattctacctgatggactgcataatacaagtctttccagacgaataccatttacagacattggaaacattgttgagcgcatttccgcaactacagccaaatgttgatatcaaaaccgtgctgtctcaactcatggacaggttatcaagctatgctgccgcaagtcctgaagtattgccagaattcttgcaagttgaagcttttgcaaagttcagcaatgctattggaaaggtgatagaggcccaagttggcatgccagttgttggtgcagtaactttatatgtatcacttttgacatttactctccgtgtgcatccggatcggcttgattatgttgatcaagtgttgggtgcatgcgtaaagaaactttcagggaatgcaaaacttgaagatagcagggcaacaaagcaaattgttgcacttctcagtgcccccctggagaaatatagcaatattgttactgcattagagctctcaaactatcctcgggttatggattaccttgataattctacaacaaaagttatggctcttgtaataattcaaagcataatgaagaacacgacttgcatatctacttctgacaagattgaagctctttttgatttaattaaaggtcttataaaagatatggatggggctcaaaatgatgagcttgatgatgaggattttaaggaggaacagaattctgtggcgcgtcttattcacatgttgcacaatgatgaccatgaagagatgttgaagatattatgcaccgttcagaagcatatacttcagggaggtcccaagcggctacctttcactgtgccatccttagtattctctgctctcaagttggtccgaagattacaaggtcaagatggtgatgtaataggggaggaagttcctgcaacgcctaagaaaatatttcagatcttgcatcagaccattgaagctctctcatgtgttccttctcctgaactggctctcagattatatctgcagtgtgcagaggcggccaatgattgtgatctggaaccggttgcttatgagttctttactcaagcattcatcttatatgaagaagaaattgcggattcaaaggctcaaatcactgcaattcatcttataattggaacccttcaacggatgaatatattcggggttgaaaatagaggtaccctgactcacaagacaacagggtactcagcaaaacttctaaagaaacctgaccaatgccgagcggtttatgcatgttcacaccttttctggactgacgaccaagacggaataatggatggtgaaagggtcctcctttgtttaaagcgtgccttaagaattgcaaatgccgctcaacagatggctaatgtaacaaggggaagtagcggatctgtcgcgctatttatcgaaattttgaacaagtatttgtacttcttcgagaaaggaattccagagatcacgaacactgtaatccaggatttgattgaattgattaggacagagaagcaaagtgagaacactgtagctgatccatcgacagaggccttctttgcaagcactttacgttacattgaattccagaagcagaaaggtgggagcataggtgaaaaatatgagcaaataaaaactacctgattgtgcactaagtcaaaacaagaacagcgtcacgacgtgttgtttttgtctcgagtcatatttgcggaagttcagtgaaatacaagccattggtctcagctgcctctggcctaaaggatctttgcatctgttgttatttgtgcatcttacgctcaaagcggggcctcccctccattttgtgacatgtttgggttagtcaggtggcaataagctttacccttgggaagctcagatctgtacagcgcaacttgtgtaccagagtatcattgttgtatatcctttttctttcttttctttttttgtcaaagaacaattttagggttctaacttttttaactttggaggtacatatttctatttatctggctggaccttttgcttaattcatagcaatgaaggcgttgaatttgaactatgttccg

SEQ ID NO: 19222 - DNA, 1059 bp, Oryza sativa
  ref <308>: DATABASE ACCESSION NUMBER: AK069592
  ref <309>: DATABASE ENTRY DATE: 2001-12-06
gactatatcagattgatcgatcggtgatcggtctatgccgttgctgccgatgacgaagctggagctcggccaccgcggcgaggcgtgggagcccggctgcctccgcgccgtcgccggcgagctcctcttcaccttcctcttcgtcttcatcggcgtcgcctccaccatcaccgccgggaaggcggcgggtggggccggcgaggcggcggcggtgacggcggcggcgatggcgcaggcgctggtggtggcggtgctggcgacggcggggttccacgtctccggcggccacctcaacccggccgtgacgctctccctcgccgtcggcggccacatcacgctcttccgctcggcgctctacgtcgccgcccagctcgccggctcctccctcgcgtgcctcctcctccggtgcctcaccggcggcgccgccacgccggtgcacgcgctggccgacggggtgggccccgtccagggcgtggcggcggaggccgtgttcacgttcacgctgctgctggtgatctgcgccaccatcctcgacccgaggagggcggcgccgccggggacggggccgctgctgacggggctcctcgtcggcgccaacaccgtcgccggcggcgcgctcaccggcgcgtccatgaacccggcgaggtcgttcgggccggcgctggccaccggcgagtgggcccaccactgggtctactgggtcgggccgctggcaggtgggcccctcgcggtggtggcctacgaactcctgttcatggacgtggaggacgccggtggggcccaccagccgctgccgcaggagtgaagtgaagccggggaaggcgcgctcacgtgaggtccacgtggcttcgggagattgcacggccgtgtgcgtgcgttttcggccgttgattggtgtaatctccagatggaattatttttgtacgtttgatttttttttccattttgtttaaaaaaaaatgggaggcgtgcgtgtaaatttggggtttttttttgtgtgtatgtgccggtacaagtgaggttttgctcgttgaaaatatgatgaataatacgtatttc

SEQ ID NO: 19223 - DNA, 1437 bp, Oryza sativa
  ref <308>: DATABASE ACCESSION NUMBER: AK069593
  ref <309>: DATABASE ENTRY DATE: 2001-12-06
gtccgtctccgcctctctcgctcgcgccgccggccgccggcgatcctcccgccggagcacgctcgcctgacctggctgcctccgccgcttcgaatcgaagcccgcagctcccctccctctcttcctctccagacagtcccctactcccctctgctgcactggacttggggtggggtggagcgggagatccatccaagatagctcggatgagaacaagtacctgaggtcccctccgattattctccagaaggttgtagaagcttggaggatgccgaggcgggagggtggtcgctctcgctccgccgcctacctcgtcctcttcgcttcctgccttttagctgttgcggcggcatcacaccaggaatttcatgaagctgctggatccagaactcttcttatgtcacatgaacacacaaatcaagtgcattgctcaagggaaagaagccgtgcagcttggaaagctattgatgagtatttgatgccctttgtggaaaaagagaaatatgaactcccaagcaaatgtagacttcatcctggtaatgacatgtttcgggaacaggagcagcataagattcactttgatataaatgaatggcgctgtggtttctgcaagaaagccttccgagcagagaagttccttgatcagcattttcacaatcggcacaataatcttgtggataatagtcaaggaagatgcttggctgatctatgtggagcacttcactgtgatctgatgttggagtttaagaaaccaaagagtaaatgcagtgcaactgcagctgcaaggaatcgtcatctttgtgagagccttgcagatagttgctttcctattaatcaagggcaatctgccagccgtcttcatgaatttctcttgcgccaattctgtgatgcccacacatgcaagaatggctctaaacctttccccaaaggtggcaggaaacaaacaaacagattctacctggctctctgtgccttaacaatagtacttttgccactgttctatctcatagtattcttgcaccagagggaaatgaagaaaggcggtcaaaatttaagacgaatttcgaaagttgtccaaaagaaaaaaccatcttaggtacctaattccatgccctgcttcttccctatgcagcccctcatgcagatgcaatcgtcaagaagcaaacgtgtgctttttatgtgaggtcaagcaagataatttttcgatgccttgcccaagctggagtcttgttgacctctgtagttcatcccttgaaatgtgggtttacatgaccgtttacagacaatctcatgagactatatgtacattgaagaatgaaaatgtgtatccaatatttagtaggctctaatttgaatcctatgggcttagattaatggaatagaaacatccccatataatttgtaatatttgcaagaggcttggaggtaattgtcatt

SEQ ID NO: 19224 - DNA, 1166 bp, Oryza sativa
  ref <308>: DATABASE ACCESSION NUMBER: AK099100
  ref <309>: DATABASE ENTRY DATE: 2002-08-28
gtcccatcctccccaccccccaagcggcggcgagaccaaatcccccacttctctctcaatctctctctctgctagggtttatccctccgcgccgccgcccccggaagacgagagagcgccatggccggcggtcccgcggcggtgtcgttcctgaccagcatcgccaaggcggcggcggggctcggcgccgcggcctccctcctgtcggcgtcgctctacaccgtcgacggcggcgagcgcgccgtcatcttcgaccggttccgcggggtgctcccggagaccgtcggcgaggggacccacttcctcgtgccgtggctccagaagcccttcgtcttcgacatccgcacgcgcccccacaacttctcctccaactccggcaccaaggacctgcagatggtcaacctcaccctccgcctcctctcccgccccgacgtcgtgcacctccccaccatcttcacctccctcggcctcgagtacgacgacaaggtgctcccctccatcggcaacgaggtgctcaaggccgtcgtcgcgcagttcaacgccgaccagctcctcaccgagcggccccacgtctcagccctcgtccgcgacgccctcatccgccgcgcccgcgagttcaacatcatcctcgacgacgtcgccatcacccacctctcctacggcatcgagttctcgcaggccgtcgagaagaagcaggtggcgcagcaggaggccgagcgctccaagttcctcgtggccaaggctgagcaggagaggcgcgcggccatcgtgcgcgcggagggagagagtgagtccgcgcggctcatttctgaggccaccgccgccgctgggacagggctgattgagctgaggaggatcgaggcggccagggagattgctgccgagctggcccgttctcctaatgttgcatacgttcctgctggggacaatggccggatgctgctcggcctcaacgctgccgggttcggccggtgatccgtcactccaattttacccctttagttgcccaggcaaccgctctgtgttacattaaactggaatgatggtatggggaattatgttatctgctacttttggtaatatttagtctggatgtctttgaacggaatgtgctaatctttgtgatccaaataagttctgggtctaagactcatttatgttttacg

SEQ ID NO: 19225 - DNA, 665 bp, Oryza sativa
  ref <308>: DATABASE ACCESSION NUMBER: AK069594
  ref <309>: DATABASE ENTRY DATE: 2001-12-06
gaccgtcgtcgccgtctcgaacggcagcgccccggcgatcccctccagggggaagtacggcgacgagaacacctccacggcgtccacctccaccgccgccctcacctccgccgacgcccgcgccccgacctccccgcgcggcaccaccgcctcccccaccgcgtcgccgtggtaccgcaccaccgtcaccacctcgccatactcgaacgccgcgcggttcgggttgtacgccgccacggccacgtcgaaggtcaggttcagcgccggcgacgggatgagggcgaaggcggagacgcgcgtgccgacgaccgtcgccgtcacccgcggcggccgcggccggagcacggtgaagtagagcgcggtgaagacggcggcgaggacgacggcggcggcgagcgccgcgccgcagcagatcagcgcgggcttcctcctggcggccatgtcccccggcggcgaatttggcgattaattgacgtgctaattattttttcttgattttttttgggggattaatatgcatggaagaaggggagagaagggttgccatatgtaaagaagggaagctgcattggaatttcagctggtttttgttattttcctttctgttaatttggggctttgtacatgtttataattaatttgcctgctaatttatttagttttct

SEQ ID NO: 19226 - DNA, 1375 bp, Oryza sativa
  ref <308>: DATABASE ACCESSION NUMBER: AK069595
  ref <309>: DATABASE ENTRY DATE: 2001-12-06
agcacttccattccacgcacgcgcacttcacgtgacgagaccatcgccacccccctccgccatccttcccaccgccgccgccaacgccgacgccgcccgacgaccgagccaacgcgaccagccagccgcccatgcctgcgcgcgcggcggcgctctcctgccgcggagtctccccgcacccccgcgcccactccctcctccctggccgccgccgccgccccgtcctccccttcgccgatgaggcggcggcggcgcccctacgtgtcagctccgtgccccattctcgggcttacggctgcggcggcggcggttacttcgtgcatctcgaagaccgcgatgacggagaggcgtctcggttgctgcgtgcccttcggcgagtccttcccgatcaccagaaatgggcacaacctgaccttctgaaagctgctgttatttcaaccatgtcaatacttgctgtgcctcttgaggcatcggcatcggcggagacatgtcagccagctaattctatggccaatatgcccatttttattgctgtggctctaataggtgctgctgttggtggattactagcacggcaaagaaaggaggaattaaagcgactgaacactcaacttcgccaaattaacacggcacttagaagacaggcgcagattgagtcatttgctcctggccttacttacgcgccagttggcagagcaacagaaactgaagttattgtagatcccaggaagcaacaactgacagtaaatttgagaaacgggaagacatttatgaggaatcaagatcttgatatggcagtaaaggaattcagggcagctctggagctcgcaaagagcgtaggagatcgctttgaggagaagaaagctgctcgtggattaggtgcatcgctacaaagattgggcaaatacagagaagcaatgaactgctactataaagtcctggagctttccaaggaaacgggcgaggattccgggtgcaccgaggcctacggcgccatagctgactgctacacggagcttggggatctagagcgagcggcgaagttgtatgacaagtacatatcaaggttgcagcccggcggtggtgagtaaacgcttgggctttcctgacccaaacgatttggtttcttcctgttgcatggttgatgttcagcaaaacagtcaatttgttggcctcattttagctttgtgggagcgcttgaatcgctcaaggaaaaaaagctcaactcttgtatataaatgtcagtggtgcgtgctacttgagataacaatggcaaagcttggtctggtttgctgcctgttgcaagcggcaagcactgcgtacacacacggtgcacgcatctactgatcttcctaaaataactctgccaaagttc

SEQ ID NO: 19227 - DNA, 1095 bp, Oryza sativa
  ref <308>: DATABASE ACCESSION NUMBER: AK069596
  ref <309>: DATABASE ENTRY DATE: 2001-12-06
gcatgcaaggacgccgacccgcagccggccatcgtctgggcctcctcctcctccgtctacggcctcaacgacaaggtgcccttcacggagagcgaccgcactgaccagccggcgtcgctgtacgccgccaccaagaaggccggcgaggagatcacccacacgtacaaccacatctacggcctctccatcaccggactccgcttcttcaccgtgtacgggccatgggggcggccggacatggcctacttctccttcacccgcaacatcctgcaggggaagcccatcacggtgtaccgcggcaagaaccgcgtcgacctcgcccgcgacttcacctacatcgacgacatcgtcaagggctgcctcggctcgctcgacacggccgggaagagcaccggcaccgggggcaagaagcgcgggccggcgccctacaggatcttcaacctcggcaacacctcgccggtgacggtgcccaacctggtgtccatcctggagaagcacctccgcgtgaaggccaagaagaacgtggtcgagatgcccggcaatggcgacgtgccattcacgcacgccaacatctccctcgcgaggcagcagctcggctacaagccgaccaccaacctcgacgtcgggctcaagaagttcgtcaagtggtacctctcctactacggctacaccaggggatccaagaacttgtgactataatccgccctaattcttctgctaattcttttctttttctttcttctttttttcttcttattctctggccatccagtggtcgattccactccaggatcaaaacattaacattcttatttcgactttttttttgggggaaatattttaggatgttctttggaatactggggggaattcttttcttgggggaggggagggaggaagaagaaagcaatggagagcagcatttttctcttccttttccctttatcttctccatgctcttctgtaaatttcgttctccataacgtttcacaccctcgaattttttgtgtgtaatctggctggtcatagctgagctatgaatctttcttgagctaaactaatcaaacaataaaacaacaatgcgtttaaatttcg

SEQ ID NO: 19228 - DNA, 3313 bp, Oryza sativa
  ref <308>: DATABASE ACCESSION NUMBER: AK069597
  ref <309>: DATABASE ENTRY DATE: 2001-12-06
gctctctctcatcctctccttcccctcactttttcctccctctccctcccgtggcccccattctcctcgccggtcgccgccgtcctccgcgccacggcggatcgtcgacgactgcgggggaagcgtggattcggcggcggtggaggagggggaggcggcagcggagggggcggcggtggaggaagaagctccagatccagtggtttcgggcgtcgggggctccagatctggtggcggcgggcctcggaagcttcggcaggatccaggcagctcgtccacggcgggagcggcggcgaccgagcagcaacggagtggaggcgacgacgtcctctgattgggaatttgccgcagttgggattattcttaggtgcctgacggtgaaaattgttttcacagtcggtggtctatagttgcccgtctaaattggctgtcagaatggtactaatttgttctgaaagttctgatgacaaaaacaagtgcggagatgaattgataaactatattttatcatggtcatggacaacttgtattgagtccaattttgaaaacccccaagaatcagctgcatcatcatatgcaaaatcgctgttagaaccacttgtcgaggaaacggtagcagcagttcagtcagctctccagaagctgtgttttgcacctcaattcaagataattgatatccttcctgctgctggagtgaatatatcattcttggatatagatcttcaggaggttattactcacaacacggagaggggtgatatctttttactgtgcacagaacttcctagggactctagtcagctatgcaatgatgaagcagtacttgctatggcaacttgctcaaatctttatgacacatttcagagaagtttcaatgtgaagactcatcagaaagttaagagacaaaagtttaaccatgctctgttcttgtgcaatatcttgatgaatattcagatctgggaatcactgaatgcggtgattctatatgactgcccaataatcaatgatctactggcgccaccatccatggttgtgacatgctgcaatgaggagttggttgatgtgttaatgtctcaaaagattactctagatgaggtgcagttggaagctgccaaagcaatttattcagctgcacggtgtaaacatagtagaagcatccatgttatatctggagcccatggaacaggcaaaacaaaaattgttttctctgcagtggcgtcacttttgtcagtaagtgaaaaagttattgtatgtgtccccaatgctcaatcgttttcagcaatgtgttctgattttgttgaaatggctgagtctcacatggatgaggaattgggaatttgcttgggagacatattggtactatccaacgagaccgggctagaagataatgttcaacagcttacaatcattacaagagtcaaagaagtgctgcctttgatgatatggcatgatatgatgaaagcactaaggaaatcattggcagcatttaaagagaaatacgttgcagaatttaaagagaaatatgttgcttcagcaaaacataattgtcagccatcagccaaaaagttgctgacttcattatttttcgaaaaggcaggttttctgttgatatgccttgcaacctttaggaaacatttcccaaaaaatatgttttctgaacaagtaagcaagagaataaaatctctcatcaagtgtgtctccaaacttgagaatctcttgaaagacaggaatctcaaggaatatgatgtacatgttgcttttgggatattatcaggaaaaagggaaacaatttctgtgcttgccaaagatttacgccaaacaaagaatcactgtgttactgctttggatgaccttctcactagacttgacctgccgttcaacaaagattgcatttggctcaggaattacttcattagcaatgcaaaatgtgtgctatgcactccattatcaacatttgatcttcagctttcagctggttctatcgagacacttattgttgacaatgccgatcaaataagagattatgatcttattcttcctttaactctccgcgatgtcaaaaatattgtattaacaggagatccaagtaaggtgaaggaaggatcattctttcagagattgctgtcagtcggctttagtgtctttgaattgagaaggcaatacaatctgttggatgacaaagagagacatgaggcagatgggcaaaataccctttccgaagctttaaatgacaagataaaggctgaagagctgtcccttacaattggttcaccgaaacaactatattctgagttcacctggctccatcgtcctcacaatcagaagtacatcttacctcagttgtgcgaccagaaaggacatcctcactgtactgtacatgctagtttagcggctttggaattcaagtacaagtataaagccgcatcagaaaaccctcctcatgatttcagctccaaattctgtacaaagcatatgttgaatgtatatgctgctaagtacggcgaactaggaagtgagcgtgaaagtacaaggggtagcaaacgcctttcaaatgtcttggatatattgcaaaatgatggagccaagagagaagcaatgatgggcaaacaggtctataaaatctcttcatatgcgtgtacatacaaaattggaaacgatactgagtgtcttcaagaaaccatcgatcatttgaagataggcgacatttcaattggatcatttaaagtttccgaaaatctcaggttttttaagcccggagaagtgtacatttacaacccagaaaagccagtactcactccaacagcaaatcagccaagtgcccactgcgtgctggtaataggaggtggaggctgcccaagcgacagtactgcggaacctgtcttagcttgcaacatgcaattcatgatacaaaatagctatggcaaaggtttcggggaactgggaattggtagagtacgcggagattcgttcagtaccatgcatcggatcagtttgtaggctgagcgcctctgaggttcatatcttggtggtgatgtcaatctgtaatgactgatggttggtagattagcatacggtggtagttttgcaggatgtagattggtctagctgaaaacatgggctccttggagggagattgtgacagcatgctgagtaggtctcacctcaggtttggcttaatttcatgctgagtaggtctcctctgtttcaaaaaaaaaaggtcgcagcctgaaatacttctgttccatacactagttgcagtagagcttcagacagtcctcaccatcaatcaagataagttgatgggatttttgcg

SEQ ID NO: 19229 - DNA, 2521 bp, Oryza sativa
  ref <308>: DATABASE ACCESSION NUMBER: AK069598
  ref <309>: DATABASE ENTRY DATE: 2001-12-06
gtactctcgtctctccctctccctctctcgccgccgccgcctcgcgccatcgccaacgccgtccccgtcacctcgcgcctgcgccctcgtccccgcctccgcctcgcgtagccgtcgcggtcgccactccctgccaccacgcccttcatcgcccaatcgccgtccctgagcacgggcttcgaggcggacgcggagaaatcgaggaggcgaacgctccttcctcttcccctcttgtctctcctctgcctgcggggagcgctgctttgccgccgtcatcgccgtcgtcaccttgccggtctagccgctcgctgccatcagagtggtcggatctgatggtggcgagcacgtggctgtcgattgtttggcggttgatggagccaccgttgtcctcccacaagccggtatcaccattttcgcgttgtagtggacaaggggctccacggtggcgacgagctcaaccttggcggattgagcgatggcgtcaacctcgccggcggcgccgataaatagaggcttgctggatctgatggcggcgaggtcgtggccgccagatccggtagcctggcggctaatggaggggctgttggtctggcggatggaggtgctcactctcctctccgtcgtgcattcacgtttaactggtgctgccgccaccaccatcgccggcacggcaaggcacccacctcctctgcaccatccccttcctcctcacacttctctgccagcctgaagcaccatcgccggcacggcaaggcatccacctcctctgcaccatccccttcctcctcacacttctctgccagcctgaagcaccccatgagtatggatccctcgatttggcgctagaccatgacgctgcctcaagccctcgccgatgagttcactgccaccgccaccactgcgcggccagacgacatgatgctcgtgaatcggatgcaacggcttgctcactaggataactgacatcggcagttcatgctagagcaggaacggatatacaggtactgaaaatactgattatcctgtgtgagctgttcaagaattcaaagatgggttcattcacaaggaggagttccagctagcactctttaggaacagcaacaagaagaaccttttcgctgatcgggtcggtttgcctttttttcaatttctgtgtattctgctgtctcgcggcaaaagcttttatatttgatctctttgatcttaagcgcaatggcattactgatttcggggagtttgttcaatccattgacatttttcacccggaaatgcctttggcagagaagattgcctaggctgcaggatttgtacctgttgagcccatttaaatactctagaggaaatactggagaagaaggtggaggaggccaccgaaaggaagtttgatagttgtgcaagagctcttttttggcttagtaggtaaactcacacatagcatataatgggctttagttcttctcttatggagttttgctacctacaaatttcaaccttgcatacctcttcatattaatagttatcttctctaacatcactagatgcatggattcactattgcaccgcaaagctttgcacaccttgtagaaactgcatgcatgatcattctgaagtcattgcagcattggatctctttagcaacctatgattggtcagggtccattgaatctaagtgtaccattttttttttgtcgaaaatgactgtttttccatcgcacttgtcctgcacaactatgattgtattgatactgaattcaccttacaaagatcaaaatatttgcttttagtgaagttgcatattatctgctcatttttcaggccaagtttagattagacaggctgaaatcaacttgatggcaagtctaaaatggttgttccaatgtgttattatgtgatactgccttggtgagctggtttgtctatgcataaagattttcctttttgtgtcacagtagtattaccacgtgtctatggatcactctgtaaatgtcagaataaaaccccacgtatactagcttggatataggcgtggtttcaatgcagttccaagaatccacataagttttatcatccatttccaaattattcatccacatttgcatttcaaattaatttacagtaacacaaatcaagatctgtgcttaaaaagttataattgtctttagtacctcatagctgttatattactctcatttctcctccattgcattacggagaaatatcttcattgtcatgattttggacatgtctttatgtttaaaatagcatctgttgtatgtgcttgtttaatttatactagcagtgctgttgtacatgaatgaccatatgtacattagaaaatatgaagttctttgtacttagtccttaccattgggttcgacaatatgttgtctgtacagtacctggcttgtattaacggcaaggctatgatatcctttatgtattgaaattaccatcctacatgttcatggctcctttttatttgcttattcctgtttataaaaaaagatgcaattctctcttt

SEQ ID NO: 19230 - DNA, 2939 bp, Oryza sativa
  ref <308>: DATABASE ACCESSION NUMBER: AK069599
  ref <309>: DATABASE ENTRY DATE: 2001-12-06
atgaaatttcggatatggctgaaatggctcgagatgaaatttcagatatggctgtagatacaataccctgccctgctgatatggcggcatctggaacatcaactgttcctgaagtgacaacagacaaactgatcattccttacgtggaacatcaatcgccctctgcatctcatgcaagtatatttgaaaagttggatgcacatgaagaagctgaattggatgacagttttgatgaggtgcctcctggaacagaggctggcttagcttcattggtgattatggagaaaaacaaataccagccctcaaaatcagtagactcagtgcttgacatttatagatatactagttgggcattcttcaggcaaatactgcatgagagtgtaatgaaagagtgggcatctctcttctcaggtgctctcagcaattgttttgactcatggtatgccaggaaaaatattgtggctaaaaccatggatgatacattgagacccaaagaatatacttactacaggaagaggaaactgaggaaaaactgtgaagcatcatcatcagaaaaaccaatggatgagcagctctccagacctcttcgtgatcttgttgaatgcaaggttaatatgaaaaatatccatcgatcaagcaaggctgggatttcgcagagagtttctgttgtggagaagccctccaaaaagcgtgccaaaccttcacataatgataatattaatctgaatatccagcaggacttgaaactcctttccgacaaggtgccaaagagaaacaggtcttcccatcctaccagtaagcctcttgttagtagcaaagtgcctactgaggatagaactacatcagcaatgcctgcaaagaaaagaaagcagaaaaacttggccactgagtccaacctgaagacaaaagcagtaattttatctccagaatcacatggttgtgaagcgcctactgagaaaagaactacagctataatgcctgtaaacaaaagaaagaaaaacttgtctggtgaatccaaactgaaggcaaaaccgttaacaagtccagaatcgtatgtttgtgaagctcctattgacaatagaactacatctacaatgcctgcgaagaaaagaaagcagaaaaacttgtccaatgagtccaacctgaagaaaaaaccgttggttttatgtcctgaatcatatggttgtgcaagagcttctgtgagtggatgggaatggcgtgattgggcacgcaatgccactccatcagaaagagctcaagtgagaggctaccgagtgaggagtattctctcagctccagaaaataatgtattgaaaagttcacaagttaagggctcatctgcaagaacaaaccgggttaagctacggaatctgttagcagccgctgaaggcactgacctactaaaaattatgcaatcgaagtcaaggaagaagcggctacgttttcaaaggagtaagatccatgaatggggtctggtggctcttgagtctattgatgcagaagattttgtaattgaatatgttggtgagctgatccggcgacaggtctcggacatacgcgaggatcaatacgagaaaagtggaattggaagcagttaccttttccgtttggacgatgactatgtggttgatgctactaagcgtggtgggttagcaagattcatcaaccattcttgtgatccaaattgctatacaaaagtaattactgtcgagggccagaagaagattgtcatttatgcaaagaggcgtatatatgctggcgaggaactgacttataattataaatttccactggaggaaaaaaagattccatgccattgtggttcccagaggtgccgcggatcaatgaattaggaagtaaagtttataagtcaggaggtaactgcaattgggtgctaccccagtatgtatgtgtcatgcgtgcttgtcgattgtactgggcagaagttcactgcagaaatgttcttggatttactgacaggatggtaattgtgtagcaaggtatgggatcgtggaacatactgtactgcaaaaagatcacaaagttgctgagctttctggcgcagaagaatttgaacacgttatttatttaggttagatggactaattcgggctatccagaggaaggccaacaacattattacattgactggattgaggatatagagtttacacggtgatttcttcccgggggtacatttgaatgaacccctggtcattttcaattttttttgaagcatctaattagctgtaaagttaaaataaaccctataacaataacaatgaccataataatatctgtcttcaccttttgagatgtgtgctgtttgcactgaagtaagtcactctgatgccttgccattctgtgaatatagcgaccggattagccatctcgtttgcacataagaaatttgcagtcctgcttcatgggcctcttctgcatgtgccaacatccagagtcaacatgagtgcagtttgggcttctgtttgtatatatatcatttatttataatcatacagtacccaagatgtggttttagtttcagcagggcaagtctactgcttttgagaccattcttgatgagaccatttcattttcaattaatgtcatgctaaatcacacttccatgcaagcagattttacaccacttgtatgctataaatcacacttgtttgtgtgagccaatcaatgttcatggacctactcctgttgttgctgcaggtacatggatacatttaatctatcatccgtggtgtatgtgtatgtatttcgtccagaaaaaaaaaagcatccgaatcatgtggtcaggtggatacagacgtgcatgaatatctgatatcacaatcgtaagtatgaattcaagtattttaccagcttatatgtactttgtgcaggctaacaacagggcaaaagcaagccactaacaaccaacccgttcc

SEQ ID NO: 19231 - DNA, 2246 bp, Oryza sativa
  ref <308>: DATABASE ACCESSION NUMBER: AK069600
  ref <309>: DATABASE ENTRY DATE: 2001-12-06
gatcggcgctcacccttctctcccgcagcccttccaaatccgtgcttcccccgtcccgggtccgatccttctgcttcctcccgatcgattccccgcgaagtgcatccgatctgcgtggatctgataccctccctccttaccccctcctctccggccgcggtcccatcccgacatgcgtacgtcatcgtttcttggaaaggccgacgtggtgctgcgcgggttcagcggctacaacacgcggtgggcgctgcgggtgctggcgagggcgatggagggtgccgccgccgtgggggcggcagacccggtggctgtcacggtgttcttgggcgccaacgacacgtcgctgccggattggaagcaggtgcaccagcacgtgccgctcgacgagtaccagagcaacctccgcgccatctgcgcctacttcaagggacatgtatggagaagatgacccttcaaaactacctgaaagaaccaatgaggctactggcacttatgcacaggcatgcctgacagttgctaaagaattgaaccatccagtcatagacatctggacaaagatgcagcaatttcctgactggcaaacatctgcattatgtaggggcctggaggcgaaaccgacggtgtggaggtgatcgtgtcccagcgattgtgtgggaatgcacaatgaataggcctatcttctctgtacacgtcaccgtctataacacagacataccctacagtgcacagagtcatctgatcctaaagatgccggcctacatcgtgctctccatcctccgagccccctcccctacaaacaaggtaaccctaagatggagcaccaatattacgtctgatcctaagatgaagttgtagccgcattcaactgattatatgtgagaaatttatattatgtgcttcaagttggagaatgtattcacctggctataccatttttggtcatgttttttataaaattgaactatgagtgtgcagacgatggaactcgtttacagtggcatatatgttagtttgaactagcttctttttgtgccatgaaattgtgaacaatggactttcggaaccatgccatttatttctatgcgataagacagtgaacaatgttactaggctcgggatgctggtttgatactaattactactccctccgttcaatagtctggatgggatcaatttccaattcctgtttaaaaaaaataagggacaagtttaatttttgtgtaatgaaaattactgtatggagttgatccgatatgacatggctgtattttgttattaggtttaaaatcgatttggcaaaactagatctcctgttcaaaacttgaacaagcataattgggcaccatggcatcacctccatgtcaaccctgacccttttgtacctatttttccccattgctttctaggatcaacaattcaatgctactaaatctcaaggcctaacctttctatttgtatgtgccagtcaatccaatgaaggaatatttttttttattatcgatgaccaggtctggttctgccttttgggaaaaatatactactcatgtgcatattaccaggtctcattttgtgaaacattaaaaccatctcattatgctaattctggttaggtactacttttagtacagggagctcctttctcttcttgatttatcttcgattggacgaaaatgttagaagaatgtcaattttcaatttttaattacatactaatttatctaggcatcatatattctcattatgctacttttggttaggtagtacttttggtacagggagctcctttctcttcttgatttatcctcaattggaccaaaatgttagaagaaatgtcaattttcattttttaagtacaagctaatttatctaggcatcatatatttcttttatgatgaaatggtgcattctttgtttgcgatttgatttctcgatatgtttaagattgaagtatttccttgttgattccttactcacagctgaacagaaaagactccgagatgctatattgagagcggcttgtctatatgatggaaggaatcactatatatgtgatgacggacttccaaatatgcattacatgtttctattgttgacccatgactggcttgtacaattagttcagctgaagttgtaattcactccatatgtgtctataatcattttctgtgtaatctataagtattactatgccacttgtaagaaaaaaaagtgatgtgactgaaaaaaataaaaccactgcttaattc

SEQ ID NO: 19232 - DNA, 2429 bp, Oryza sativa
  ref <308>: DATABASE ACCESSION NUMBER: AK069601
  ref <309>: DATABASE ENTRY DATE: 2001-12-06
ggtctttgcctagggggaaaaaaaaccccgaaaggcctcccctccgccgccgtaaagcttcggccgtcgggatctccgaatcgccgcctccaccctaatcccctccgcttctgtcggcgtgcaggctgcgcgaactcatcagaagcgccgcctccaccctaatcccacttctgtcggcctgcggcctgtgcgagctccgatccgccgcctccaccggaatcgcctccgctgccgtcggcctgcgggagcgcttcgaaccggcaaggatgaaatcgcgcagggcgctgtggatttccagggaacggaccagaagaacggcgaactacgaagaccgggagaaccccttctgggcccttgcaggtatgccgccgccgtcgtctgtgccatgccaactacagtcgactggtggcactgggatggagtcaagcccggagcacctcccttcgccgccgtgccaggcaaggacaccatcgccgcccccgagtgggagggcatcatcgccgtcgcagctgctcccctgggaacagagggagagggagaggatacaatcaccgcccatgagtgggagggcatcatcgccgtcgcagcaactcccctgggaagagggggcatgcccggagagggtacgatcgtcgccgatgagtgggagggcatcatcgtcattgcagcagctcccctgggaagagaggacatgcccggagaggataccatctctgccaaagaagaaaatgtattggtttgctcgctctcgggaagccaattccgtgcaagtatcacgtccaggggaagcatcatatcctgaggcaaccgagggcaaaccagagtataatctgcacgtcttgaagagcatgaagaagaagaagaaaaagaagaagaagcggggcaaaaggaataagagaggtcaaggcggctccgaggacaagagccaagagaagcaagaggtagcacaagagcatctgggctcggtgtcgtcctcatacagctctccgctgcgtgaaccgcaagctccacttgtgcctatgtggacgagtccttctggagaggtggtgtatggcatcaccgatgatcccacagctgcagaagcctatcattgggcttttcacgagtacaagaacaagagagcacgccaggaactattaccgacagtaaggtcgtcaatctctgctgctattgaacactataatcccgagcagaagaaaacacaaataaatgcttccaaatccatcgtgagcctttcagcttatcacgatggtagagagattaatcagggaactggtataattatcgagtgcgatgaagtgaagaattctgctatcattttaacttctgcttggctcatttgcataaagaaaccttttgatgattggtcgcataaagattatgctcctgaggctaaggtcactgttcacatgttggatgacacgatctcagtgtgtcgattgctgtacttcagcaagcatttcgatattgccttatttgaaactgtaggagggctaactataccgattatgccattgaaatctgatttggaatatggccaggatttctgtgtgctcaccagagacataaatatagatttgatttgcacaacagtcaaagtgaagtacttagatccgtatgagcaccaacacaatcactatatgttcattggtggttccattcccaagtgtggtactggaggtgcattggcagatttcagtggaaacactgttgggatgttattctgcaccttgcccatggttgcattcctaccgagctccctgatcctcacgtgcctaagattgtggaagaagtttgggcaaattgttcgacctcagcttggtttgaagtttaaaacagtggattttcaagagatgacgcttattgagttgctgtctcgtaaatacaatattacctctggtcttattgtaggagaggtttcagctgaatgtgctgctgagaaacttggcattcgagttggggatattattctctctctctccagggagaaagcatttcaagtataatccagttggagaatatattgctcagtattggtgagagatatcttgaggagggtaacgactccagctctaaggttgatatcaaggttggtctatttcatgtgcgtaaatgtaccagaagatttatcactttatcagtacggttgtctggtgatattgaagtctttcgctgagctcgatggcgacctcctgacgaacagaagagatggtgagacgacaagttagtactgcatgttggaaggaatgaagtcttttaagaggagtggtgttcaaagtttttggtctggctggttatactctgatgtctgcaagtctgttcgtggtcttgatacatgatttctattgttgggtttccaagtgtgtgcttgcagttgcacccattagtcccttgccacattcttgcggttttacacctatccttgtgcg

SEQ ID NO: 19233 - DNA, 1068 bp, Oryza sativa
  ref <308>: DATABASE ACCESSION NUMBER: AK099101
  ref <309>: DATABASE ENTRY DATE: 2002-08-28
gtcggagcaacaaggtcgtagccatgacgaacgggtacctgttccgggagtacatcggcgcgcagttcaccggagtccgcttctccgacgtgcccatcaacccaaacctcagcttcaacttcatcctctccttcgccatcgactacacgagcccggccggcggcgccacgccggcgccgaccaacggcgtgttctcgccgtactgggacacggccaacctgtccccggccgacgtcgccgccgtcaaggcggcgcaccccaacgtcagcgtcatggtcggcctcggcggcgacagcgtgcaggacaccgccaaggtcttcttctccccgacctccgtcgactcgtgggtggccaacgccgtcgcctccgtctccggcatcatcgacgcctacggcctcgacggcgtcgacgtcgactacgagcacttcaacgacgacggcggcgccggcgtcgacacgttcgtggagtgcatcggccgcctcctcaccgagctcaaggcgcggcacccgaacatcaccacctccatcgcgccgttcgaggacgccgtggtgcagcgctactaccagccgctgtggcggcgctacgccggcgtgatcgacctcgtcaacttccagttctacggctacggcgacaacaccgacgtgccgacgtacgtgatgttctacgacgagcaggcggcgaactacccgggcggcaaggtgctcgccagcttcaagaccggcgacgtcgccgggctgctctggccggagcaggggatcgccggagcgaaggagttgcagcggcaggggaagctgccgggattgttcatctggtcggcggacagctcaaaggtcagcagctatggctttgagtacgagatcaaggctcaggagatcatcgccaaccactgatcgctgatcggacggtcgagatatcgctgtggttggatttggtatgaatgaatgactgaataagcggatatatttgcccagtacagttctgggcacgcatggtgttctaatacttattgcgtatatatgcagtgagatggatattatatatatctacagaatataaataagtttcttc

SEQ ID NO: 19234 - DNA, 1922 bp, Oryza sativa
  ref <308>: DATABASE ACCESSION NUMBER: AK069602
  ref <309>: DATABASE ENTRY DATE: 2001-12-06
gacagatttcggtgctcctcctcctcctccccctcctcgccgctgatctctcccgtccgtcccctcgcctccctcaccaccgcggcggcatcagggctctcccccccatggcggccgccactcccaacggcatcccagcttccagacctctggcttcatcagttccaattgaggcagttctgttcgacattgatgggaccttgtgcgactcagatcctcttcatcatgtggccttccaagaaatgcttcttgagattgggtataacaacggtgtgccaatagacgaggagtttttcataaacaatattgctggaaggagtgatgttgaagctgctcagaatttgttccctgattggccccttgagaaggggctgaaattcctcgagcaacttctgatgcaaatatcggatgatcaacagacagttgaaatgctctctggtttctcagcatccgttccccaatcgcagcttcaacatgattatcatcagggttgtcttggtgttcatagggaggaggttggtgttgcagattctaccactgttagtagtgctgtggtgacagaagaatgtactgtccgtgagcttcaggatattgaagggcttctgatgcaaatagaaaatgaccaggaaaatgccgaatcactgccagatttctccacaccagttcatctccatgattgtcatcaggccgccttcggagattttcaaggaagccagagggctacattcaacattgcaaatctttctactatggtgcaggaaagcccaaattttgatctgcaaactggtccaagtaatcaaattactgagtctattctcaccaccgagccaatgaatggagaaacaaatgctgtggaagaaacaagtcctctgcgctctatgtcagtattgggtagttatgataggcaggatggtgatgatgaattccttgaaatcaatgatttcttcgacccagaagatttagaacagattttgggcagtacaagaagtcagaacttgattcctgctgatgatggagtgtttgatagtttgcaatactctgatgctccaatgtttctgcctggttcatttgacagaactggtgtggtggctgaaaaccattatgttgaatttggtgctagtggaattcagaaccagggatttcagcatacaactgaattattggcacataatcaagtcgctctaaatgtgcggaaccatatgaaggacaaccatgttgtcttctcacattcatcagatgctaccattattcatacagtgaatgagcaaccgcctaaccggagttcaaatgcttcacaatcatggttcaatggggctctatctgccttgctcgattctgttcctagcagtccagctatggctgctgaaaacataggtcttaacagaacactgcaacgcatttcgagctttaggtcacaacaacctgcaagagaagaagttagcagtactcttatcaacaccagaagaagaggcggtgggctaattttcatctcgttaatggttttacttgttgctatcatgtggacctttagcaatgggtctgcagtcaagcttagcaaggggttatggaagtttccctctacataataggatgcacccggttatcctggtggccagtgcttcttactacttcaagtactaattcttgttttgctatcctttcctctattcctttacattgaaaaaggcaacaatctaggaaaatattagaggattatgtggtgttagcacttactttcagaatattatgcgagagatgttaaaacaaaacaaaatgagaaaaagaaacatctgaggtgaacttctggatgtttttgtcctcatcattttgatgaaagtatatattgaatgtaattaaacgatgatggattgttgagaagtgcagttgctgtgcacgataaatgaaaaatccatttttgttgc

SEQ ID NO: 19235 - DNA, 2390 bp, Oryza sativa
  ref <308>: DATABASE ACCESSION NUMBER: AK069603
  ref <309>: DATABASE ENTRY DATE: 2001-12-06
aaaaacaccaatccgatcgaaggtctctccctcgtctctcctcggcaccaactgcagtctgcagatcgatctcgctcgctcgctcgctagggttttgtctcgatcgggcggggcctgtctcttccttgttgggccgagcccgcgacacgacctcgactccccccgacctccgcccaaggattttaggttgtagcagtaaaagcctccccacatggatgagatgatacctaagcctttgatcagcaatgacaatgagatgatgcacggccatggctataccactatggtccacggtaacaacgagatactcaatggtaacgagcttgccgttcatgccgaggtgataccatcagccagcacaagaggccagaagagaaagtcagcaatttgggaacacttcactcttgtagatgtctctgacgggtgcaaacgagcaagctgcatacattgcaaccagtccttagcatacagttcaggctcaaagaattcaggtactagccatctcaccaggcacattgcagaatggtgccgtgtgttaaaagatcggcaaaagagcaggcgctacactacatataatagcagcaacgaaaatgcttcatttgaccaagaacgtagttgcttacgattggcgaagatgatcattctgaatgactatccacttcacatcgttcagcagccagccttcctatcttttgttgatagtgtacaacccaatttcaagatggttgacattggtacaattgaaactgaggtgtatgctatttatctcagggaaaaggatcacctgcagcaagcacttgcaaatattcctggaaggatcagcctcactgtagggtcattgaccacaaaccaaagtattaggtacatctcacttgctgcacaattcattgactcggaatggaggctgcatagaagagtgctcaaagtcatgatggcaccttggcctcagtcagagaatgcagttagtagagccatcatcaagtgcctctctgattggaacatgcaggacaagctgttcaccatcaccttggagcacgattgctcgtcgcacgatatttatagcgcaaatctgagaaaccatctctcaggtgacaacattctcatgctgaagggccagacctttgctgtgaggtgctatgccaacattctaaatgcagttgcacatggtgtccttgcttcagttcacaacgtcatctacctcatccgtgagagtataaagttcataaaagccgatgatgcccatgagaacaagtttgcagagattgccgtggaactgaagatcactagtaacaatagcctgtgcttggatgttacatccgagtggaacaccacttatctgatgctgttggctgccctggactacagacaggtgttcactctactggagtcttactatgacaactacggtacagcgccttcgacggaggactggaagaaagttgaggccgcgtgtggcttcttgaagctactatatgcgttcacgcttaacatcatgtcagcagaaggaaaccatcaaactgcaaacatgttcttccatgacgcatgggtccttcagctagagcttcaaaatggcatggctcatggagatgacgttatccgtggcattgtgatcggcatccacgagaagtttgacaagtactggaaggactgcaacgtcgtcttggccattgccgttgccatggatccacgcttcaagatgaagatggtcgagttcgcctactccaaaatctatggcccaacagatgcagccaagtatgtcaagttggtagacgatgctatccttgacctctacaaggagtacgctgcgcagcctgagctactcccattgtcaccgatctacgtcgaccaagtgccagctgacggtctgccttttatcgagaccggcggcgctccggcgacggcttcaccgtcgacggcggcggctggcgctgggctcgtggactttgacatgtacctgtcggaggtgaccaccatgggccaaccgttcaagcacgagctggagctctatctggaagaggccctcacccagcgcaccccggatttcgacgtcctgaaatggtggcaggacaacacgctcaagtacccgacgttgtcgaggatggcacgggacgtgttggccatcccgatgtccacggtcggcgtcggcagctcggttttcttacctgacaatggaagcaggagcctcgacgactaccggagctcactgcgccctgaactcgtggaggctctcctctgcgccaaggactggctccagtattcgccatgaaatccgtaatgtaattagtactcccagtcccatgtgaagatggcaagccattattcgcgtagagcttatggaattaaacgtgttgatactaactgagagctcctgagctcctggtttttgtgct

SEQ ID NO: 19236 - DNA, 1101 bp, Oryza sativa
  ref <308>: DATABASE ACCESSION NUMBER: AK069604
  ref <309>: DATABASE ENTRY DATE: 2001-12-06
gaaacgacaactgatttatcgatcgatgtagaagccctatatataaaagcagagcctatccctcatcgctgagccacacgcacaaactgcacaatcaaatcaagcgttggagagaggaagaaggtaagctaagcaaagcaagcaaagctagagagaaagtgacagcagcaatggcggggggcgagcttgtgctgctggacttctgggcgagcccgttcgggcagcggtgccgcatcgcgctggcggagaagaagctcccctacgactactccgagcaggagctcctcggcgccaagagcgacctcctcctccgctccaaccccatccacgccaaggtccccgtcctcctccacggcgacggagacggccgcgccgtctgcgagtccctcgccatcctcgagtacctcgacgacgccttcccggacgccacccctcgcctcctcccctccgccgccgacgacccgtacgcgcgcgcccgggccaggttctgggccgactacgtcgacaagaaggtgtacccggtggggacgcggctgtggaaggtcaagggggaggagggcgtacgcgcggcggcgggggcgcgcggcgagctggtggaggcgctgcggacgctcgacggcgagctcggggagaaggaattcttcggcggcgagtttgggtttgtggacgtggcgctggtgccgatgatgccgtgggtgtacagcttcgcgaggtacggcgggttcagcgtggaggaggagtgcccgcgggtggcggcgtgggcgcggcggtgcatggagcgggacagcgtcgccggcagcctccgctcgccggaggagatctacgacttcatcggcctcctcaggaagcactacggcatcgacgactagctacgctattgtgtgtacaccttaatttggttgttattattactgctatttactcatttaactacttgtcgtaattaatcaaggtcgttcaaaataacttgtttaatttcgccggctggcaggttcaagtaatttgtatttgaagtttacaagcgtaaactgtactctccgatcattactttacactttaaaagaattaagaaataagaaagatagattcaccttcctgttc

SEQ ID NO: 19237 - DNA, 914 bp, Oryza sativa
  ref <308>: DATABASE ACCESSION NUMBER: AK069605
  ref <309>: DATABASE ENTRY DATE: 2001-12-06
gcttcaaatcttgctcctgctcgcgttttggcacattccctcctctctcctccttgcagggcctgtctgtttctcaccatagtaaggaaggaaagaaggaaggaagaggaaaaaaaaggatcatcaaccatgtcgaattcggcgtcgggaatggccgtgtgtgacgaatgcaaactcaagttcctggaacttaaggcgaaaaggagcttccgcttcatcgtgttcaagatcaatgagaaggtccagcaggtggtggtggacaggttggggcagccgggtgagagctatgacgacttcactgcctgcttaccagcagatgagtgccgctacgcggtatttgattttgactttgtcactgatgaaaactgccagaagagcaagatattcttcatctcctgggctcctgatacatcaagggtgaggagcaagatgctgtatgctagctccaaggatcggttcaagagggagctggacggcatccaggtggagctgcaggccactgacccgagtgagatgagcatggacatcgtcaagtcgcgagccctctgagaaacacaggccggttactgcaatccccaggagcgaaaaggcgttaatttgctacagctcctctgcctacaattccttcccgttggcgatggtcaaccattttcttgtcattcttttcctggaagcaaatgtgttgcattctgtatgagactgtattgccgtttttctctttcccccgtcgttggtgccatagtcgtgttactgctgtaaactagaacatgctttcgttttgagacttggatacttttctcatgagtccttccaccatgctggtatgctaaatcagtaaaggccgtggcgtcatatggtgccagttgtgaagcctgttgtacggtgtaccgtagtaaatcactgagttttcaccc

SEQ ID NO: 19238 - DNA, 1065 bp, Oryza sativa
  ref <308>: DATABASE ACCESSION NUMBER: AK069606
  ref <309>: DATABASE ENTRY DATE: 2001-12-06
ggtccaccccccgtaacattaactcctttgttcagcttgacactccattgcagagggagggtatagctggtgacagagagaaatgggcgaggaggccaattgcaacgtcgcgatggagtccgctgcgcccaaggagaacggccacaccaccggtggcgccgcggcggaggccaaggccgccgccgcctgggctgagatcgccgtcaccgacgccgcggcggtgccaaagccgacgccgccgcctgcggccgtggccgtcgacccccggcttcagggcatctccgacgccatccgcgtcgtcccccacttccccaagcaaggcatcatgttcaacgacatcacgccgctgctgctgcgcccgggggtgttcaaggacgccgtcgacatcttcgtcgagcgctaccgcggcatggccatcgccgccgtcgccgggattgaggctagggggttcatatttggcccggcgatcgcgctggcaattggcgccaaattcataccgttgcgtaagcccaagaaactcccaggcgaggtgatttctgagacgtatgttctcgagtacgggaccgattgcttgcagatgcatgttggcgccattgaacctggtgagcgtgtgctgatcgttgatgatctggttgcaactggtgggacactttgtgctgctataaggcttcttgaacgcgctggagctgacgttgttgagtgcgcgtgtctcattgggctcccaaaatttaaggatttctacaagctcaatggcaaaccagtttatgtgctggtggagtcccgcgaatatgaaaaataaagagattgatgatcaggaatgcacatggcttcattccttacaaattgcaagtgagcgctggacggatatcgacaagtctgcggtacattattaaggctaagctagctgctaagtattagaggggaggtgagagagagcgagagagagagagattggtgagtggggagtagttcttgtaggctgagtagtactagttttttcaggggcactgaaaaaagagcttgtagtttctgtcgggaacaccgattactagctgaaacatcatc

SEQ ID NO: 19239 - DNA, 2239 bp, Oryza sativa
  ref <308>: DATABASE ACCESSION NUMBER: AK069607
  ref <309>: DATABASE ENTRY DATE: 2001-12-06
gaagcgccagacaaattcgtctccctcgttggaagtggaggcgcggaggcggaagcttttcctcctcctctcctctcctctctaccctaggcgcgatctgctcgtccgcctcggcgatccacagggaaggagcagcatgctccacaaagacgcactacagaagactaaagagagctttttcataccaaagaagtacaacaaaagatttgctcctcattttctgaatcctgggactctctagcctgtagaagaagaaaggcaggaatttcagctcaagagaacagatcacaatatttacccacggcactgtctcgcaatatggcaatgaaaaatgttgtccgtttctttttcgtgttaatacatgtgagcagttgtttgggtcgatcagggaaaatgttttctcctggctttgtttcattgtcagagtcattaccgagctggccaattgtgagtgcaggaatatctgtgaccgcttcacttgttttatccttgtttctaatatttgagcatctctgcgcataccatcaacctgaggagcaaaagttcttgattggtctcattctgatggttccagtatatgctgttcaatcattcttctcattactgaactcaaatgttgcatttatatgtgaactgatgcgggactgttatgaggcattcgccatgtattgctttgagagatatctcatagcatgtttaggtggggaggaaagtacaatcagattcatggagggtcgatttcaattcagtgagagttctcctctgctagatgttgattatgattatggtattgtgaagcatcctttcccattaaactggtttatgagaaattggtaccttggtcctgatttttaccatgctgtgaaggttgggattgtgcaatatatgatactgaagcctatttgtgccatcttggcaatttttatgcaacttattgggatctatggggaaggaaaatttgcatggagatacgggtacccatatttggccattgtcctaaatttcagccagacatgggcattatactgtctaatacaattttatactgctaccaaggagaagttggaacctattaagcccctgtctaagtttctaaccttcaaatccattgtatttttgacatggtggcaaggtattgctgttgcatttcttttttcaactgggctttttaaaggacatttggcgcaaagatttcaaacacgtatccaggattacatcatatgccttgagatgggggtggctgcagtggttcatttgaaagtatttccagctaaaccttacagacgtggggagagaagtgttagcaatgttgctgtgatgtctgattatgcatctctgggagcttcagatcctgaagaagaacgagagattgacaatgtagcaatcatgcaagctgctcgtcctgattccagggaccggcgattgagtttccctcagagtgttcgcgatgtcgttttaggaagtggtgaaattatggttgatgatgtcaaatatacagtttcccacgtcgtggagcctgtggagcggagtttttccaagataaaccggacacttcatcaaatctccgaaaacgtcaagcagcttgagaagcaaaagagaaaggctaaggatgatagtgatgttccccttgaaccattttcagaggaattcgcagaagctcatgacaatgttttcggaggtagtgttagcgacagtggattagctaggaaaaagtacaagaacaccaaaagggcaccgtcgtctctgaaaccgttcgagttcagattaggtagatggttccagtagtcagccagttgtggtttattgggttttgtttctgaccaacagggagctaacctcaaatccagcagtttatacaacataggacatactgggggcaaagcgatgacatttccgaaaactaacagttcacaggaggatgatgtgcactggagcttcagtttccttcattaactttcctcttgtgtttatacagctcgtcctggcccttgtcaatttcaggaggcagttactagaattttttttgtcatgagagcagccttgtttagtctagttaactacacttactacaggcaaagaaatattaagccgcggcaaagcaactactactgaatactgatgtaaccctccttaagtttctttgaattaacatgcatagaagggatacatttgtaaactgatgaacaacatgtttcaaatcggtaaagtgataatagcaccaatgtgaagttctgttgtt

SEQ ID NO: 19240 - DNA, 1510 bp, Oryza sativa
  ref <308>: DATABASE ACCESSION NUMBER: AK069608
  ref <309>: DATABASE ENTRY DATE: 2001-12-06
gagcagagcagcgcaaaacagagcagaccaagagcaaggagacgacgacgacgacgacgatgcaatccctcctctcctcctcggtgctcgccaacccatgcaccaccggctccccgctcttcccgccgaccgctgctaagctcgccgccgctgcctcggtcccggtggccgcggcggcgaggagtggcgccattgctgccgtgtcgaggagatcggccagtggcggccggtgcgtggtggcggctgcgtcgtcgtcgtccccggcggtgaccacggcggaggccggcgaggtgcccgcgacgatgaaggcgtgggcgtacgacgattacggggacggcagcgtgctcaagctcaacgacgccgcggcggtgccggacatcgccgacgaccaggtgctggtgcgcgtcgccgccgccgcgctcaaccccgtcgacgccaagcgccgcgccggcaagttcaaggccaccgactcccctctcccgacggtgccggggtacgacgtggccggcgtggtggtgaaggccgggaggaaggtgaaggggctgaaggaaggggacgaggtgtacggcaacatcagcgagaaggcgctggaggggcccaagcagtcggggtcgctggcggagtacaccgccgtggaggagaagctgctggcgctcaagcccaagagcctcggcttcgcgcaggccgccgggctgccgctcgccatcgagaccgcccacgagggcctcgagcgcgccggcttctccgccggcaagtccatcctcatcctcggcggcgccggcggcgtcggctccctcgccatccagctggccaagcacgtgtacggcgcgtccaaggtggcggcgacggcgagcacgcccaagctggagctcctcaagagcctcggcgccgacgtcgccatcgactacaccaaggagaacttcgaggacctgccggacaagtacgacgtcgtcctcgacgccgtcggccagggcgagaaggccgtcaaggtggtgaaggaagggggcagcgtggtggtgctcaccggcgccgtcgtgccgccggggttccggttcgtggtcacctccgacgggtcggtgttggagaagctcaacccatacctggagtccgggaaggtgaagccgctggtggaccccaaggggccattcgccttctcacaggttgtggaggccttctcctacctcgagacagggagagccaccgggaaagttgtcatctcacccattccatgagagcttgacatcaatggcagagcttatgatggtctctcgcacctgagattctgattctgaagtgtgtcagcatagaccaaaatgaagtttatctcatattacagttcatagagttacactgttacacaagttgtatgcactgtgatgaactgctgagcaatgtccacaacccctctctagcaatgtccagttgatttgaacaggcaggtggtgccccgaatgtcccaatgttacatgagttttgctatgtaagggaaggaacatcgatataccgcgcc

SEQ ID NO: 19241 - DNA, 4161 bp, Oryza sativa
  ref <308>: DATABASE ACCESSION NUMBER: AK069609
  ref <309>: DATABASE ENTRY DATE: 2001-12-06
ggagttccacgcgccgccgccgccgcttctcctccagccgccggcggggcctcccttcctacccaagcctccgccgccgttcccatctcctcgtcctccgtgccaccgccggcgcctcttccgctgaatccatctccacctcctcacctattcgctaacgccgcctcccatcctctcttctctccgggctccggctagatccaagtcggcgtcgagatccagggctcgaaaacccctcacctatccaaggatttcagcgacgagggctatggttcactgctgggcattgctgcctgtctttgctgtcgatttgacatagtccttcctaatcttcttcagcatcacgaccacatccttcatttccatcctttgctctggggagtcagccgagcagagcaagcccagctcgaagactggcttaaggaatccatcaatgctactggtagaacaagaggtgtcctgtagaagctggccatcgacaacatggacaagatctataggaaatgcccagtgaacccactgcctgatgctcagatctcccacaaacatggcatctgtgggtctcttcctagtgaacacttcaagtagcatgatcccatagctgaacacatcgctcttccgtgacgcttttccaagaaccccatactctgcacaagaaaattagattaatgacaactgattgcaccacttaattgttgtgaaaagatcaactgggttgagtaagagtacaaaagctactaagtacctggtgccatgtaaccaattgttcctggcatgcttgcagagatcgtagagttatcatcgcctagtaacaacctcgcaatgccaaagtctgccacatgtgccgtcatttcatcatcgaatagcacattactaggcttcaaatcacagtgtacgaccacctcatagtgctcatggtgcaggtattccattgccattgacacatctagcataatatccaacctctcgagaaagcctaactgcatcctttcttccgagtgtaggagtgcttctaagctaccctgaggcatgtactgaagaaccaatgctctgaactccaggttggagcatgtgttcaatatctttatcaagttgcgatgtcgagccattcgaagcacacgacactcagtatcaaagcttctcatggcatgttccagatggttgtgtataacttttatggcaaccaccaaaccgctactcaactggcccttaaaaacttttccgaagcttccagatcccaacatattgtcttcactgaaattatcggtagcgcgaacaagctcatggtaggagagtaattggtggctgatcatgtcaagcataccagaagaaatattttgatgcttaactttctttctaattattccatataggcaacaagttaccgctgcaactactatgattatacccgggagtaaaatatactttagtatgtgtcgatttcttttgggagaggttgtttggcatggagaaaatcctaaacggacaacaccacatagccctgagttccctgccaaggattgcaacgtgatgtttgagaagacacctccttctggtatctgaccttcaagcttattaaaagacagatttaggttagcaaggctggtaaaattggccaggtattttgggatggtaccagaaatgttgttatgggatatatccaaaatttgcaagccagataggttactgaaagagtctggaatggaatcatggaattcattgacagataagttcaggtatcctaacatctgaagatgtccaattgaatcagggaggctaccgacaaagcggttcatatagatatccatgtagttaatttgttttatattgcctatatcaactggcaattcaccactgaagaaattttgagatagatctagcaggatgagcctatcaagatgaaataagctcggtggtactgttgatgataattggttatgacctaatgctaggtgctctaacttggtcaaattactggggtccaattgtaagccagagaacttgttggttccaatgtatattaattcaatattatttagcatgccagtgtttaatgggatggagccagacaagttatttgtctccaagttaaggaatacaagattcctcatcatcatgattgattctggaattttaccatgcagttggtttcccccgagatctagcacctgaatcccagttaaattcgaaatcatagctggaagttcaccggtaaagctgttctcaaatgcagagaatactcgcaacagacttgacagattccctacactgcctgggaggctcccggtgaaatgattcgagtagatgtaaagggtagacagatttatacagttggaaagtatggatagaaagtaaccgatatctccctgtaggttgttttgtgcaatactgagttgcttcaacgagttcatgttaccaattgttgccggtactgagccatccaactggttctctgccaatgaaaggattgtcaatgctgataggttaccaagacaagcaggaatgggacctgttagttgattggttgtaagatccagcactgaaagttggcctagttgtccaatacccacagggatggcccctattaggttgcacatttcaaggcctagtctggttagcatggtgaggttgctaagtgcagcagggattgggccagcatcaaggtgattcctactcaaagaaacatcactgagattcgtcgacttggccagccacgaagggaaaacaccctcaaatagatcgtcaccgacgcgaagaacttggaggtacggacacgctgcgagtcctggtggaatttgaccggtgaatctattatgggagattgagaaccactgcagaaccgggaggctgaaacttgtgttgcccgggatggagccggtcaagctattaaagccaagatcaacaacagttaacctagacatgttgaagatggcttgtggcactggcccagtgagattattgtactgcagctcaagcaactcgagcattggcaaagagccgatgcaacctggtataggtcctgacaggctgttgttgccaatactgagataagctaacaaaggcgtgttgttgaatagactgtccggtatcgagccagtaaggtaattcccaatgagatcaatgctgcgaaggcggcgcaaggcctgtagttctattgggattggaccggatagctggttcgacgggaggtggagtagttgaagcctcatgaggttccctatggtggctgggatgccacctgaaagggcattgtggccaagatcaatgagcttgaggcgatgtagccttcctatatcatccggcaccgagcccgtgaggccggtatcggtgaggttgaggacggagaggaaagaaatgttaccgaggtgaggcccgagctctccttggagaggaatgcccggcagctccagggcggtgacgcgctgccggtggcggctgcacgagacacccacccactggcagaacggtgtgccagcggtccagttgccggcaaggatgttgtcaggatcggagaagtgcactttcaaagccagaagcgcagcgaggtcggtgtcgctgccattgctcttgctcagacctagagaagaagcagaagccacaatggacagagcaatcaacagcgcaacggagatccataccggcaatccaatcgccatgtctgggtgtgtgtgatgcattgacaaggagtgaagtaacttcactggacgaacaagttgtggttttatttagcaactcggtgctttcaacgtctaggacgaagaccttgactgttgctctcagaaagtgcaagaaactgtaacacttttgataattaggaatgctagtaccacagacttgctggaaaataatgtcatcacagactatatattcaaccgatcacagcgtgcacgacaagctagatatgagagctgtctctctctcagccatcagccatacactcactgaaaaataattttctgtcaaacaacttgaaggcaaccttagtctttgtcgattgggtggttagtggcgggccttatcaggaaaaatgtctagtacaaatttagaaactactgttgggtacataatagatgtctgagatttgtccacgtcaccctgactatttttttttactccaaatttgttactcctagacttatctatgcgtaatctttttacttc

SEQ ID NO: 19242 - DNA, 1722 bp, Oryza sativa
  ref <308>: DATABASE ACCESSION NUMBER: AK069610
  ref <309>: DATABASE ENTRY DATE: 2001-12-06
gatctctccactcacaaacaaagcacaagagtaagatggatgttccttctgttgtgatccccattttggttgtgctggtctcgagactcctgacaagcgccctggtgcacctgttgtggaagccctacgccatcaccaagctgttccgtgggcagggcatcacaggccccaaatacaggctcttcgtcgggtccctcccggagatcaagcgcatgaaggccgccgctgccgccgacgaggtcgccgccggcgcccactcccacgacttcatccccatcgtgctgccccagcacagcaaatgggccacagatcacgggaagacgtttctttactggcttggcgctgtgccggccgtcagcctcggcagggtggagcaggtgaagcaggtgctgttggagaggacggggtccttcacgaagaactacatgaacgcgaacctggaggcgctgctgggcaagggcctcatcctggccaacggcgaggattgggagcgccatcgcaaggttgtgcacccagcgttcaaccacgacaagctcaagttcatgtctgtggtcatggcggaaagcgtggagtcgatggtccagcgctggcaatcacagatacagcaagctggaaataaccaggttgaattagacctaagcagagagttgtcagagcttacttctgatgtgatcacccgctcggccttcggtagcagccacgaggagggcaaagaggtctaccaagcacagaaagagctccaagaactggccttctcatcatcattagatgtgccagctctggtttttctaaggaaattaccaatcataagggggaacacacgagctcatcagctcgtcaagaaatcgaggaccatgctcatggagataatcgaaggacggcttgccaaagtcgaagctgccgaagccggctatggcagtgatcttcttggactgatgctggaggcgcgagctctggagagggaagggaacggcctggttctcaccacccaggagatcatagacgagtgcaagaccttcttcttcgcggggcaagacactacctccaaccacctcgtctggacgatgttcctgctgagcagcaacgctcagtggcaagacaagctacgggaggaggtgctgacagtgtgtggagatgcaattccaacgcccgacatggctaacaggctgaaactggttaacatggttctcttggaatcactgaggctgtacagcccagtagtaatcataaggaggattgctggttcagatatcgatcttggcaacctaaaaattcccaagggaactgtgctttccataccgatcgccaagatacaccgggacagggatgtatggggacccgatgccgacgagttcaaccctgcaaggttcaagaatggcgtgtcgagagccgcgagctacccaaacgcgctgctgtccttctcacagggtccaagaggttgcatcggccagaccttcgcgatgctagagtcgcagatcgcgatcgccatgatcctccagaggttcgagtttaggctgtctccatcgtacgttcatgctcccatggaggcgatcaccttgaggcccaggtttggacttcctgttgtcctaaggaatctccagggatgagatggaccgtacgtactattatatattatacagtgtgtcgatctctacggttcgtgccttcattatatatttgcgcaattttcctttatttatcctacggaaaaggtaatgagtg

SEQ ID NO: 19243 - DNA, 1612 bp, Oryza sativa
  ref <308>: DATABASE ACCESSION NUMBER: AK069611
  ref <309>: DATABASE ENTRY DATE: 2001-12-06
gggaagcccatctcgcctcgccgccccccttcatattcaccctccgccgcctcgtcaattccacgcgaacgcgagagctctcggaaagcaccaccaccagcacagagccagcgcgagagagagagagagggagaccaaaccccatcccggatctctcgtcgtcggcggcgtctgcgatggcgctctccgaccgctcccgcgagtcgctcctcccgagcttcctctacacctcctccgccgcgaggtccttcgccaccggcgccacccgcttcccctccccggtgtccccagcttccccggctccgggtgccgtcgggggcggcgcgcccatctcgatccaggctcccagggagaagatcgagatgtactcgccggcgttctacgccgcctgcactgccggtgggatcgccagctgcgggctcacccacatggccgtcacgccgctcgacctcgtcaagtgcaacatgcagattgatccagcaaaatacaagagcataacatctgggtttggcgtcctcttaaaggagcaaggacctagaggcttcttcaggggatgggtgcctaccttgcttggttacagtgctcagggcgcatgcaagtttgggttttatgagttctttaagaagtactactcagatattgctgggcctgagtatgctcagaagtacaagaccctaatttacctcgctggatcagcttctgctgaggtgattgcagatgtggctctctgcccatttgaagctgtgaaggttcgtgtgcaaacccaacctggattcgctcgtggactgagtgatgggctccccaagttcgtcagatctgaaggcgctcttgggctttacaagggaattgttcctctgtggggtcgccaaatcccttatactatgatgaagtttgcctcctttgagaccattgttgaaatgatctacaagcacgctgttcctgttccgaagtctgagtgcagcaagtctttccaattgggtatcagtttcgctggtggttacattgctggagtcttctgtgccattgtctctcatccagctgacaacttggtctctttcttgaacaacgccaagggagctacagtgggtgatgctgttaaaaagcttggtctttggggccttttctctagaggactgccccttcgtattgttatgattggaactcttactggtgctcaatggggtatttatgatgcttttaaagtcatggttggacttccaacaaccggtggtgttacgcccgcgcccggtgcagcagagaaagcattgcaagccagtgcttgattcttatgcagagataatggcgatgtattcctgaagatccatctttgttgtggctggaattgtatcaattacttgagtttagcacctaaatcctaattttagtggatgattcttgtgtcatccttttgatgagaggaactcattaatcaggtgaagtaggtcttttttgcccccgggaaagtttgatgcttgatacataataaatttttggacagcaaggctgttagagctcaggttttggcatcacctgtactgaggaatactcacatctttgtgttccttaaaagcatacataccttgaatcaatgctaccctattttttttgttgc

SEQ ID NO: 19244 - DNA, 2852 bp, Oryza sativa
  ref <308>: DATABASE ACCESSION NUMBER: AK069612
  ref <309>: DATABASE ENTRY DATE: 2001-12-06
agagacagcgtctctcggttcgggcctcagcgggcggtgtgtgtgtgtgcgcctccgcgagaccagacaccaacctctctctctctctctctcccatccttcccctcctcctcctccgcctcgccgccgccgccacacgccgcacggtctctctccccgagtataaatgcaggattaatccgtggtgttgtgactttttgggtggtagattcgtgggcggcaggaagtgcatggggagaaaggatgccagagttgcgtagtggagtccggcaagctcggttggaggcaaagaaggttgaggaccttgcagcacaggacccagctgagaacttggtagtggtggcaccgacggtggcaggaagatgtggtagaggaaggggtgggaggggtggaggtagagcaacaggaagaggaagggcaggaggaagagggcgaggtgttccggtgattgatttggacccggaccaaccttgtgaggttcttccaggagctgctattggcggagtcgctgctggaggcccccatcatatcgaggaacttgctaataaggttgtgaagatggatggtgggagtgctgagaagattggtggaggcgaagatgatgggaatgcatctccagttccggataaggttcaagtaggccattctccgcaatacaaggtagagcggaagttggggaaaggtggttttggacaggtttatgttggcagaagggtttctggtggaactgatcgcactggagctgatgctatcgaggtagctttgaaattcgagcaccgcaacagtaagggttgcaattatggccctccatatgagtggcaagtttatagtgctctgaatggatgttatggtataccctgggttcactacaaaggccggcagggggactattatgttctggtaatggacatactaggacctagtctttgggatgtttggaattctgttgggcagacgatgaccccaagtatggttgcttgcatcgctgtagaggcaatttctatccttgagaaacttcatgcaaaggggttcgttcatggagatgttaaaccagaaaattttctacttggccaacctggatcacctgatgagaagaaactttttttgattgatcttggcttagcatctaaatggaaggaaacgccaaatggacagcatgttgattatgatcaaaggccagacatatttaggggtacaataagatatgctagtgtccatgcccatttaggccgtactggtagcagaagggatgatctggaatcattagcatatacattaatatttcttctcagaggaaggttaccttgggcaaggctaccagggtgagaacaagagttttcttgtttgcaagaagaaaatggctacctctccagaccttttgtgctgtttctgtccccctccttttaaacttttcctggagagcgtgacaaacatgagatttgatgaagaaccaaactacgcaaagcttatttccctttttgatgaattgattgagccccagcatttgaggcctattagaatcgatggtgctctaaaggctggacaaaaacgtggaaggttgcttgtaaatcttgaagaagatgaacaaccaaagaagaaagttcgacttggaagcccagcaaatcagtggatatcagtctataatgctaggagacccatgaaacaaagataccattacaatgtagcagatgccagacttcatcaacacatagagaagggaaatgatgatggattgttcattagctcagtggcatcttcagccaatctttgggcccttattatggacgcgggaactgggttcacatcccaagtttatgaactctcaccaatatttcttcataaggattggattatggagcaatgggagaataattactacatcagtgccatagcgggtgcaacaaatggaagttccttggtggtcatgtcaaaaggaactccttacactcaacagtcttacaaagttagtgaatcgtttcccttcaaatggatcaacaagaaatggaaagaaggatttcatgttacatcaatgaccactgcaggaagccgctggggtgtagttatgtcaaggaattctggattttctgaacaggtagtagaattggattttttatatcctagtgaaggtatccaccggcgttgggagaatagctatagaataacttctacagcagccactggtgaccaagctgcttttatattgagtatacccaagagaaaattgatggacgagacacaagaaactcttagaacatctgcttttccaagcaaccatgtgaaggagaaatgggccaagaatctttacattgcttcgatatgctatggccggacagtatcttgaggcataccctgcacaccaactcgggcttagcatattcgcaactgagttgatgtcgggaaaaccagcaatctagttgctgctctctgttactctgtatgtgtaggtaacattggctaggtaaaccttacatcatggccagagttaggggcgcgagaggaagcagggaggaaggtggatggacagctaataagctgatgaggatgtcatccggctggtggtctggtggaggtggcagaagcggatgccgtcaacatattttgcatcaagatgtgctttgctgcagtccttgctgcggtgcacagcacggatgacccttatagcctctttggaggcctataatctgagagcccgttgtgtatagctcttatcgtgtcctgcgttttgtctggtggaagcgaaattaccatgtttccagaactccggaattgtctctaaattattgtgtgagaatgggtgtactgataaatcggtgtatcgattccattattcgatggtctcattgcattaatgc

SEQ ID NO: 19245 - DNA, 1188 bp, Oryza sativa
  ref <308>: DATABASE ACCESSION NUMBER: AK069613
  ref <309>: DATABASE ENTRY DATE: 2001-12-06
gctctccctctcctcctcctcctcctctcctctctcccgtcacgggcgcatctctctctctctctctctctctctctctctctccccgcacagccgcgccgcgccgccgtcgccttctcgggcgagggcgaagagcgagggctcctgctcgccgccgcccctccccctcgtccgcggcgcgccggaggtcagaagatggagggagctggcagagatgggaaccctcttggcggttaccggattggcaaaaccctagggattgggtcatttggcaaagtgaagatcgcggagcatatattgactggtcacaaggtggcaatcaagatcctcaatcgccgtaagatcaagagcatggagatggaagagaaagttaaaagagaaatcaagatacttagattatttatgcacccacatatcattcgcctttatgaggtgatagacaccccagctgatatttatgttgttatggagtatgtcaaatctggagagttgtttgattacatcgttgagaagggaagactgcaagaggaagaagctcgacgctttttccagcagatcatatctggtgttgaatattgccatagaaacatggtggttcatcgtgatcttaagccagagaaccttcttttggactccaaatgcaatgttaagattgcagactttggcttgagtaatgttatgcgtgatggtcactttctgaagacaagttgtggtagcccaaattatgcagcacctgaggtgatatctggtaaactatatgctggccctgaagttgatgtgtggagttgtggtgttattctttatgctcttctttgtggtacccttccatttgatgacgagaatattcccaacctttttaagaaaataaagggtggcatatatacccttcccagtcatttgtcacctttggcaagggatttgattcccagaatgcttgttgttgatcccatgaagaggatcaccatacgtgaaatccgtgaacatcagtggttcacagttggtcttccgcgttatttagctgtgccacctcatgacactgcacaacaggttaaaaagctcgacgatgaaactctgaatgatgttatcaatatggggtttgacaagaatcagctaatcgaatcacttcacaagagactgcaaaacgaggcgacagttgcctactatttactattggacaataggctgcgc

SEQ ID NO: 19246 - DNA, 1363 bp, Oryza sativa
  ref <308>: DATABASE ACCESSION NUMBER: AK069614
  ref <309>: DATABASE ENTRY DATE: 2001-12-06
ggtgctctgcctctccattattccgactctcgtaagattaaggggggaggaattggagggcagaggccgccattttaatcagtggaaataaaatccacgcattttatatatttaatttaacccccaattttaacttagcagcacactagctagctagctgctaagttaactatttgatcaggttacagttgctggcctgacagttaattaatctcttgctggttgattagttgctatcagctacacgctctcgctagctgccactgtactaatacatactcccatctattcgcctgagaaaatatcgaaaagtagcagcaaagaggagcaggcaagatggtgatgaaccctgacgccgtccgcaatgtcgttggaatcatcggtaacttgatatcgttcgggttgttcttgtcgccattgccgacgttcgtgacgatcgtgaagaagaaggacgtggaggagttcgtgccggatccgtacctggcgacgttcctcaactgcgcgctgtgggtgttctacggcctacccttcatccaccccaacagcatcctcgtcgtcaccatcaacggcaccggactcctcatcgagatcgcctacctcgccatctacttcgcctacgcccccaagcccaagcggtgcaggatgctcggcgtcctcaccgtggagctcgtcttcctcgccgccgtcgccgccggcgtgctcctcggcgcccacacctacgacaagcgctcgctcatcgttggcaccctctgcgtcttcttcggcaccctcatgtacgccgcgccgctcaccatcatgaaacaagtgatcgcgacaaagagcgtggagtacatgcccttcacgttgtcgctggtgagcttcatcaacggcatatgctggacaatatacgcgttcatccgctttgacatcctcatcacgataccgaacggcatggggacgctgctgggcgcggcgcagttgatcctctacttctgctactacgacgggtcgacggccaagaacaagggcgccctcgagctgcccaaggacggcgactcctccgctgtgtagctacatatgctatatatcttgccatgcaaagaaccacaagatcgaagctaacacaaaccatgcagcatatatgcacatcacacatgcagtatcacaacgtacgcatgcttggatctgcacgcaccacgcgcgcgtgcatgtaactgtgacgggttataatcgatctgttggatggatatggatcatggatgcaggcaatgcagctgctcttctgtttggacccactgaattcgcccgtgcatgcaggcagcttctttgtgtgtgtacatatccaactatgcaagaggcaggtatatgtgagcaaaaggccccc

SEQ ID NO: 19247 - DNA, 1508 bp, Oryza sativa
  ref <308>: DATABASE ACCESSION NUMBER: AK069615
  ref <309>: DATABASE ENTRY DATE: 2001-12-06
gcctccttccccggcgccaccgcctcccgccgcctcgcctcgggccgcccgacggcggcggcggcgttccacaccgcggtcaccgcgtcgggctccctctacaacacgtggcagtgccgggtcatgtactactggttcaagcgggcgcgtgaggccggcggcggcggaggcgccgaggtgggcgggttcaccaggatcctccactccgggaagcccgacgcgttcgtcgacgagatccccaccttcgtcgccgacccgctccccgctggcacggatcagggatacgttgttctcaatagaccttgggcatttgttcagtggcttcaaaaggcagacatacaagaagaatatatcttgatggcagaaccagatcatcttattgtcaaacctataccgaatttatcaagggatggtcgttcagcagctttccctttcttctacattgagcccaaaaaatatgaaaatgtgctgcgtaagttcttccctgaacatgaaggaccaataaccaaaattgatcctattggaaattcccctgtcatcgcaagaaaggaatctcttgcaagaattgctccaacttggatgaatatttcaatagcaatgaagaaagatcctgaaacagataaagcttttggctgggttcttgaaatgtatgcttatgccgtagcatccgctctccatggagtgggtaacatcttacataaggaatttatgattcagccaccatgggacttggaaattggtgatgcatttatcatacattatacttatgggtgtgactatgatatgaagggtaaactcacttatggcaaaattggagaatggagatttgacaaaagatcctatgatagtaaacctcctcctagaaatttgccattgcctccaaatggtgtacctcaaagcgtggtgacacttgtgaaaatggttaatgaagcaacagccaacatacccaactgggattcttatgcagctgcatagctgattcaccttgttacaatctgatggttggttcgtcaattgtgtgggcttaattttccaagcaaagttaatgcatgataactggccaagcctagaagtgggtggatgacaaagcgggatgcatatagctgtacaagttagtccagggccattgacaccattcaattctgcttgaattttccagcagacagaaaccaagttagtgcaaagcaaccccttctttaactgaaagtctgaaacacacaaactacgatcaataaactcagtgtttattgcaatgtaagtgagtgatgagttagaactggtgagttctggttcggagcctgaatcctgacttcattctgattttctccttcagtgaagtcaagcatagattgatctttatacgagacaagtagaaaatcaaacactgtagttgctttttttttcccaattggagtcacctgtgccaactgccaatgcataattaggtttgatgaatattgtaactgtgtctcttttattctctaaataaaaaggaatatagcttcttt

SEQ ID NO: 19248 - DNA, 799 bp, Oryza sativa
  ref <308>: DATABASE ACCESSION NUMBER: AK069616
  ref <309>: DATABASE ENTRY DATE: 2001-12-06
ggtcttcctcgtgacctcgtcaagtcctcagctctcgtttggcatccaaagaagaattaggtgttattactagggtttagagaggtgttgattactagggtttagagagggaaaggaagggaagggctatggcggcgccgtggtgggactcggagtacaaggaccgctcctcgctggagtaccgcgtgtacgtcggcaacctgccctactccgtcgacgagcaaaccctcatggactacttcgccgactacggcgccatcagtgccgagatcgcttgggacagtgagatggggaggccacgcgggttcgggttcgtcaacttcgaggacaacgagtcggtgaacgccgccatccacggcatgaacggccaggacatcggcggccgcaaggtcaccgtcgcgcgggcccagatgcgcccccgccgctggagggcgtgaccgcgccgccggcggacggccggccggcggcgaggaggtcgacctggatgagcggagaagactctacctacctacctaccctaagctatctatgctgcagatctactagctagttttagtcattcgtcgtgttggtagtttggttaattagggtttaagcggtggatgcttaattaattaatcagtctctgttggtaatctcctggatatgcaagcttagggccttattaggatatgttgtttaattaggtgtgtgtttatgcttgtaatcatcaattgcagtctgcactctgcagcacgtacctgagtgtgtgtaagtttgatggctagcgtttatgttaagaatgactctatctgctgcc

SEQ ID NO: 19249 - DNA, 2181 bp, Oryza sativa
  ref <308>: DATABASE ACCESSION NUMBER: AK069617
  ref <309>: DATABASE ENTRY DATE: 2001-12-06
ggcttctagagcctcctcgcgtcttctcctctctcatcaaatcccctcgccctcctctctttcctcctccccaagaaaaaaaaaggcttcatagctcaacctcctcgccgccgccgctcacctcccctcccctcccatccctcctcctccctagccccaggtcgctgctcggctccgccatgtaccgcgcggccgccagcctcgcctccaaggctcggcaagccgggagcagcgctcgccaggttggaagcaggcttgccttgagcaggaactatgctgccaaggatatcaagtttggagttgaggcccgtgctttgatgctgaggggtgttgaggagttggcagatgcagtcaaagtgacaatgggtcctaagggacgcaatgtggttattgagcagagctatggttcaccgaaagtcacaaaggacggtgtgactgttgccaagagcattgagttcaaggatagagtcaagaatgttggtgcaagccttgtaaagcaggttgctaatgcgaccaatgatactgctggagatggtaccacttgtgctactgtattgactaaagcaatatttactgaggggtgcaagtctgttgctgctggcatgaatgcaatggatttaaggcgtggtatttcaatggctgttgatgctgttgtaactaacctaaagggcatggctagaatgatcagcacatcagaggaaatagctcaggtgggcacaatatcagcaaatggggaaagggaaattggtgagcttattgcaaaggctatggagaaggttggcaaggagggtgtaatcaccattgcggatggtaacaccctttacaatgagcttgaagttgtggaaggcatgaaacttgacagaggctacatctctccttactttgttaccaacccaaagacccagaaatgtgaactggatgaccccttgatcctgatacatgacaagaaggtttcgaacctgcatgcagtagttaaagtcttggagttggctctgaagaagcaaaggcctctgctgattgttgctgaagatgtagagagcgaggcattgggtactctgattattaacaagcttcgtgcaggcatcaaggtctgtgctgttaaagctcctgggtttggggagaacaggaaagcaaacttacaggaccttgcgatccttactggaggagaagtcataactgaagagctaggaatgaatcttgagaagttcgagcctcagatgttgggtacatgcaagaaggtaactgtatctaaggacgacactgttattcttgatggagctggagacaagaaatccattgaagagagggctgagcagattagatctgcaattgagctaagcacttctgattatgacaaggaaaagctacaggagcggttggcaaagctctccggaggtgttgctgttctaaagatcggaggagccagtgaagctgaagttggtgagaagaaggatagagtgacagatgcattgaatgccactaaagctgctgtggaagagggtattgtaccaggtggaggtgttgcacttctttatgcatcaaaggagctggataaattgccgactgctaactttgatcaaaagattggtgtacaaatcattcagaatgctttgaagacaccggtgcacactattgcttccaacgcaggtgtagaaggggctgttgttgtcggtaagcttttggaacaagataacaccgaccttggctatgatgcggctaaaggtgaatatgtggacatggtgaaggctggtatcattgacccactaaaagtgatcagaactgccttggtggatgctgcaagcgtatcatctctgatgacaaccacggaatccatcatcgtagagatcccaaaggaagagaaggaggcgccagcgatgggaggcatgggtggaatggattactaatcaacacccattaaagtaaactaaaaacatactcctgggatttaggattttttttgcggtgcaagttcatcgtcgatgtattttttgttcttgttgatgaggtggttgtcagacaattttgattccactggcggtaggacgggttggaacgaataaaattttagttcagagctaggagttcttgagagctgaggactgcacttcgatcaaaattgaatctgacaccttgtgccggaacatttttatgagctgatctgaaagattacgccttttggcc

SEQ ID NO: 19250 - DNA, 1705 bp, Oryza sativa
  ref <308>: DATABASE ACCESSION NUMBER: AK069618
  ref <309>: DATABASE ENTRY DATE: 2001-12-06
gggttggtagttaaaaaggagcacacacacaactcttgcaaatgtcagggggaggaggagcttttcctctcctccatactatcttctgttggagaacagcagcaagcagaaaagggaccagggaatcaaaggcttcctgtatagatctttggaggaaagatcctttctttctgcaggaattcagggcattgctggtgtcctcttcagttgtgctaaatctgtgacgagtatgcgccgcgtccgggtctcatcccaccaatctccagtccacaagcttggtgattcacagatgaaattgacacccaaattccggcttgccacaacctccgcattgccgtcgtcgatgccggcctctgatttggagcaagcctcatgggagacacccctcatacctggccttcctgatgatgctgctctcaactgtctcctccggctacctgttgagacccatgaggcatgcaggcttgtgtgtcgccggtggcatcacctcctagctgacaaggcgcggttcttcatgcagaggaaggtgatgggttttcggtcaccgttgttgttcaccctggctttccaccgttgcactggtaagatacagtggaaggtgctggacctgaactacttgacctggcatacaattcctgccatgccgtgtcgggatcgggcttgcccccgaggtttcggttgcgttgctatccccagtgacggcaccctccttgtttgcggcgggttggtctcggacatggattgcccattgcacttggtccttaagtatgatgtttataagaaccgatggaccgtgatgactcgaatgcttgctgcacggtctttctttgcgggtggcgtcattgatggacgggtttatgtagctggaggttatagtactgaccagtttgagctcaattcagcagaggttcttgatccggttaagggtgtgtggcaaccagttgctagtatgggcatgaacatggcatcctcggattctgctgtcatcagtggtaggctttatgtcactgaaggctgtgcatggcctttcttctcctcgccgagaggtcaggttatgatccaaagattgaccgctgggaggttatgccagttggaatgcgtgaagggtggaccggtttaagtgttgtcatcgacaaacatttgttcgtcatttcagaatatgagaggatgaaggttaaagtctacgatccagaaacggactcatgggactctgtaaaaggccctcctatgcctgaacgaattatgaagccattttcggtgagttgtttggagaataagattgttgttgttggccgaggcctccatgtagctattggccatgtcaagaagcaacctggcagccatcctgatagtaggagctcaagctacttaattcagtggcaagatgtgtgtgttcctagggaatttggtgatctgacaccttcaaacagtcagattttgtatgcttaactgctgaaaatgccggatctgcagagaggccattgttgttctttcattttatttggccaactgggtaaagccctattctgagctgtaaaattgttctcctctgtatgttagtctctttcccagttaattttacagcctgtaagtgttatgtcagtaaataaataaaaaaattcaagagattgttgtaagtagaagtttgccggtacttgagacaatttgttgtatttgctctttaaactgattttgacttcttgtt

SEQ ID NO: 19251 - DNA, 1911 bp, Oryza sativa
  ref <308>: DATABASE ACCESSION NUMBER: AK069619
  ref <309>: DATABASE ENTRY DATE: 2001-12-06
gcctctccctttcttttccatttcctcctctcctcttcccccctttggcttggggcttggcttggcgcctcctccaatcgagcaggtttccccaaatcttagggttagggtttcgtctattcgttgccttcctcgccggattagcgcgtccagggagggtgagcggggtgtgcttggtcgcgtcgcgtcgtgccgtgccgtgccgcgcgtgggatgatgggcaccgccgtggagctcggccggaggcacggcggcgaccaccgcttctacgacgcatccagggtccggcgagggtaccaccaccacgggctccccaaggcgaggtgggcccccgccgtccaccaggagaaggcggccgaggagccgtccccgtcgccggcgagggcgccggtcccgccccccggcgtcgcgggcaaccttgagcggttcgtggccgccgtgacgccgttcgtgcctgctcagttcccctccaagatgcagagagccgcgagggggtggcggggctgcggcgtggatgccgagcgggaggaggccccgcacttcttcctcagagacgtgtgggaggcgtacagggagtggagtgcgtacggtgccggtgtgccgcttgtcctcgatggctgcgacggggtcgtgcagtattacgtgccgtacttgtccgccatccagctctatggagaccccgcagtcctgcgactgtcttctggccctagacatataatggatgacagtgatggggagtatcatgattccagcagtgatgcaagtagtgattatgaacttggaagagtaaaacatctaactcaggaaggcttctcaagtgatgatggtgaatcaggagatttgcatggccgcttgctctttcaataccttgagtttgattctccattttgtcgtgaaccattgactgataagatttccagtctttcagcaagatttccaggactgaggacccttagaagctgtgatttatcaccgcgaagttggatatctgttgcttggtatccaatttaccgtatccctactggcccaacattaaaagatttggatgcatgctttctcaccttccatcggctatcaactgggccagaagaagataacggtggtgctgtaaaatactggggtcctggtagcaaaccgactataccactatctgtttttggtatggcttcttacaagttcagcaattcaatatggtcttcgactgatggagatcggcagctggcaagcttcttgcagcaagctgcttctgactggctgcgggatagtcgtaccagccatccagactaccagttttttgcttcccgtggtgcatacaacaggtagtggcacggagtctacgccttggcagaatttgcagcagaatgtctggaaggtttcagctgtaaatacaccgaagggggaggtgaatggctgatagctttcacacatgcatgcggagagacggtgtgagctcccatagtaggatgcaagcagtgttctgctttgtaaatggcggtaataggggagggtttgatcggctgtgtttttatgcttaatagtcggtgatcctcctgagggaagttgagatgaaaagtgaaaaaaaaagcaaaaaaggactgaagaaaaaggcagtaaaaagattagctgtgcttgtttgttgagctatgcatgcatgtcgggttgttggacttgttgaggctacttatgtaatcctacgaatacgggggatgagttttgatgatattccccttaatgtctgtaaacacttgtgaagagcctgtctgacactacagactgttgtgtttgaagggaacttgtagttagcaaattagagtcatccgcatcgtttgttctatagaatataatgttgatactaatcatgtctagacttgcaatgcacaaattaagagctgctgatgcgtgtaaacagtc

SEQ ID NO: 19252 - DNA, 2150 bp, Oryza sativa
  ref <308>: DATABASE ACCESSION NUMBER: AK069620
  ref <309>: DATABASE ENTRY DATE: 2001-12-06
gatttcttttttcccatggtaggatacttccacccagcttccctcctctcacccttatataaagttcttgctgctgtgactctgctttgcttgcttcttcacccaactaccaccacctctgtgttttcctgcactctccttgctagtggtgtgactgtgaaggtggcggagcctgcatggaagggctgacgagcgagcagatggtggcgttccaggaggcgttcttgctcttcgacaagaacggcgatggttagtttcaactctcctcttgccttccttccttttggtttcagcgtttgctgagattgttgttcgtttgcatttcttggttatagctgtgatgattttggaagcaatgttaggagtttcagagtaattggtcttggggaatcttgttttgttgtttatgtcaactgttgatgataggaggatagagcatggagggagaaaagtaaagggttcttgtctgaactgttcaacttgtcgcttagaactttctattgcatcctacttgctgagacatttttttcctcgaaaactcctcggtgtaaagaaggctgaccttatctgaatcgttactttttttcaataatgatctaaatcatttagatggttcaggaattttttatatatatgtattacatcttgttttaatttgtgtgctggagctgtagatggaattggaatttctgtgttcttaggaaacgtttccctgaagtttctacgctgcccaatgacagggatttgcttgctgcacgactagtttgagagcttcctttggtcaaagaatcattcagtttgtgacagaaaggtgcttgttattggctcactcgttttcttgactagtgagggccctttaatctttgcaatgtgtaacctacctaatttgtttagaaaaagttgttgagacatgcttatctagtggtcaagttccttaagtaatccgtaatatgtcctccaaaactgcttttctgatatttgtgctaccactacttgccattaactctatgatatacacatagttattattaaatagtagttaaaccattcattggcccttgacgtctctatcttggtcaatgattctgaccgtgttttgcacatggtgtggtcttggtcttcgttttggatatgcacaaaaacctactatgtgctagtaagcaaatagcaatagcattggaggcatgttttcacggctattatcttcagttacacaacaatgaaatcctgctaatatttacagccttcaggtctatgcgtctatgatatcctaattgacatttgatattggaacctttgtcatatatgtaggatgcatcaccttggaagagctggctgcggtgactcgttctcttggccttgagccgaccgatcaggagctcaacgacatgatgagggaagttgatacagatggcaatgggatcatagattttcaggagttcctgagcctcattgccaggaagatgaaggtgaagcttgaactttgatggatactttaatttgatgatctacagtatctgtttcccctttgccaaactagatttccaatatctgtctctgcaattgcattccatgcgtatcgcaggatggggatggcgacgaagagctgaaagaagctttcgaggtcctagacaaggatcagaatggttttatctccccaactgaggtggtttagtacctcaagcagttcagaccattaattttcaagctgttatccatcatttctgaccatgttcttgttcatgtgtgcagctgaggacagtgatgaccaatcttggggagaagatgacagacgaggaggttgagcagatgataagggaggcggataccgatggcgacgggcaggtgaactacgatgaatttgtgataatgatgaaaaacgctgaacggaagatatctgggtgaaaagatgccgttcatagatcataagtgtgaaccactgatccccaaatttgggagcatcttttccactgtaaattccattctctcaattactgtatttgaaccacaaaatttggacttcagctatgggtaattgcagcttgtaagattgtgatttaaaactatactaaggttgtggttttatttcaaaagttgttcgcttttgcgaactatgtattagaaattgacatatacttagaagggcgtct

SEQ ID NO: 19253 - DNA, 2263 bp, Oryza sativa
  ref <308>: DATABASE ACCESSION NUMBER: AK069621
  ref <309>: DATABASE ENTRY DATE: 2001-12-06
gggcttcgtcttggatttgcttactcttcgagaagcttctagaacataaaggacctaggcagggagcccaatctaccgtgccaagtcttccactcctgcttcttcccaccagccggcggcaccggcaagagttggccgccggccgccgcgtcggggaaggaggcggcgccatttgctaaccactccgccctggcctcaaatccaagatccacagatttggtgctcgccacctgttcgacgtaatgccgcacccgcgaccgcgaggcgggggtgatcggcttggcgccctcccggacgaggccctgcagcacgtgctgcccttcttgccgttgccggaggccgtgcggaccggcgcgctcgcgaggcgctggcgccacctgtggaagtccatgcccgtcctgcgcattaccggcgaggggagggtgctcaaccggagcggcgtcaggaggctgaacagattcgtgaaccacctgctgctcctccgtgaccgcagcgcgcgtctggatgcgtgtgagataaacctcggtacgttccggagccaggatgatccacaaattaacctgtggattcgccacgtgctgctgtgtgaagctcgagaccttcgggttcatctaagcattgataacaacagctttgaaatggaaaacctggcattagtctcccggcatttgacaagattggagctttccaatgtggtgctaaaagaccacttcctcaatttctcgagctgcccagcacttgaggaactagtgacgaggaattgccatattgaagctgaagagatcttgtctgaatccctgaaatggctgaccgcagttgactgtgtattttcttcctatccccggactcgaatttcactcccaagtcttgtcgcactggagctaactgagccttgggggagcactcctgttctggaaagtatgccatctttattaacggcatctataaaactcactgactgtgatgaccattgtggtaaagaagaatttgggggttcatgcgacgataatgcctgtgataattgtggtgctaatggggggagcagcggagattgcgtgctacttgatggtttatcagaggctaaaagcttggagctgatagctaaacctagagtgttcatattcagaagtgatttgatgtggtgtccaacatttggtaagttgaagacgttgttactcaatgagtggtctgtggcaattgatcttgttgagctgatatgctttctgcaacatacacctgttctagagaagctgactcttcaactttgcgagggacctgtcaattggatggaaaatgaagggagctacgacccaacagaaaatccgtttgcatctaagcaacttaaggtagttgaagtcaagtttgaaaagtttgatctgagagttcacaaaattataatgatcttcagtacctatggcgtaaatattgagcaaatctatatccagcgaagtgtggtacattctgaagagcctacggatgattcaggtgctggaccttctcgggttcggacaccgccaatttccacgtcggagaatgctcaattgaaaatcacgattgatcaaatgttaggtcagcaacaggagttactggcacagcaacagcaacagcagcatttcctatcccagttgcagcggcggcagcagatcctctgtgatatcacagcccagctttcgaaatatgctgctcctcccatttctcagaggcctccacaagctaatctttatccttcaggatttatgtttcgttctttagctgaatgtacatgctgagttgttgacagtggggacggaggctccgtggggacaaattccccgcacggaggatggggatgggaacaaatgttgccccgttgtatttcacgggggcagcgacgggggaattttggctccatggaggcgggtctgatgtagtatcctctgacggggaattccccgttgccatccctaatccagataataaaggccgtggcatgcttgattgcattggactccaattggatttggttacacactgtagagtatattgtccgcacgtataaaaaataataacataggacattttttcatgttgtattctatcagtcacgtccggtgatgtgttaatcagggtttattacgatgatgctcttgtgtagtattgtgacaatggggcagttttaaccgtctatgcatatgtcgctattagttttaattcaccagaacaattgattatgtatgatgtctacgttggttacataatatgtttggtgttgatcctacggtcc

SEQ ID NO: 19254 - DNA, 2023 bp, Oryza sativa
  ref <308>: DATABASE ACCESSION NUMBER: AK069622
  ref <309>: DATABASE ENTRY DATE: 2001-12-06
atcttccccgttccttcccttggcgtaagagaacgagaaatctcccatctctcagtcgtctcccccgcttccttgcgccaagacgagtcgcggctgagcaggagaggggcgccgatctccatccggcgagcagagcaggggaggggatcctggtatagattgttgattgcttgtgcgtgaacacaactaaagcagtaattcttaccgtgtcagcgtgatctgggactgtggccaattgtaccataagtggaaacacagctgcgaagattgtcggtggtcttcgctgataatatattgggcaggctaagtttcaagttcagtttgctgaattcagcgagcctagatgtcgtttcgcagcattgttcgtgatgttagggatagttttggtagcctgtcgaggcgaagctttgaggtcaccctggctggtctatcggggcttaccggccaccatagaggcaagtctcagagtacggttcacgagctctgtgatgcagatctcataatccaggagagtcgttgggctagcctccatcctgagctcctacgcgatgtgatccggaggctggaggctagtgagagcacctggccgtcacgcaaggatgtcgtgtcctgtgctgccgtctgtaaggcatggagggagatgtgtaaagagattgtgctgagcccggagttttgcgggaagcttaccttcccgctctctctaaagcagcctggccctcgagatggaatgattcaatgtttcataaagcgggataaatctaaatcaacttatcatctctacttgtgcctgagtactgctgtacttgcggatagtggcaagttcctcttgtccgctaaaaggcaccgcaaaacaacctgcacagaatatgttatctcaatggatgcagacaacatttcaagatcaagcagcacctatattggaaaactaaggtcaaacttccttggcacaaaatttataatctatgacacacagccctcttataatggggctgtaatccctcctgttggacggagcagccgaagattcaactccaagaaagtgtctcctaagatgccgtctggtagttataacatagctcaggtgacatatgagcttaatgttcttggcaccaggggccctaggcggatgcactgtgtcatgcactccatacctgcctcctcagtcgagcctggtggcattgtccctggccagcccgagcagattgttccccgagctttcgaggagtcatttcgcagcaccacctccttttctaagtcatccatcatggatcggtccatggatttcagtagttcccgtgatttcagcagtgctcgcttttcagacattgctggaggcaccataaatggtgatgaagaggggcaaaataaggagaggccactagtgcttcgcaacaaggcccctaggtggcatgagcagctccaatgctggtgccttaatttccgtgggcgtgtaaccattgcgtcggtaaagaatttccagttgattgctgcaccagcacagcctcccgcaggggctccaactccgtcacaacctgctccaccagagcaggacaagattattctacagtttggtaaggtagcaaaagatatgttcacaatggattaccgctatccgctctcagctttccaggcatttgcaatatgtttaagtagcttcgacacaaaactggcctgcgaatgagggaaacagtgagctctaatggaggcagaactggaaatgcaacagagagcaacttgagaaatgtaatgcccaagggctctagatcatgtttgcattttgttgtgtcgtcttggctgtatttctgcttgtagcctggaactggatttctcagcctgtatgtttcacctggtagcaccatgataggtttcctttgggacagcggttcatgcattgcatttttccatttgtgtggtgtacatgcggttccggatttaagctgaaaggatccgttcatgtctttgttaagctttgcatggatgccgtgttctggtaaagaaaagggaaagattcagtgcttcacct

SEQ ID NO: 19255 - DNA, 2145 bp, Oryza sativa
  ref <308>: DATABASE ACCESSION NUMBER: AK069623
  ref <309>: DATABASE ENTRY DATE: 2001-12-06
gaggttcaggagaactcgcggcattgctgcgatcgtgagttcgtgacaccggacggaggcgcgcacttgatcggcgctcccatctccaggtcgaattcgattccgccgcggcgaaccaagcgcatgcatgtgtgaatcttcaccgtctttgcatcatggccagatgcagccgtcgccgtcatcacctcgggcaccgccgccgacggcggcgcaggcgtcggggtacaagcacttctgcagagtctgcaacaaggggttcacgtgcggaagcgccctaggcgggcacatgagggcccacggcgtcggcgacggcgatgggttgggtgccgatgatgacgacgacgacgacgacgattcgctcggcgatgaggccgtgcggcgtgcgcgcggcggggcagatgatccttggaacgcgggcggcccgtcgtcgtcaggggcagcgacacacgtctacgagctccgcaccaatcctaaccgggtcacgaggagccgccaggtgtgcaagaactgcgggaaggagttcacgtcgtgggagcatttcctcgagcacggcaagtgcagctccggcgaggacgacgacgacgaggacgacgtggatcactcgctgcaaccgtggtcgccttcgcccgaggccgacggcgaagaggattctgcaccggccgccggttggttgaaagggaagcgctcgcgtcgctgcaagggcacaggagtcgatttgtcaccgacaccctcagcgtgcgctgccggcgaggaggaggacctggccaattgcctggtcatgctctcgtcgtccaaggtagatcaggcaggcgtcactgaagcagaacaacggtcatcttcttccgcgagtaaggaacataagagactgatcacgttcatggagccgacgacgtatgtactggatacagtgatggcgcttcccccgccggcgccggcgccacagtatgtctcgaccgtgcctcgaggcatgttcgagtgcaaggcgtgcaagaaggttttctcttctcaccaagctctcggcgggcaccgtgccagccacaagaaggtgaagggctgcttcgctgccaagctggagagcaacgccgcagaggtggctgagccatcacaccatgcagaggtcgctgatcggagcgaggacaatcccgccaaggccacttctgatgccaggaggaacgtgcacgcaagcatcgacggtgatggaaacgccggcacgagcgatgccgcggcagaactgtcgatggccatcgtgcccatagaaccgccggtcgccgcgctcgccgctgcaccgttgaagaagaagggcaagatgcacgaatgctcggtttgccatcgactgttcacctccgggcaggcgcttggaggccacaaacggtgccactggctgacgtcaagttcggcggatcacaccgcctcagtcccacccctagccgacgaccttgtcccgctctcgttccggccaatgttggacgcaccggagcccgctctcgacctcagcatcgcggcgaacccgccactgctggcctcggccgcaacagtccgtccgaaggtcggcggcagctcgtttcatctcgacgcgccaccaccggtatacatcccatcgtcgccggcgatacccagccaacggaacaaggctaccgcgacaaccggcagccagaacgccaacgacgcggtcgggttaagcaccgccgcagcagaggacgaggcggacagcaccaccgtcaagagagcgaggcttagcgatctcaaggacgtgagcatggcaggggagacgacaccgtggctgcaagtcggcattggctcctcgtctcgcgggggtgctgatgataacgacaaggagtgattgatctgcgaattgatcagtacatacatatatactgttacattatttccatgcgtttgcaattgcatatatgttgttcgcatgagcatataagtatttgccttcttttttgtgactttttcttttcttttagacttgtaggtttttttttcttctcaagatagtgagtatgttttacaaagaggtaacatatgaatttgggaagaggcagtagacttgtaggatttttttttcttctgaagagaagcaagtagtgagtattttttcacaagaggtaatgtattaatctgtcaagctgcgtgatc

SEQ ID NO: 19256 - DNA, 2239 bp, Oryza sativa
  ref <308>: DATABASE ACCESSION NUMBER: AK069624
  ref <309>: DATABASE ENTRY DATE: 2001-12-06
gtcctcctcctcctttccctccctccgcctccccccacctcgcgtctcgcggagcccggagagcagcggcgccgcccatggagtcgctcgcgctcctccacgccaagcccggcggcctccctccccgcgcggggctccgcctcccgctcccgcgcgcgcgatccgcgcgcgtctccctcccctcctccccggcggcccccgtatcgctccagtccccgctcctcctcgcttcgagaagcggccctacctcgcgggacgccgtcgtggggttgggattggggtgcgggctcttgagacggaggagcggcgctagtggtggtggtggtggtggggtctcttgcggcgcgcagcctgccgcggcggcggcggcgggggcggtgccggcggcgcagccggaggggaagaagttcctcggcgtggaggtgaagacgctgaagaagatcgtgccgctcgggttgatgttcttctgcatcttgttcaactacacgatcctgcgggacaccaaggacgtgctggtggtgaccgccaaggggagcagcgcggagatcatcccgttcctcaagacgtgggtcaacctgcccatggccatcggcttcatgctcctctacaccaagctctccaatgtgctctccagggaggcgctcttctacaccgtcatcttccccttcatcgccttcttcggcgcctttgccttcgtgctctaccctctcaggaatgtgatccaccccaccgcgctcgccgacaagctccttgcggcgctcggcccgagctttcttggccccgtcgccattctgaggatttggagcttttgcttgttctatgtcatggccgaactgtggggcagcgtcgtcatctcggtcctcttctggggcttcgctaaccagattactacagttgaggaagcaaaagaattctaccctctatttggtcttggggctaatattgcgctcatcttttctgggcgtactgtgaagtatttctcaaatctgcgcaagacattgggtccaggtattgacggatgggaggtgtctttgaaaggaatgatgagcttagtggtgcttcttggacttgtcatcacttccatctattggggggtgaacaagtttgttttgaatgatccttctcttccgaagtctgaccgtaagaagaaaaaggataaacctaagcttggaatgaaagagagtcttaaagttctcctctcctcaagatatgtaagggaccttgctactttagtggttgcatatggcatcagtatcaaccttgtggaggtcacatggaaatcgaagctcaaggcacagttccctagtccaaatgagtattcatctttcatgggtgatttctcaaccgctactggcattgctactttcacaatgatgctgttaggccggatcatactccgaaaattcggctggggagtggctgcaatgatcacccccacagttttgttgctgactggcgtcggtttcttctccctgattctatttgggcagcctctcactcctatgcttgccacaatgggcatgacccctcttcttgcagcagtttatgtgggtgcacttcagaacatattcagcaagagtgcaaagtatagtttatttgatccatgcaaagaaatggcctacattcctttgggtgaagatatgaaggtgaagggaaaggcagccattgatgttgtctgcaacccattggggaagtctggtggagctcttattcaacagttcatgatccttacatttggctctttagctaactccaccccctaccttggtggcatactgttggtgattgttctagcatggctaggcgcggcaagttcactagacaagcaattctctagcttggctaaggaagatctcaaaagggatatgtctgcaaaagagaaggtagatccttccctgctcaaggctcctgaggctgatgtattggtggagcacacaaacggcactatagagagcgaagctactgcaactgagagttcaccatcaaactcatctccaagtaattagattcatctttctttgacaaagtcaatcgataggtaggagaatgattgcagtgggtagaaataatggtgatgaaacaattcacggtttctcaagtttgtaacagtgcgcagaatcaagctgcctgtttattttgtttgtaacgtatgcaaattttgacaagtgcactgaacgccattgtggaaattcaaccgttctggcagggagaatgaatgaataggtttcccacgccttgc

SEQ ID NO: 19257 - DNA, 1944 bp, Oryza sativa
  ref <308>: DATABASE ACCESSION NUMBER: AK069625
  ref <309>: DATABASE ENTRY DATE: 2001-12-06
gtctcttccctcttcagtcttcgctcagactcctcgccatttgagccatcttccgttgagacgtattcgaatccgggaacggaggttggaggttactgagaaccagttcgacgaggaggcgcgcgcagcctgttcggcggaatgctcgggaggaacgccatgctcgggccgccgcgccgtggcgagggggagacgtcccggcgtggagagggaagcgaaggcgacggcaatggcgagggcgacgcggttgaccggctcagcgccctctcggacggggtgctgcaccacatcatgtcgttcctcaaggcctgggaggtggtgcgcacctgcgtgctctcgcgtcgctggcgccacacctgggcgtccgcgccctgcatcgacctccgcgtccggtacaatgacgttgacagcgagccgccggaggagctgcgcgatttcgtgaaccgcctcttccgccgtagggaggcgtcagcgccggtggacacgctccgcctgcagtccagcgacccggacgagttgtttgacaacgacgatgccaacgcgtggatccggactgccatcaaccgcaatgctcgattcattcatctcactggacaccgtacagagatcggggtgttaaagcacagggccttggtctctacccacctcaagatcttgaagctgtcctatgtcctgatcgatgacaagatcctcaagcagctttcttcagggtgcaaatctttggaagaactggatcttaaggactgcgcgatgaccggccatgagatctcatctgcttctttgaagattttgaagatggataagtgcaagattaatgtggacttatcaatcactgctccaaacctcgtattgctgaatctgatcacaccttacatccaagttccatcgttcaagaacttggagtcgctggtgtcatgctctgtcatacttgatgactttttcttgggtgatgcttatgaacacagtagtgatgaagatgatattgatgaaaccactgatgaagatgatattgatgatcagaagaagacttacaagacagggtatggatttggtttccctcaaaaaggatatgggcttgctggtaacaaggatgattatggctatggtagtgatattgagagtgatgacaatacctatgaatatagtgagattgcaaaagagtatggagatcagcagtatgcccagaattccagtaccattgttcagggagttgggacaagtcagcagactaaaactatttctggtggccataattttcttcacggcctttcaaatgctagaagtttggagctgttagctggtgctggagaggtggttctttctagggagttgaaaagctgcccaatttttagcaacttgaagaccttgtcccttggtgaatggtgtatggctgctgaattcgatacattaatcttcttgctacagcgttcacctaatttgcagaggcttttccttaaacttaaattgaacttcaatactaggaagccgttggagagcggtgctaaacctatgggaagatcatttacttgtaaagacctgcaaatggtgaagatcagatgctctaaggatgatgtaagagtgcacacactggcatgtttgttcagagcgaacggtattcccattgagaagatttatgtccgtcggactgggagttcttacctccgtggcgagaagtttatgagagacctaggcaaacatgaactggagttctgggggtcagattcagagttctgtggtccaaattccgagttctgtggttcagattcagagtttgaggattcagatatggagttctgatgcaacattggactagctatcgtttatcatatcttctactcatattattagttattatctttggattgcaaccatctctaattaatgtactacttagaaaatgctctgacggcaagaacccattaagtaccgagttgcagggccgtg

SEQ ID NO: 19258 - DNA, 1396 bp, Oryza sativa
  ref <308>: DATABASE ACCESSION NUMBER: AK069626
  ref <309>: DATABASE ENTRY DATE: 2001-12-06
aaaaacattcagcatatctcttgctatcttgcaattgcaaattagttatactcgtagctactgcgcgcgcactaattgactacacaagcaaatatgggttctccttctgccaagtacttgctgtttagccttgcaatcctgctggtcctgagtagccagcagcaagctctgctgccttcggcattcgcccgccagttggttccgatgcccacgaacactgccgccggtaagaataacatcagtgttaattaccagttccatctgtatatgttttgtgaaatatcatgtggagaaactaaccactacatctctttgaacatttggagttgcggttctttcttctagcgtgtgtttggccctcccctttttaacctctactctcttatttctacttgcatgtttctcgaactattaaacgataatttttttaaaaagttatgtatataaaaaaactatttttaaaaaatattaattttttcttctaattttgataagctaatacttaattaatcatatggttacgagtccctccatttttgcatgtgcccaagaccttcattgcgaaacaaagccttaattaagtatagctagctatgtctacatactttctctatttaaaatataataattgcctcagatttaaatttatcgaggaggaattactttgaacgttttctggtttagtatatatttttttatatatattggatttttttttgaagtaacacatactcctacgtacattaattaactgtttccattcgcatgcgtgatggagcaatcgacaggccacgcagatgtcacggaggaaaagcctagcgtcccgccgtcgagcgtaacaaagatctgccgagttttacgtatctgcaaacgatcatcgtcggccgcaacatcggccaagccgtgatgtgtcaacgacggcaaatgcatgcacgcgggaataaataatggaggcaccgattaggatcaacaatatggttagtccattaaatatgtgtgtaagctcgatcgatatggaataatgagaaacaaataaacaatgagaaacaaatattcaccatgtttattactacctctgttttcaaataaatagtattgattagtgtaattttgaactaaccggcatcaaacaaaaagaaacagagagatacttgtttacgttacttcttttgtatacgtatccagccgcgatgttcggaaactgtgtaggatcgagattggcatcgatcagtaagggcatcaacaatgttactttttagctgccggtaagaagcattaaatgctcttttcctatccggtagcaagctctgtgagagtggcgaagaattaaaatctggtgataatatctattaccggtatattactaccggtgaagaagagataaataatattattt

SEQ ID NO: 19259 - DNA, 1378 bp, Oryza sativa
  ref <308>: DATABASE ACCESSION NUMBER: AK069627
  ref <309>: DATABASE ENTRY DATE: 2001-12-06
ggcgaggaggaggaggggaggcaggtccaggaggtggtggcgcacgtgtacgacgttgcgagcagcgggtcgtcggaggggggcggcggcggcaccgccatcctccacgtcaaccgcttcttcaaggacgccatcggcctcggcggcatcttccacaccgccatccaggtgtatggagatgaagaatggtcctttggttactgtgaaaatggcaccggggtttttagctgccccccgtgcaaaaaccccatgtacacgtaccgtgagtccatagtgctggggaagacgacctgctctattttcacggtaaaccaaatactacgggaactgagctggaaatggcctggaggctcatatgaactcctgtccaggaactgcaatcacttctgcaatactttctgtgagaagcttgatgtaccaaaacttccagcttgggtcaatcgcttcgcaaatgctggggatgctgctctagaggtagctgaaaatacagcagaaaagctgaagcaagcaaaaaaggacattgcgggtgcatgcaaagcagccaccacatatttgactggtgcatcttcaagttcaccatcaaatgcagatgactcaggcggttcaacaaatagttctctttttgaggggacatggctcagaagtatcatcggcatcagtatgaaaccatcaaggagtctcatgtgttcggatagttcagatagttcagatgatgaaaaatctgaagatgagagggaatcagattgccaacagcctagcggtgatcaaattgaagaaaaaaaggatgctacacaagagcaagcaggaaagtgagaatagaccatgccatcatccatgaaggtcacaccacaatgtaccgaaagaggagcaacatttcaagattgcaatttgctgattaaaaaaatttacacagcgagcaagcaatctacaacaagaacctaatttacacattgggtggcatcgacttgtgatcaagaacggggagctgtgacaaagccctgacaagtgccgaagtgatggcgctcatcacaatgcgtgcaatcctggactttacttgcccacggcgtggcagtggacgaactctcatttgcttttcgcccttgtagactttgatgagatgagcagaggcaaccttgcaagctttctcgcccatgttggtgaaggagatatcagaaaacttgtctggcactatgcttgatctctgttcccgtcgtgtacttataggctaggagatgttgtatctgaatggaagacatgacagctaaactcttgtttcattgccgtattagctgagggagccattgactatacctgaatgatgttgtttttttgtataatcttgcagtgtctgttggtatgaaatgagatgcttctgttg

SEQ ID NO: 19260 - DNA, 1392 bp, Oryza sativa
  ref <308>: DATABASE ACCESSION NUMBER: AK069628
  ref <309>: DATABASE ENTRY DATE: 2001-12-06
gatccgcggctaatctcctctgctcgccgcgcgccacttcctcactcctcgcaagcggcagctcagcgccgccgtctcctcctccgccatgatcgttgccaccgccaccatcccgttcttcccctcattccaccgcccgcggttcaggcccggcggcctcccgcgccgggttgtggtcctccggtgctcggcgtcgtcgtgggaggagcgcgaggaggcgcggtggctgcgcgaggagcagcgctggctgcgggaggagcagcggtggctccgggaggagtcgcggtggcgcgccgagcgcgagtccctcctcgccgagattgccgcgctccgcctccgcctcggcacggtcgaggcgggcccgctccccctcccgtccgtcgacgccgcagtggcgtcaccagcaccctcgcccgctgttgcggcggtgccgccgccgccgcctccgccggcggcggcgcccaggccaccgctggtggtggaggaggaggtcgaggtgaggaaggaggtggtggtggtcgagcagaaggcggccaaggcgaagagcggcggcggcgacggcggcgggaggaggacgctgagggtgggtgccgagggggaggacgtgcgcgcgatgcaggaagcattggaaaagctgggttactattcgggcgaagaagacatggagttctccagcttctcatctggcaccgaacgagctgtgaagacatggcaggcaacagtacgggtttcggagagtggaattatgacatcagatctgcttgacatgttatttacaggacaagttgggcaggatgtgaaaacaaaagatggcataaatggagcagccattccctccataacagaaattgcagagattcaacaaactgttgtgaaaggaaatggtgtctcaggagtagggttgtctgaaaatagagtgtttctcatcggtgaaaacaggtgggaagacccatctaggctaacacagaagaataaaccaatcagcagcgctaccaatgcatcaactaagaagtgcatctcttgtcggggtgaaggccgcctcatgtgcgtagaatgtgatggaacaggtgagccgaacattgaaccacagtttttggagtgggtcggtgaagatacgaagtgtccatactgtgaaggccttggttcaattgtatgtgatgtttgtgaagggaagacagtagccacgaactaagcaacgtgctggaccaacatgctgtttcatttgtgaacatctataacagtttatgtagatagatacttgccaattattcaagttctttttcacaacagttgaagaatagtattcacatggccagtgttagtgccctatacaaaaggtagtcacgtttgagacaattttgtttttgtataataggataggaaatattaacg

SEQ ID NO: 19261 - DNA, 1869 bp, Oryza sativa
  ref <308>: DATABASE ACCESSION NUMBER: AK069629
  ref <309>: DATABASE ENTRY DATE: 2001-12-06
gagtgactcgtcgccgccgtccagaaccccaaaccaaaccctagccggcggcgtcgtcggaatccatggcggaaggtgcgccgatcatctaccttgaccccgccacggtggcggaagcgcgccgccgcggcgacgacccgcgcaagctggaggagtgcaccaagtacttgatgacgcacatctacgggttgctccctggcccacccgtacccatcgccgccgcccgcacccacgccgcctgcgccgccgcagcctccgacggcgtcgaccgcatcagcgccctccccgacgcgatcctccgcaacatcgtctcccgcctccccgtcaaggacgccgcgcgcaccgccgcgctctcccgccgctggcgcccgctctggcgctccacgccgctcgtcctcgtggacgcccacctcttcccgcgaggtcgaagcttcggtgtctccgcctctgccccgacgcgcgccgacacgccgggcatcgtcgccgccgtgtcccgcatcctcgccgcgcacccggggccattccgctgcgtccacctcctctgcggcttcatgggatcgtaccaggcccagctcgagcactggctccggttcctcgccgccaagggcgtcgacgacctcatcctcgtcaaccgcccatggccgttcgaggcggctctccctgccgccatcctccgcatctccaccctcacccgcctctacatcggcatgtggaagttccccgacattgccggcctccccaccaacaccgccttccccaaccttcgcgagctcggcatctacgccgtcgccatggagaaggagggccgcgaggtcgagttcatcgtggcgagatcccccgtgctggagaccctcaacatccaaggaggcaacacgcaggtgttgcgcctccgcctggagcaccggagccttcgttgcgtgcagatctgctcgtgttgcgtggagaatctcgccgtggtggacgcgccatgcctcgagcggctcgtgctctatgattctttgagcaaggatgactcctgcgtcagggtcaagatcgtccatgcccccaggctgcgcttgttgggaaacttggagacaggattccacatgctggagatccatgacacctttgtcagtgctgggatcaggtcgagcccaagcgcattgttcacgagcgtcaagatcctggggttgaatgtgaattttggagtcaggcatgatgcccagatgctgcccaacttcctcaaatgctttcccaatgctgagtccctgcatgttgtgtgtgcaaaatgttctgaagccaccagcttggtaagccccaatttctgggatgatgctggcccaatcgaaagcatcgtgtcccatgtcaatgtgcttacattccgtgaattcaaaggggaggccaacgcgatatccttcctgaagtacttcgtccagaatgcgcagatggtgaagaatgtggctgtggtgttggccaatccacaattcacttcatactccattgatacgctctggacagcgaagatcctcaaatctgtgagatgggccagtaagatctcttcaatgcaggtctataggagcgatgactcagaaggtggtctgatttggagctttcagagaggatcagattattctatccgtgacccttttgtgtactaggaaccagaggtgcctacatatgtgatccatccaagctcagtttctctgaaagttgttagtgttatgtttgcaggataggtgtatctacatctccacatgcaaggcattgttttttgttgttggcatgtgctcaagactggacagggtttttggtctcattagtagtgtagtacgattagctttaatttagtagcaagtttattctagccaacaagtgccattccacagaggc

SEQ ID NO: 19262 - DNA, 992 bp, Oryza sativa
  ref <308>: DATABASE ACCESSION NUMBER: AK069630
  ref <309>: DATABASE ENTRY DATE: 2001-12-06
ggcaaatgggcggcggcggcggcgggaggccgacggcgagcggggcgaacagcagcagcagcagcgatgatgacggggacgccgcctggaaggcggccatcgaatccatcgccgccgtgggtttcggcctgccgctgtccaacggcgcggcgaaggccacctctggcggcggcggcgaggccagccacggcgtggagcagcagccgccgcaggaggggaaggcgcaagcacctgggcttaagctttaccagatcaaggtaaggaacatgttggacaacatgttagagaaaaaccttgaaatagtcaaaactacctgttcgaacttggccgatcctatggaaacagatggagggataaaattatttaaaaaggctccacctggcatcagaatggatgccatggataaataccatgtgcaactgaagagaccaagaattctgcctggaacagatatcgatgagaaatccaagaagttcaggcatatgcttaagtctgttgctgttgatggcaatgatatacttgtttccgcaaagaaatcatcagaaagatcattggctagattggaagcaagagaagctgcagcgaaggcagcagccaagagggaagaagaaagggtgcgggaactgaagaagactaggggagagaaatggcttccttcaattgctagacaaatgaaggaagaaaaagcttgggagcaacggaagtgatgatgccaccatcatatcaataggggtacctgtgctaatctctgatgccatcatcggcacttcggcagtgaccttcttcactttctgtctatgacaagggacagtagatagatcatagattaatggatgattttgcgtagctgataattcagttctggatgtcagcattgctctgatccctatatgggccttctttgtagacaattttgtattgtaacattccaggatcttgtgtgatgaaagtagcgtatgtatgcattatttggatatgaatctaaaaagctt

SEQ ID NO: 19263 - DNA, 1836 bp, Oryza sativa
  ref <308>: DATABASE ACCESSION NUMBER: AK069631
  ref <309>: DATABASE ENTRY DATE: 2001-12-06
gtgcctgccagtgcacgccttctcattcaattccctgctcacctcgatcgagtagctgctgctgctgtgctagcttgctcgccggccggtgaggtcgacgatggagctgcacagatgctctctcctcgctctgctcctcgccgtgacatgctcggttgcagtggcgtatgatccgctggacccgaaggggaacatcacgataaagtgggacgtgatatcgtggacgcccgacgggtacgtggcgatggtgacgatgagcaactaccagatgtaccggcagatcctggcgcccgggtggacagtggggtggtcgtgggccaagaaggaggtcatctggtccatcgtgggggcccaggccaccgagcagggcgactgctccaagttcaagggcggcatcccccacagctgcaagcgcaccccggccatcgtcgacctcctccccggcgtcccctacaaccagcagatcgccaactgctgcaaggccggcgtcgtctccgcctacggccaggaccccgccggatccgtctccgccttccaggtctccgtcggcctcgccggcaccaccaacaagaccgtcaagctacccaccaacttcaccctcgccggcccgggacccgggtacacgtgtggcccggccaccatcgtcccttccaccgtctacctcaccccggaccggcgccgccgcacccaggcgctcatgacgtggaccgtcacctgcacctactcccagcagctggcgtcgcgctacccgacctgctgcgtctccttctcctccttctacaacagcaccatcgtgccgtgcgccaggtgcgcctgcgggtgcggccacgacggctaccgcggcaacggcggcggcgggaagaacgcccgcgccggcgacggacgcagcagacgcaacagcggcggcggcggagggcacagcggcggcaccgagtgcatcatgggcgactcgaagcgggcgctgtcggcgggggtgaacacgccgcgcaaggacggggcgccgctgctgcagtgcacgtcgcacatgtgcccgatccgcgtgcactggcacgtcaagctcaactacaaggactactggcgcgccaagatcgccatcacaaacttcaactaccgcatgaactacacccagtggacgctcgtcgcccagcaccccaacctcaacaacgtcaccgaggtcttcagcttccagtacaagcccctcctcccctacggcaacatcaacgacaccggcatgttctacgggctcaagttctacaacgacctgctcatggaggcagggccgttcggcaacgtgcagtcggaggtgctgatgcgaaaggactacaacaccttcaccttcagccagggctgggcgttcccgcgcaagatctacttcaacggcgacgagtgcaagatgccgccgccggactcctacccctacctacccaactccgctccgatcgggccgccgcgttccgtggccgccgccgcctcggcgatcttggtggtgctcctcctggtggcatgatcagaaaaatgtccccttttgctttgtcttcttgataattcccacatgtttggagagcagtgtaggtaggggcattttggtctattcatactggatattcagtcaaagaggaaatctgtgatattgtgttaactttgaaattgcctgatagatctccataatgtacaacacaatcaggctggaagagttttggtcagtccccagttaggccagccctgagaaatcacaccacaaacttttctgcaaattctgttgtgactacaaatatgtatgcaggtattgaccttgaattgagaggaaaaaagaaacaatttccacatttactgacc

SEQ ID NO: 19264 - DNA, 1183 bp, Oryza sativa
  ref <308>: DATABASE ACCESSION NUMBER: AK069632
  ref <309>: DATABASE ENTRY DATE: 2001-12-06
gtatcgtcggcatttcctccaggatacctgatgggaaggagattatgcaatgcagtggtatcgtggtcgattggaacaagaccagcaggttggcaacaatcgtaacttgctctgcagccgtgtgctttgatggtgcactagtccatcccaaccccaagttgctcgtacatttgcctaataggtctaccgcagaaggacaattgcttttcttcaatgcacactaccgtattgcattgttggaggccttggtggactttccattggagcctgctaattttggctctagtccaaaatttggacaaaaggtgtttaccttggcaagggacaagaagtcatccttctttgctaggtctgggacagtcctgttgcaggatccaccattttttttgaagtacaaatactggttatctctcagctctgcaattgaactgtgtggcactggaggacctgcgattgatgagcgtggcgatgttgcagggatgacattcggtcgtttgccaaatccggatgtcctctctatctctatcctgcagacatgcattgacatgtggaggagattcagtcgtgttgctcgcccctttcttgatatggacttgatagcctttgagacgttggatattacacaccaggaggagattgaatcggaacatggcattaccgatggtttcatcgtggacttggtgtgcgatgattccactgctgggagacttggtatttccaggggtgatgtcattgtttcatacaatggacttcgtgacttcactctgcatacgtttgaggagtaccttctcaatcttggctggggttttcttgagagtacagatccgagctggacgatcaatttagagcttgagatatatgatcctgttagaggtactatcagaggtgttaccttccctctgggattttctgatatttgcgaggatgtccttgtactgccatgagacagctgcggcataaatcgtcaaagcaatgtggctaactgtcgctatgccatatgcctttttttgtggcaattgttttgtgatgtcatatattatcttttttttttctggtgagatctgtaaccagaagaacatattgtgatattgatcctttttttgttatgcggtagggctgtttgtgacttgcaaggtttctggtggccacgattacaaaactgaaaaaagatgaaacatatccg

SEQ ID NO: 19265 - DNA, 3716 bp, Oryza sativa
  ref <308>: DATABASE ACCESSION NUMBER: AK069633
  ref <309>: DATABASE ENTRY DATE: 2001-12-06
gatcgcctcttcctccccccctccctcccccctctcgcgcggaagaacggaacggaacggaacaccagccgctgctccggcaagcgctcgccgccggcgaggcaaaggtatgcgccacacgctctctgtacctaccaccactcgttgtcgttttcctcctctcgcggggggtgttttctttgcttgcccgcgcccaccggtggatggcttaatttagcttttccgctctgcgcgcgaggaggatctacctgctagctagacggattccttaccccccgtgtgattgatcgatgaggggctttacgctgatgcggtgaatcgaaccggcaccgctctccgtcatgggctttggaggctggaaatccaaccaccgatggatgcgttgggggagaaaaggaaattggggaatttggtactaggagagcttccttgctgtagagaggaagctagctagcttagacttgttgagaaattagtggagagtgagttcgtgagtggttttattgcgcattgcaagggaaatggaaagagggtgtctgatgaagcatgcgttagaggtgcacaaagtagagattcacatcgttgctgaagagtataggctactagtttgatgtatgctccgcgttgctaggagacatctcgcgaagcaaaatttggagaaatgagcgcactgaaactaggaggttgatttttttttttaacaatagtgtagtcaaagtgatgttggatggttgatgtttaaatgctgaacaaatgaatatgtgtacatccattcaaattaagctcgccattgtaagactaaaacacgacaaaatgacagagaaagtggatgacaacaatttaggaaggaaaaaggttaagcactgcattacgttacatatggaaatatttacttgttaattttcattagtttgcaaacaatctgtagatcctaacacatgtattatatatgcgatcaaattacaggctttaaattgatgccgctgtgactaaataagttttattcagttgtacatctctgatatccattcttcaatgagataagcactccttttgataattttcttttttctataatctctaatggttataaaagaaatccgttagaaacaacacatcattactaatagttcctaaccttcttgacaaagtcagatgattttcctttagaaccatctgacgtcacataatcgcaaatggtttccatatacacctgtttacggtagtaatgccagttatgttttgacttgctcatgtgtgctgccgtgctgcacctagtgaacctataggcactgtatttttgtggcaagaaggatttttttttcatgaatgttatgcaagtcttttttttttggtcaacttgcttcacttaagcagttgactaattcctcattagccttaatgttttcgcttggatgtggtaacaattttaatcaacttcgtagatggagaacactcaatttagccgtccaaaggcggtaccctataatgactcctgggagatacccaattctgactatattctcttgtatctcaatgacaaacaaactgggaagatcacttgcatggtatgtgggaaagaaggacactacacttgtgagtgccccatgaagaataaagaaaaatatgtcatatgtactctttgtggcaaggttggccactgtcacttatggtgctgccatcagaatgagagtgagaggcgtgcttgccgtcgttgtggagaaaaaggacactatgataattggcatcacctaggttgctccagctgtgagaagcatcatccactcgggagatgtcctatgggaaaaattacatgttttctttgtgaaggcaatggacatgtccctgttcaatgtcatttgagtccaatgctcactgcaataactcagaatcaacgagagagtttccgagctactctgagacaagcattgagagaaacaagcaacacagcagtcacaccaattacattgaccagagaattagagccatataatgataagaatggaggccaacctaaaggggacaatgaaatggtgcccagggtcttaggcttcaatcaaggagaggaaggccattctgctttgaggaaccctaacagatgccatgtaccatcctctgacaaggctaacgttgctgcagataaggcaccaaaccaatctttaggagtaacctgcttcaactgtgggggcaaaggtcactattcaaataaatgtcctcaaaagcaaaagcaacatggagtcagatcaaccaatgctgcagctatgaaagataagacaccgaacctaacaggagtgacctgcttcgactgtggtgacagaggtcacttttcttatacatgtcctcaaaatctactagaagtcatgttgactgcagaactagagccacatgatgatacctatgaacgccaacctaaagcggataatggaacagtaccaactgtcctaagcctgaattgtggtgaggcaagccattgtggtaggaataatcccatgaaaagtctggaatcatcctctgataagatcaattctacagctatgacatataaggcaccaaaacgagtgttaggtgtaatctgcttcaactgtcatgaggaaggtcattatgcaaatagatgtcctcaaaagcaacagggaatcaactcaggtacttcccaatccccaataaagcggcagaggaaggaatgactgattgtgcttgtggcctttggtgactacatcgatcaagtttcaaagcacatttgttccttgataatatatgccattatattcggttgcaaggaggcaagggtccattttctgaggatggagcgtttgcaaattggcattcaggtttttctatggggaagggacggaacctcatgaagatcatatatgtgtgataagagctgcaacaagatgaccaatgtcaagcctgaacatggttcaccatttaatctactggttggctgagcttctacaagatgtctatcagcattctatagattacaaaaggagttaatccactgagcaatgagtggctggaagatgggcagtgcctgctagcgaacagctagaaaatgtactggctcttggcacaccaactgcaagtgagccgttggtgcaccaactgcaagtaaatcccaagaaagcaagggtccattttcgaggatggagcgtgttgctaattggcattcaggtttttctatgacaagggatggaggttccatcatgaaatagtttgcatgtcaggatggtcatatgtgtgataagaactgcaacgagcacattaatgtcaagcattgtttaaatcataaaggaggtaagccattgtcgcatgaggctctgtgcaacgagttgctggaagatggcaatgcctgcttgcctgatattagcgaacaactagaaaatgcactggcccttggcagaccaactgcaagtgaactaaagagttgcatttcaccctttgatttaatgtgatttgcatactttggtaataggaaatttatctcataaatcgttttgtttaagataaaatgcgatttagtgaagttatgacttgtgagagagccatgttgtagggcattttggattatttgcgatgtgttaattaccgttcactttattatgttatacatgtattttgaaatattcacataacatttgtgttgtcatgttttatactacatgcgcactgaaatattcacagaacatggatgctaatttctcgtatgtatctct

SEQ ID NO: 19266 - DNA, 1369 bp, Oryza sativa
  ref <308>: DATABASE ACCESSION NUMBER: AK069634
  ref <309>: DATABASE ENTRY DATE: 2001-12-06
gcctcctcctcctctcctcgctcgtggccgccaccatgtcaggcggcctctacaaccaccagggtttctccccggcaagaaccctctcgccccagattaggagcaaccccgaggccgatagccagtacttgagcgagctgctcgcggagcatcacaagctggggcctttcatgcaggtgctgccgatatgcagccggctgctcaaccaagaaatcatgcgggtatcaagcatggtcaacgaccatggattcaacgattttgacaggcgtcgttatagaagtccgagtcccatgtcttcgccaattatgagacccaacctacatggcaatggatttgggccttggaatggcatacaccaagagagattaggctttcctcctcctcctcctcctgggacaagtatggactggcaaggcgcaccgccaagtcatggctcttatattgtcaagaagattgtacgcatggaggttccagttgatgcttaccctaatttcaatttcgtgggacgtattctaggaccgaggggtaattctctaaagcgggttgaagcatcaactggttgtcgtgttttcattagagggaagggttctatcaaagatgctgataaggaggagaagctgaaaggaaaacctggctatgagcacctcaatgatccactgcatatcttgattgaagctgagttgccagccaatatcattgatacaagattgaggcaggcacaagaaataatggatgaactgctaaaaccagtggatgagtcgcaagattactataaaagacaacagctgagggaactggcaatgctgaactctactctgagagaggacagtcctcatccaggaagcgtctcccctttcagcaatggtggcatgaaacgtgcaaaaccgagccattagcaaatatggttcgacctcaccgctttcatcaaggtcaaggagctcctacacggctatgcccctaggcatgccgtcgagcttgagtggttcgttgtatgggctattgtgtaaaaaacagtatgccttttactggatgattagtctggtaccaaatggttctctcctctggatgaggagatcgatggttaaagctgcctcaaatcttttggccggtccagatgtgttgttgtaacttgtaaggttcacattcattttgttctttatcgactgttaaccctgctagcttgtgatgctaagataggtggttttcccttttttcaggagagattagagaagtcttggtaatgtaagatttcagtttagaagttgagttagattgcatcatatttgcctgaacatcatggagttgcaaaatgcagatcatgaccgtgttatgcaatagtttgatgggaaaaatctttgaattaaccatg

SEQ ID NO: 19267 - DNA, 697 bp, Oryza sativa
  ref <308>: DATABASE ACCESSION NUMBER: AK069635
  ref <309>: DATABASE ENTRY DATE: 2001-12-06
ggggggatgaggagtggcagcgaggcggttccggtgatggcttggcgacgaggaggagcagcggtggtggttcggggatgagaggagtgacgaggaggaggagcggcggatccggtggtgctgaggtgcgaggacgggcgcgatgttggcatgtgcggcgtcgatgggtgactgtgggcgggaggcgatgtggcggcggatttggccgccgctttgcgcaccatgcgcgtggatctggctacggcggcgcggatccggcgcggttgcaggcggcgcgtcggcggatccagcgcccccttcctcccgtgtgaacctgcacgggtgaagactatgggcaagaggcgagacggcggcgaccattgcggcggtgagcttgtcctccggcatccatggagcagtggcgggcatccatggagacggaggcaccgagcatgcctctctccgagttttccattttcatcttcttcaccggcggaagaaacggccaccgcccgttgtttccgttctcaatctggaaaccaccaagagccaccttttttattcgacggatccagaaggagaagaaagctgccaggatcaacaacgccattaatcaattatttttcctgattttagttggacgttgtcctgttatttgatctctccgatgtgttattgcattatttgtgtgtaattagtttctaatacatgtgattcc

SEQ ID NO: 19268 - DNA, 1795 bp, Oryza sativa
  ref <308>: DATABASE ACCESSION NUMBER: AK069636
  ref <309>: DATABASE ENTRY DATE: 2001-12-06
tggcggcctttggagagagagagagaggcgacacccttcttcctcccccaaccctttcacccgcccaaactcatccatccatcgatcgccctacctagctactctcgatcgatcgaccgcccgcccgccatggacgtggagtacgacgtgatcgtgctcgggacggggctcaaggagtgcatcctcagcggcctcctctccgtcgatcgcctcaaggtgctgcatatggacaggaatgattactacggtggagactccacatcgctcaacctgaatcagctatggaaaaggttcaaaggtgaaggtactcccccggcgcaaattggggctagcagagactacaatgtagacatgattccaaagtttatgatggcaaatggtacattggtccgtgtacttatccacactggtgttaccaagtacttatcattcaaagctgttgatggaagctatgtcttcaataagggaaagatccacaaggttccctctactgatatggaagctctcaagtctccattgatgggattgttcgagaagcgcagagcagggaagttcttcctttttgtccaagattacaaggaaaatgatccaagtacccacaagggatatgaccttaacaaaatgaccaccaaggagcttatctcaaaatatggtttggatgataatacaatagactttattggccatgcagtggctcttcataaagaggataactacctgacagaacctgcaattgacactgtaaagcggatgaagctttatgcagaatcagtgggtcgttttcaaggaggatcaccatatatttatcccttgtatggcttaggagagctgccacagggttttgcaaggcttagtgctgtctatggtgggacatacatgttaaataagccagagtgcaagatagaatttaatgatgaaggaaaagtttgtggtgttacgtcagaaggggagactgcaaaatgtaagaaggttgtctgtgatccatcatacatacctgataaggttagaaaagttggaaaagtttttcgggcaatcgctatcatgagccatccaatcccaaatactgcagattctcactctgtacagatcataataccacaaaagcaacttggacgcaaatcagacatgtatgttttctgttgttcctactctcacaatgttgcatcaaaagggaagttcatcgcgttcgtgtcagcacaagcagagagtgaaaatccagcggcggaattgaaaccagggatagaccttcttgggccagtggatgaactatttattgatacatacgacagatttgaacctactaatgacccatcttcagacaattgtttcatctcaacaagttatgatgccacaacacactttgagtctactgtgatggatgttctttccatctatacaaagatcaccggaaagacggttgatctcagtgtggatttaagtgctgcgagtgctgctgaagatgatctctaatagttattggactgtcctttggtgcacagaggaaaagatttgtgcgttgtttttccattcatattaggtttatatatgattttttttcttttattccaaactatagtggctgagttttattaataatttgataatgctgtatattctaggttcatagcaatttagcctgtgagtaaacagctgtttttgttgttcagtttacttaatttcacctttaaatgttgtggatagtgctaatgaacaccgaactggtacctccaattattttgaagaataccttgtaagatttctataaaatatctttgcaaaacatgttttgagatgc

SEQ ID NO: 19269 - DNA, 1739 bp, Oryza sativa
  ref <308>: DATABASE ACCESSION NUMBER: AK069637
  ref <309>: DATABASE ENTRY DATE: 2001-12-06
gaaattttacgagttacagctaataaaccgcggtctccatcctcgcaggcgcaggcgggagcagcaagctgggggcgcgcggcgaggcggctgctacacccgccgccgccgcggccggccgcggcgacctcgccccgatggtcgggatgtaccagcagcagctcgtcgaagatcccttccccctgagcggcggctactgcagtgaccagccacggcacgcgcccgcctccgcctccacctccacctccacatcctcgtcagctgccgttgcagcctcgccgctggcgcaggcgcatggagccggcgagccacggcggctgttcgaggcgttcatgggggagatcctgctcccgctccgcggcgagggaggtgccaacggcggcggcgtcggccgcggtcccggcggggttggggatctgggggagttgctgcggtggacgcgggaggtcgccgcgaatcccgtggcggcgcggcctgttccggcggaggtcaaggcgaggaagcggcaggtgctggccttacggcgcgctcgctacctcaggatggaggacgttgcgaacgcggacgagctacccagcttcttcaagaaaaggaagtacagatctcacaataaccatgcagaaagacaaaaaggtaaaggttcgatgaatatgccaacaaggaaatcagagaggctagctaagagaatgaaactcatgacatcagtgctcctcacacaaaggaaaaagattggagttggtgagcattttcaggcagaggtacctgactggactgaaccaccttcagatgaacttgctcgttacaaaaatgacccaaacatctcaaagatgctaggaaccagaatttggccacctgaaggtcaagttctacaaactgataaaaaaatagctggccagggaaggatggaatcatgtaactgttcatacccgggatccttcttctgcagacagcatcacacagatgcagccagagatcagctaaggtgtgaactcggtagagctttcacagaatggcgatttgattcaatgggtgaggaggtttctaaaatgtggactcgtgaggagcaactaaagtttaatgcacttgagaggttggtccctgtgatggaccataagactttttgggcggtagcatcaaaacatcttgcctcaaagaccaggatagagttggtgcgttattacttgaacgttttcttgatgagaagagtattgagccaatgcagattaaatcttttggagattgatagtgatgaagatgaaacagaggaagaggaggatgaagatcaatctgaaagcaccagtacttcccagaggacccagcatgcccagaatgtgaagagcatttcatgaaatggctgacagctacctgtccacattcttttttgcatgtgcacttgttttgtctatgtggagagtgacctcaatcgatttgtcatttctccatgtggtcattagtctgatcttggaagatatttggataaagtgagtcgttcactttgctagaacacatccattctgcagagaaacttatttgaatggcagaccattctcaatgtctgtctcaagacaatccattcggttgtaactcgaagattatctgatctgaattgtttcccattgtacaggaaaagaaaaggaaaagtagattgggggaaagaaaacaaatggtctggaacatttcttattattgagacttggaagggccaatgtgtcgcctttagcaagcttttttggcaatgc

SEQ ID NO: 19270 - DNA, 3433 bp, Oryza sativa
  ref <308>: DATABASE ACCESSION NUMBER: AK069638
  ref <309>: DATABASE ENTRY DATE: 2001-12-06
gtatctcgccattgccgaccactgagaaaagcttcgagctctcgccgcccatggagagcggcgcccacaagagcagaggctctgtcgccgccggaggaggaggaggaggggagggggcgagcggaggaggaggaggagggaaccacatggtgtgccacctgtgcgggtaccagtacccgaacgcgcaccccagcgcgaagcagcggcgtgcgcaccgcaagaactgcggcaacccgtcgtcgccgtcccccaccgccgccgctgcccacgccgccgtggaggagggcgacgggaagaggctgctgctgctgcgagatgacggtgaagaggcggcggcgggaggaggaggaggaggaggagatgtgggagatggcgcgagcgcggtggcggcggattccggtggcgtcttgcccggatctgcgcgggaggttggggatgtagcggatgacgatggcaatgcagagcgttcttcttctcctcctcatgttagtgaggttcaagtcggcctcagtaaatgcacggaagattgtgtcgtcattggtgaccacatccctccttccggaaacgactctaaggccagtggaactgagaatgatgagattcagagtggagtcgttacgcggttaaccgaaaatgtaccacatcttgaagatgggcatcactctgagtcagctgttagttctgatcagtgtatgggtagcacttcttgtctggtgcctgagcatggagatggtgcaagattgagctcagagttctctgcagatgaaatcaataagttaagtgtgatgtctctagaaacagttactggattaagtaaagatggtattggaaacaatgaggatgatttctccggtgtggagagaccaaaggcagtggaggaagatcgatcagtcaatgattctaatgtggtttccaaagagcaaatccccctgcgaagaaactgtgtcatccatggagcaaagtgaagttatgtttactattggaaacaatgaggatgatttgtcctgtgtggagagaccaaaggcagtggaggaagatcgattagtcaatgattctaatgtggtttctaaagagcaaatcccctgcaaagaaactgtgtcatccatggagcaaagtgaagttatgtttactaactcagtggaccatgtttctagttcaaccaaggaacctgtcaatttacttgaggataagatgtcttgtattgagaagcatgtatgcctagacgaaactagtagtaatgatttattccaacttgctagtggtggtagccattcagaggcatcaggcattgacaaaccccggcatcaagctgattgtgcctctctgacgccagatcagttggtaatccccaaggagatggatattgatgaaggacttcattgtactgatgcagatgtgggcatcaaaactttgtcaagtgcagttggacatgctgatgaagatattactgctgttaacctttcaaagaatgtttgttcacctcatttgacagtgggcgatgacatacaggatagtgtcaggcaaacaattgatatcactcccatgccacctcaagttgatctagcagaggttagcacatcctctacttctcatgagatcgataaagtaagtagtaaagatggtattgatgaaagaaatccaaatgtaaaccttacttccgatgaggtaaatgaggtgcatggcatagatgttgaggaaattccacatattgaagatattgctgcatataatgattatcaagagcctaatacagtgcgtggtactcgtgattttgaagaagatacgcagaatgaagaaattattgcagaagctagttctcacaatatcactgctgtacagagcacatgtaatgttgaagaaaaggaacagattgaagaattcgatagcaattcttcctgtaacaagatccatgagataagcagcaggggcgttgaagaaacaaaactgactgatgttaatgtggaaactgcagatgagataaatgtggcaagcagcctagaaaatgttgaagaaaagcagagcaatagagaaaccattgcagacccttcagttgagattgatgtggcaaacttgccaagtagccttgaattaagcaagcttgatgtagaaactagcacataccatactgcttatgaggccaatgcagtgaatgccatggaaaatgttgaagaaatgaagcagaaggaagaaatcgctgtagcgcccacttctcatatcaacacgatatcgagcaccactaatgatgaccagaagcagagtgaggaactctctgttggccctagttccgatgagattaatgtgccgcatggcgaattcagtgttaaggagaagactgaggagactgtgtcagaccctacatccaacaaaactgatatggtaagcactagtggcggcgttgaagaacagaaccacggtgatgaagtaacttcaggcacgaatactcatgaggaaagtgtaatattagtacacaccaccgataatgtcgaaaagaagatgaacaaagatcttacttcagaacctgcagacaatgttgaagaggaagtgcagagtgaagatatcgcaacagaccctacttctcatgagagcagcacgctacatatcacagacggtgctgaaagcaagaaacaggatgcgaaggtcgctgcagatctcgctgctggcaaaattgatgtgccacggagcgcagatgatgctgaagaacagaagcatgaggcgaccgtcagcacggatgatgatctcaaaggagatgatccgagcgaaagcaactcgccgcagatcatagacggtgctggagacaaggaacaggacgcagaaaccgctgcagatcctcctcctggcaaaaccgacgcgccacccagcacagatgacgctgaagaaacgaagccgaaggaggaggagttggagacggtcggcacggtggtcgacgatcttaaggaggaggacaaggaggagatcgccgagcaaggaagtgatcgtgaattcagacaagaaccacgtctcactgaagtccctcctctccgagaaggccgcagaaaccaaggagtcgaagaagccgagcaccaaggatcgcgtgctgtcgttccggcggcgggtgtcgaaagacggcggctctccggcgaagccaggctctcccaaagcggcggtttcagggcagcagcaggattggaactctccggcgaggttaccggtggagaagaagcctaaggggaagaagcagcagtgggtgcccttcatttgctgcccctccatgagctgatcgatcgatgatgttatatatgaatataaatctttagtgtgccacattcttgtttcgttttttttttttacccattttgctcgtggactaagaagaattgcattttgtttatgcacgctacatgctattctgcctctgcatttcatgcaagtattaaagcagtgtcagtttatacgt

SEQ ID NO: 19271 - DNA, 2080 bp, Oryza sativa
  ref <308>: DATABASE ACCESSION NUMBER: AK069639
  ref <309>: DATABASE ENTRY DATE: 2001-12-06
gattcccccctccccctctgctgctgctgctgctgctgccgcctcgactcctcctcctagatctggaagctcactcccccccccacccccacccacctcctcgccgccgatctccaccgcattcccctcctcctcgtcgccggcgacctccccccgcccccctgatctccgtcgtccagcggcatcgtcgtcggtgagcgaaggtgctgatacaaggtgttgtctgagtctgcaaatattgatgatgtgcctaaaagtttgacagtcttgcttgaatacacagcagcattacttggttacactctgaaggtgtagttgcctttgttggtttagaacatgggttcacggtttccatcccaccaactaagcaatggcctttatgtctcgggccgaccagagcaacctaaggagaaggctccagtcatttgctccacagcaatgccatacactgggggtgacataaagaaatctggagaactagggaaaatgtttgacctccatgttgaaaagtcgcggaagtctggtcctttgggtaatcaaccttcaagaaatacttcatttggtggtgctggttccaactctggaccagtttctaatgctcttggtcggtccaactactctggttctatttcatcatctgttcctggtgctggaggatcagcaagggcaaaatcaaattctggacctctcaataagcatggagaaccaggaaagaagtcatctggtccccagtcaggcggagtgaccccaatggcacgtcagaattctggtcctttacctcctgttcttcctacaactgggctgatcacatcagggcctatctcctctggacctctgaattcatctggtgctccacgaaaagtatcaggccctcttgatcctagtgtatcaatgaagatgcgtgcaacttcttttgctcacaacccagctgttacaaacctgaatgccgatgatggttactctattaagggcagcattcctaagacaatactctggatggttattctgctctttttgatggggttcatagcaggtggtttcattcttggagctgttcataaccctattctgctggtagttgtggtggtcatattttgctttgttgctgctcttgtgatttggaacatttgctggggaacaagaggtgtgactgggttcgtcagtcgctatcctgatgctgatctcagaacagcaaaagatggacagtatgtgaaagttactggggttgttacatgtggaaattttcctctcgagtcctcatttcaaagggtcccaagatgtgtgtacacttcaacttgcttgtatgagtacaggggctgggattcgaaagctgctaacactgagcaccgccaatttacttggggtcttaggtcaatggagagacatgctgttgatttctacatctctgatttccaatctggactacgagcattggtcaaaacaggatatggagcacgggtaaccccttatgttgatgaatctgttgttattgacataaacccagataacaaggacatgtctcccgagttcttgagatggctgcgtgaaaggaatctatcaagtgatgatcggataatgcgcctgaaagaaggatacattaaggagggcagcacggtgagtgttatgggggttgttcaaaggaacgacaacgtgttgatgattgttcctccatcggaacccatctccactggctgccagtgggccaagtgcatcctccctactagccttgatgggctagtcttaagatgcgaagatacatcgaacatcgatgtaataccagtctgagcttagctttgttctggcagctactcctagaaagaaaatgcctgtcaaaatctttggatttatttcgtgggatgttagagttgaaagatgtgcaaatgcagggtgtgattatggctaagtacaatatcggtggtctattatttgggtcttggttgtatagtattttatgtattttttctctcttcttttttctttcttttggtgatctatggatacttgtaacatggatggcttgagttgtaccttggagctgtttggagattcagtggaatcgagttcacaaggttttttggtg

SEQ ID NO: 19272 - DNA, 2104 bp, Oryza sativa
  ref <308>: DATABASE ACCESSION NUMBER: AK069640
  ref <309>: DATABASE ENTRY DATE: 2001-12-06
gactcaggccgacaggtgggacccgtggaccccacctgtcatccccaacctccggccagctccaaccgccgcccacgccgcccactccctccgccgatcccgcacctcccctcgtcccaaccggcgtggacccgagaccccttccacctcgcgaccacatcccgccccactccccctctctccccgcgggaatcaacgccacgccgagccgccacacccccacgacgccgccccacttcccctcgaaatccgccgctccccggccctctcctcgcccccttgagctataaaatcaatccccgtggactcctcttcctttttccccgttttcccgagtcccccacgccctctaccgagctctccacgccgatccccttcgccgccgctcgccggcgatctccagccgcccgccaccgccgctcccgtcgctgccgcgctgcgccgccaccacctatagcatcacaccaccccaccgcaccccggcatccactccatctccctcctccaccgccggaaccaccttcccatcgcgaggccgagccactaccgccacacaccgccttcagccggccgctgccgctgcgttagtcgtcgccgcacctcgccgcttgcgccgtcggcaacgccgtgccaagctctaccccggcctccgctccgtttccccattccaccaccgcaaccacccttccaccgtgcatcccgagccacctccaccatacgccgcctccagccgtgtgccaccgtcgccttagccgccgccgcgtcgctccgtcttcacctctcgcctcgcagcgccgtgcagcacctcggtcaccgttgttcatcgccggaaacccaccggaacgtggtacctctcggtcgccggtcttgccggccctcggccgcggctccgccatggtcgggcgtcgtcggaccgccgttcccgtcgcctcccgtgtcggccaccgccatcctttccgccgccggtcgcctccccatggtcgtcccgtcgccggcgctcctcggattcccataatattccaagatgacttggcacaagttgccgcgtctcacttgcaagagaaggaccatatatatgtgtctgggcaactaactggagatatcccaccgaccaaacttatggatggccaagcaaacattcaggttttagcccaaatgctatcatttgttggtggtaaagcagttcaagcagatagcatggtggatgaagaggagggatttatgcagattgttgaggctgaaaagaaagttgaaactaaaaaattcatccctaaatatccaccacgcacagtttcaggttacagaaacaaggataagctaaacaaactctggaatgatgttgtggctaatcctcaagactggactgataaccgacctcagaagaaaaatggatctataaatgcgaagtatcctgacttcaaaaacaatgtatcaaaagaggcactttggcttgacactgcaccaaaagcagtgctggaaaagttggatgatttagtattcagtagtgatttcagtgctgcaaaaaaatacaggccttttggtggtgacaagggcaatggtacaaactgggcaaagaagagtcaagattcttcttctatctcaaaacaaaaacaaggggagttgtggcaagatctggtggacaatcctggaaaatggtgggataaccgatcagataagccttcaataaaatatcctgatttcaagcacaaggaaaatggcacgcctctgtggattggatcccagacacctaaatgggctatagatgcgcttccaccggcaaaaccatccaaggcaccttttaagcaagagaccttcctctcatgatttgtaagagatctgatcagtgatacaacgacataggaggtactactgtcctgtccaggaaaagagactggccggaaagatgaagattgaggagttgatgaaaggatccactcatgaattttggaaatttgataatctcttatgcatgtcttatctgcctatcccatccatacatactacatctatatgcctattgggaggtcgtttggacctaaatcaatcgttggttgcactactgaggaaggggatatctagggccattacacgggtcgataaagcc

SEQ ID NO: 19273 - DNA, 1450 bp, Oryza sativa
  ref <308>: DATABASE ACCESSION NUMBER: AK069641
  ref <309>: DATABASE ENTRY DATE: 2001-12-06
gtttcctcctctcccctttcttcttcctcacttcaccattttttttttcttctctcctcaccccttcaccacagcgggcgccggcgagcggcgaggccgggccggatctcgccgccgcccaccgcttgacctccctccgtggcgctgcctccagccaaatctctaaaagctcgggaagaaaataacaaaagcagcaatggacgtagatttttggggagtggtaattgagccgtgcaataagaaggagatcttttgtcctgaggataccctgtatcatctaacatcggtagcccttgatgaggcttacgggctaaaagactccaatgtgaaagtatttgtcgaagttaatgatgagaagtttgcgattgggacgctttcctccaaaaggcatccgcatatcaaggttgacttctgtttcaagaagaactttcaactattccacacctcactaatcagcaaagttgccttttgtggctatcaagtaaagaatttgggaaaattcactgattctgaaggtgatgaatctgatgaggaggttccaccagataatatgatcaaagaagcacagaaaagtaaacttcctgcaaagtctgctacagttgcatccgccatgcaaaaggcttttgtaaaggaaatagagcactatgagaaatcaaaagctgatgatgacaacaatgaacgataccgtgatatttcagtagttggtgaatctactggtaatgaggattcaagtgatgatgctgattatgaaggtaagagttctgatgaagaagagactactgcaaaggaaggtgagagtactgatgaaaaagagactcctgcaaaggaaggtgagagttctgatgaagaagagactcctgcaaagaatactaaagaggaaaatgaaccagtggtaacacccttgaagacatttccacatgagatggcaaagatagaagcaccaattacggacaacaaaactggtactaatactagcaagagaggtagtcatcttcaagttacaaaccctcacccagcaaaacaggcaaagaggacgcccataaagaacgacacgcctaagcgttctgctagctatgtctgcaactcatgcaaaaagactttcaactcctctggtgctctgaaggatcattcaaaggcgaaacaccctgcaaccaattgatacgagataacactagtctgtgttagattgttagtcataggtaactgaattttttttttttcgccgggagagagagagaatatttttgaagcagctatttcctagcctcatctgaaacaatattaggattcgagacgatggtctcttcaacataattttggaacactttatgtgaaaagattctggaacgtagataccacagtttctttatgaatgagtgctgaacggtttcattgttctggggatggaacacattttctttatgaatgagtgctgaacggtttcattgtt

SEQ ID NO: 19274 - DNA, 895 bp, Oryza sativa
  ref <308>: DATABASE ACCESSION NUMBER: AK069642
  ref <309>: DATABASE ENTRY DATE: 2001-12-06
gaatcattcaagtgaccaagcaaacacacaaagcgccactgtgtagctcactgctcactcatcaaccaacttcctcaataatgtctcgctccagcctcgccatggcgctcctcctcgccgccttcgccgccgcggcgacggcgaacagcggcgcagcgccggcggctagcgacttcatccgcaagtcgtgccgcgcgacgcagtacccggcggtgtgcgtgcagagcctggcgtcgtacggcggggccggggcgccgccgccgcggagcccgcgcgagctggcgcgcgccgcgctgtcggtgagcgtggacaaggcgcggtcggcgtcgacgtacgtggggcacatatgcggccctggcggcggccgcggcggcgccggcggcgcgggccccgtgcgcgactgcctggagaacatggcggacagcgtggggcacctccgcgacgcggcgcaggagctcggcggcaacatggggcgcgccggctcgccggggttcaagtggcacctgagcaacgtccagacctggtgcagcgccgccctcaccgacgagaacacctgcctcgacggcctctcccgcggcgtcgacgccgccacccgctccgccatccgcggtaagatcgtcgaggtcgcccaggtcaccagcaacgccctcgccctcgtcaaccgcgtcgcccccgccaattaaacatctactcctcctataactaattaagcttttgttcttggaatcttggtcgagttcatcttcgtcatgggttaattagctcagttaatctcgatgcgtcgtcgttgctatggttgtaacatatactgtactgctagttaattatcaagacttaattaaaagagtcgatgtaatattgtaatggttgagtctttacaccgaagatggtgagg

SEQ ID NO: 19275 - DNA, 1452 bp, Oryza sativa
  ref <308>: DATABASE ACCESSION NUMBER: AK069643
  ref <309>: DATABASE ENTRY DATE: 2001-12-06
ggttcgtgatgggcaacgtgtgggtgttcgacgcgcggctcgggtcgttccaccgcgcgccgaggctgtacgcgctctgcatcggcctcctcgcatggaacgccgtcgtctactcgctcccattcctcctcttcctcctgctctgctgcttcgtcccggccgtcggctacgcgctcgggtacaacatgaactccgcgtccgtcggccggggcgcctccgacgagcagctcgccgcgctgccgcagtggcggttcaaggagccggccgacgcgccgagagaccgcgaccacgacgatcaggtgagcgcacgttccgttgccgcgtacgttaatatcgtgggatatgttagttttgcatgcacagagatgattaggcagtagcaaagcagcgtgcatgtctctgcggggaggtaggaaagtttagcgatgcagagaggggaattaaggagaaactcgccaaacaaatgattggtgaactcggctattggccagaataggatatccaaaaagtgatgaaacgtgcgcaccaaactagaacaatcttcctttttgggcggatatactaagataagaactgctaaaaccttacttttccccatggttcggtgcttaggaacaactcagccaacatgagctagtgctaactagctaacataagaactgctaaaacctttacctttcccattggttcggtgcttgcttaggaacaacttaggcacttagccaacataaactagtgctaactagctatgatgtgttgatgttgtccagttttatacatctaagccaattagtttgctctctagctagcttattattgtttagagctcacaacttataggaaactaggaattgtccttgcttttacatacttactggaattaaatggcaggagtgctgcatatgcctggctcagtacaaggagaaggaggaggtgaggcagctgccgtgcacgcacatgttccacctgaaatgcgtggacaggtggctcaggatcatctcctcttgccctctctgcaagcaagagctcagctagaaaaacaagctgacatgaatacggagctactgataccgcgccttccgacgcatgcgtcgcacctcacggaagaagaaaaagaaaagaaaaaaaaaccctggcacgccaaccatgcgtgcactgacctagttcgatattgctgatgacggcacgatgaatatttatgcatacacttgcatgtgaaaaagatatgcttggattaattaggctaggtagacaagcgggaaatgtgtaaaagagtttttttgtgtgtgtgtgtgtgtgtgtgttgtttgcggtgttgttgcatctctcgaatgtggtcgatcgagatgcgcgtgtacgtagtttttttcagcagaaaccaaacgagaacatataccagggtttgcgctcgtgctccagcgaatgccaacccaaaggtattcggcccggtcg

SEQ ID NO: 19276 - DNA, 1304 bp, Oryza sativa
  ref <308>: DATABASE ACCESSION NUMBER: AK069644
  ref <309>: DATABASE ENTRY DATE: 2001-12-06
gattcagacatggcgcaccagaggcagagagacacgagcagcgaggaggagctcccacgtgagccgtggacggtggagaaggacgtccacctcctcaacaacttagccgcgcatggcggcgagttccaacgcgagccgtgggtggagaaggacgacgccgcgtcgtggacggtggagaaagacgacgtcccgctcgtcaacaacatcgtcgcgcacggcgatcccgagggcagttcgaactcgctcgcccgatcaggaggacatttggccaatgtccacgagggagccggcatgttttatcagcccaacttcaagtacattttctgtgatatggatggcacactgctggatagtagcggtctagttccagaaaccaacgctgaggccattagggtggccaggtcaagaggggtacaaacaatcattgcgacaggaaagtcccgccctgctgttattgaagttcttggcaaggttaatttagctggcacaggtggtatcgtttcagaatcgtctccaggagtatttcttcagggtttgttagtttacggcgaggggggccaaaagttatatcaacagaatttagatatagaagtgtgcagagaggcgcttctatactctctgaagcacagagttgccctggtggccttcagccaggacgactgctacacaacgcttgatgatcatcctctggtggactttttccatgttatgtaccacgaaccaaaggcaaagataatatcagatgttgaccattttctgagtaccattgacatacagaagtttgtgttcctagaaactcctgaagtgatctcttctgtgctgaggccacactgggcgaggagggttgatggaaaggcacaggtcgttcaggcacagggtgatgtgcttgaagttgtaccgctcgggacttccaaaggaaatggggtaaaaattctgttggaatcactttgtgctagtccagatgaggtcatggcactaggcgatggaaaaaacgataaagagatgctccaacttgccggccttggtgtcgccctctgcaacggctgtgaggtgacaaaggtggtagccgacgtcatcggcgcgagcaacgacgaaagcggcgtggcacaggccatttacaaatacctctagaaaatgattccacctagctggcttagcatttctactgtggtgtggtagggcctaatatatcttgcttgcagcatccatttgcaagcgtaccatatttaaacttcaataattgtacgtggaagttggaagtactattcgctggtggattaatatcatatttgctgcttacagct

SEQ ID NO: 19277 - DNA, 2370 bp, Oryza sativa
  ref <308>: DATABASE ACCESSION NUMBER: AK069645
  ref <309>: DATABASE ENTRY DATE: 2001-12-06
ggcctccacacctcgcaaccgcgatcgatcgagagagagagcgagagcgagagctcaattcgcgggccatggcgaggagcgggagggagcgtagagatcaggaggaggaggcggcggtggtgtcggtggagcgggtgttcgaggggagggtggtgccggggtggaaggagcaggtgacgctgcgggcgctggcggtgagcgcgctgctgggcgccatgttcagcgtgatcgtgatgaagctgaacctgacgacggggatcatcccctcgctcaacgtctccgcggggctcctcggcttcttcctcctcacgtcgtggaccaagctcctcgacaaggccggcgtcgccagcgtccgccccttcacccgccaggagaacaccgtcgtccagacctgcgtcgtcgcctgctccggcatcgccttcagcgggggttttggcagctacatattcgcgatgagcgacaggatcagcgaccagtcaggcgaggccagggacgagcacaacatcaagaaccccagcttgggctggatgattggattcctcttcattgtcagcttcctgggcctcttctcagttgtgccactcaggaagataatgatcatcgattacaagctcatatacccgagtggcactgcaaccgcacatctcatcaacagcttccacactccccagggtgcaaagcttgccaagatgcaggtcaaaatgctgggcaaattcttcgtgatgagcttctcctggggcttcttccagtggttctacaccggcggcgacggttgcgggttcatgtcgttcccgacgctgggtctcgaggcctacagaaacaagttcttcttcgatttctctgcgacgtacgtcggcgtcgggatgatctgcccttacctcgtcaacatctccgtgctcctcggaggcgtcatgtcgtggggaatcatgtggcctctcatcgagcacaagaagggtgactggtatcctgctgacctcaaacccagcagcctccgcggcatcgtcggctaccgggtgttcatctccatttcactcatcctcggcgacgggctgtacaactttctgaaggtgatgacaagaaccacaacggcgctggtgatgcaggtgcgcgcgatgatgtctgagccgacgctgccggtctccggcggcggcgggcagacgccggaggagacgttcgacgacaagcggcggacggagctgttcctcaaggaccagatcccgaactggctggcgctgagcgcgtacgtggtgatcgcggtggtgtcgatcgcgacggtgccccgcatcttccaccagctgaggtggtaccacgtcgcggtgtcgtacgtggtggcgccggtgctggcgttctgcaacgcgtacgggtgcgggctgacggactggtcgctggcgacgacgtacggcaagctggccatcttcacggtgggggcgtgggcggacgcgtcggacggcggcatcatcgcggggctggcggcgtgcggcgtgatgatcgggatcgtgtcgacggcgtcggacctgacgcaggacttcaagaccgggtacatgacgctggcgtcgccgcggtccatgttcgtgagccaggtgatcggcaccgccatggggtgcgtgatcgcgccgtcggtgttctggctcttctacaaggcgttccacgacatcgggatgccggggtcggagtacccgtcgccgaacgcgctggtgtaccggaacatggccatcctcggggtgcagggcctcggctcgctgcccaagcactgcctcgacctctgcatcggcttcttcgtcgccgccatcgccgtcaacctcgccagggacctcgcggcgcccaaggtggcgaggttcctcccgctgccgatggccatggcgatccccttctacctcggcccctacttcggcatcgacatgtgcatcggcagcctcatccgcttcgtctgggaccgcctcgacggcgccagggccaaggcgttcgctccccccgtcgcgtcgggcctcatctgcggcgacggcatctggacgctgccgcagtcggtgctcgccctcgccggtgtcaagcctcccatctgcatgaaattcctctcccggaccaccaacatcaaggtcgacgcgttcatcgccaagctcccctcctcctagctaccatgcagctgatcgacgagctagccatctatctagctagctcatgaccactcactcaaccatgacaacttcatatatagctagcagtagcacatacattaatgtcgtagcctccttgtgtcttgcttccttttagaatcagatgcctttgctagtagcccgcatgcatgcatgtgacacatataaatagctactaggaaccgagcagcaatgcaagtactacattatttggactgtc

SEQ ID NO: 19278 - DNA, 1897 bp, Oryza sativa
  ref <308>: DATABASE ACCESSION NUMBER: AK069646
  ref <309>: DATABASE ENTRY DATE: 2001-12-06
gagtagtaggctagtgtggcgagtagtagtggtattcccctcttggtcttggtgttgggctccgatccgggtcggccggcgatcgaggtccgccaccactgaccgattcacctcgccgcccgccgcccgcccatgaagcattcttcttcttcttcttcttcttgggtcttcttctagactggactaccttgtttgactagctagctactaaggtagtgtggatgccattcaaatctgcctccgccgccgacgagtactagccgctgctcatggtttcgcggggcctcttcggctggtccccgccgcacgtccagcctctcactcccgtctccgaggcctccgagccgccggaatccccctctccctacgccgctgacctcgccggggacgccgcgccgcctccggaggatgacgccgccgccgccctcgacgatggggacgacgagcccgatccgccccccgccgccgtccccttcaagcgcctcttcgcctgcgccgaccgcctcgactgggcgctcatgtccgccggcgcccttgccgccgccgcccacggggtggccctcgtcgtctacctccacctcttcggcaccaccatccactcgcttcatggccgccacaaccacgaccttttccaccacatcaaccagcatgctttacacttcctatatattgccattggcgttttctttgcgggatggatagaggtttcatgctggattcttactggggaaaggcagacagcagtgataagatcaaagtatgtacaagtgttgttaaatcaagacatgagtttctttgatacctatgggaacaatggtgatattgtcagtcaagtgctgagtgatgtcttactcatccagtctgcgctgagtgagaaagttgggaactacattcacaacatggctaccttttttggtggtcttatcatcggtttggtcaactgttggcaaatagctcttttgacattggctactggtccgttcattgttgctgcaggaggaatatcaaatatttttctccacaggcttgcagaaaacattcaggatgcgtatggtgaagcagcaagcgttgccgaacaggcaatcttatacattaggactttgtactcattcacaaatgagaccctcgcaaaatattcttatgctacttcacttcaagcaacactgcgctatggaatcctgataagtctggtgcaaggtcttggtcttggatttacatatggccttgccatatgttcttgtgccttacaactttgggttgggaggttccttatatctcatggaaaagctaatggtggtgaagttgtagtagccctgttttctattatcctgagtggcctgggacttaatcaagcagcaacaaacttctattcttttgaacaaggacgtatagctgcatacaggctctatgaaatgattagccgttcaacctctgttgtaaaccaggatggccgtaccttaccttcagtgcaaggcaacattgagttccgcaatgtctacttcagttatctatcccgcccagaaatccccattttaagtggtttctaccttactgtacctgctagaaagactgtcgctcttgttggcagaaatggttcagggaaaagcagcattattcctctcatggaacgtttctatgatccaactttaggtgaagtgcttttggatggagagaatataaagaacctgaagttagagtggttaagaagccagataggacttgtgacccaggaaccggctttattgagcttgagcatcagggaaaatattgcatatggaagatctgccacaactgaccagattgaggaggcagcaaagacagctcatgcacatactttcatcagttcacttgaaaaaggatatgatactcaggttggtcgggctggcctttcactgac

SEQ ID NO: 19279 - DNA, 1384 bp, Oryza sativa
  ref <308>: DATABASE ACCESSION NUMBER: AK069647
  ref <309>: DATABASE ENTRY DATE: 2001-12-06
gatcgtcatcatctcgtccccactcttcccggcgcggcggttgctctccagccatggccgccgccgccgccgccgccgtcgcctgcggcatgtctacgtccttcctcatccgcctctcgccttcgccgccggcgtcttcccacgtgcctctccctcggtctccggcttcgtcggcgcgcccgcggcgagcgtcttccgtctccctctccaccgcgcctaggccgagggcacgcgccgccggctccgactctccctccaactttggaggtcaaacatcactgatgccaccattcagccttatgcttgatgaaggctctagatctaaaaagccatatagatggcaaagggtgttgcttaaagtaagtggggaggctcttgctggagatcacacagaaaatattgatccaaagatcacgatggcaattgcaagagaggttgcttctgtcaccagactaggtgtagaggttgctattgttgttggtggcggcaatatcttccgcggggcctcttgggctggatgtagtggactcgaccgctcatcagcagattacattggcatgttggctactgtgatgaatgccatatttcttcaagcaacaatggagagcattggaataccaacccgtgtccaaactgcatttcgtatgtcagaagttgcagaaccatacatacgccgaagagctgtcaggcatttagagaaaggaagagttgttatatttgctgctggtacagggaacccattctttacaactgatacagctgctgctcttcgttgtgcagaaatcaatgcagaggtagtacttaaggcaacaaatgttgacggtgtgtacgacgcagaccccaagcgtaacccaaatgcccgccttcttgaggctgtgagctaccatgaggtgcaaacaagagacctctcagtaatggacatgactgccattacgctatgccaagaaaacaacattcctgttgtcgtgtttaatttgcaaaaacctggaaatattgcgaaagctattgttggtgagaaggttggcacgtttataggctgcacaaaagatcaggaccagattgtggggaatgcactggatcaagaaagaagattggtgaacgagttatgatttcactggagctctctgtcgctagctgtgtagctgcattgcctattgcttggtaacatgtggatctctagagtttttaggctagaatagcttatccaaatcctggttccttgtacaacctttgagcaaaaataaaaaaaccaatggtaacagagattttccagctgatatagctgctatgttgtcatactatgtacaatggaatctagagcaatctgataaatcacatttatatcttaaaatcattgcatgtggcatgtatgatgtcttcacct

SEQ ID NO: 19280 - DNA, 963 bp, Oryza sativa
  ref <308>: DATABASE ACCESSION NUMBER: AK069648
  ref <309>: DATABASE ENTRY DATE: 2001-12-06
gattcgccatgatcacagccacgtacacaacaaacgcggcctcagtcctcacgcacagttaaatcttgatcagcgtatcaatcgcagtatccagctcccatggatagcatccacgaggagcagcggccgcggcggcggcagcagcagcagcaagaaggaggaggagaagaaacggtcgtggaggtgccggagatggacggcgagctgctcgtcgagctcctggaagcgtccctcgctgcggaggaggatgaggaggctgtagcgcagaggaagcagcagctgggcttcttcacggccgacgtcggcgacggctgggacgggcaggagctgatgaactccatccacccgcaccaggaagaagaaggctgcgaggactgcggcctcgacgacatcctctccgacttcgacggcggcgggtacccgccggcgtcgtcgccaccgtacctctccgagttctggatggaggagatggaccacgccaccgcgggcccgttcgctgtcgccggcgagtgcccgggggaggagtggtacatggacggcatggccatggagtgggaggacgggaggagctactactcgttccactacccgtcctacggcgccgacgcctcctgcacggatcaactgtacagtagcccgttgtgggagtgatcagtgaactccggctagctagtagcccctacgttacgcgttagcgattagtgcatggccttcgcttagactccaagtgactagtaccaccaccaggttccagtttggtagtttgatctgcgttttttgcctcagttttgcaaatttagcgcgctctgaatttgctggagagagcatgagtccatgagtttttttttgtgttatggtttttaccgggcaattcatgccctgttttttaggagtactttcgcacggtcgtcgcgagtgttggtgtatataggtgtgttgagctttgaacaagtgatgtttggc

SEQ ID NO: 19281 - DNA, 2205 bp, Oryza sativa
  ref <308>: DATABASE ACCESSION NUMBER: AK069649
  ref <309>: DATABASE ENTRY DATE: 2001-12-06
aggatgcgaggccacgccacgggtcccgagtagggaacccccccttccacgccccccccggcaatgtcggcgcaccacccgccgcacggcatcgccgccggggacgccaggaaggcccaccacctcggcggcgaccccaagaacctgtcgtggtgcggcgtcggcgtcggcgaccaccatttcctccccaggaagctcgtcgggggcggcggcccctccgcggcgaagctcgcgctcgtgtccttcctcgctgtcatcctcgtcctcgccgtcgacctgtccctcaccggcgccggggcgaaccggcggctgcggctccaatacctgcattacatcggcgacggcggcgggggtggcggtggtggcggggttggtggcggtggcgaagaggccaagaacaacgagcttccttggctctcagtgccggacccgtccaacttcacggaggagctcatcgaccggtggctgacgcccggggggactccgtgccgcgactcccgtacggcgaacatctccatccctgttcttgacgacgccgcggcggcgggcgaggtgaccacgctgggctccgccgagatccacgagttcacgttctgggcgctcgacgacgccggccagcggcgctgccttggcggggacttcttcgagatcgatctcgccggggacgagtggaagtcgcggccccccgtcgtggaccacggcgatggctcctactccttccgcctccaggtcgcgccgcgcttcgccgagggggatttccgcctcaccatcatcctcctgttccgcagcttcgagggcctcaagttctcctccctgaggttcaagtaccacgccgagatgcgccggattcccctcctgttcgggccgagcaactccacgcgcttcctcccggcattggagacctgccgcgccgcggacttcgcgcgcgacgtgtggtccggccgctggacgcgcctcgccaagaacgacagctgcgaggaggtggacgacgccggcaggtaccggtgcctggagccgcagcacccatgcgaggcgccatggtgcgcggggccactgggcgcgctggagagcaacgggtgggtctactcggcgcactgctcgttcagcctcttcacggccgacgcggcgtggcggtgcctggacggcaagtggctcttcttctggggcgactccaaccacgtcgacaccatccgcaacctcctgaccttcgtcctcggcgtcacgaacacgtccgccgtgacgcgccggttcgacgccgcgttcacgaaccccagtggcgggccggggactgtgaggatcacgagcattttcaatggccactggaacatgagcatgaactatcttggtctgcattccctccggaacaaggggttccagcgtcttgtccgttcatacttcttggctgaggaccgtgccccggacattgtcatcctcaactctggcctgcacgacgggtgctactggaccagcgtccgcgcatatgtgcaggctgctgagtatgctgcacaattctgggctggagttatggctgaagtgcggtcgcgtgggcatgccgtgccgaggatgttctaccgaacgaccatcgcgaccggcgggtatgctcgggacctggcattcaatcctagcaagatggaggcgttcaatggggtgctcgtcgagaagttgaggcgtcatggggtgctcactggtgggttgatcgacaacttcgatatgaccttcccatggcactatgacaatcgttgcaatgatggtgttcactatgggcgtgcaccggcgaagttgttatggcgggatggcaaggtcgggcaccagtatttcgtggacctcatgctggggcatgtgctcctcaatgccatctgcaatggatgaaggttcttgcttccatgctcagtaagtttgtgcggctcaatcgtgtacactagagtaggatcctcagggaattgaatttgcttagatgaaattactggcattgaatcaattccagttcctgatatcatgtgtacatcggatatgggggtggggccttagctgaagcatgtatagtgagacatctgatctttcggctatgttgttggttgggatttactctagtgggcgaggaagatcgagttcgatcggagctagctatgagtgaaaatcaggtacatgtaaatacataccaaggctgcttgaggaggcttaatggatatacgaatttagtaggtt

SEQ ID NO: 19282 - DNA, 2641 bp, Oryza sativa
  ref <308>: DATABASE ACCESSION NUMBER: AK069650
  ref <309>: DATABASE ENTRY DATE: 2001-12-06
ttttggtagattcagtttatcagaaaattacagcaacacaatgttactacagaaacacagtgctcactgttctaatgatctatggaacttgttggatatagctgccaaaatgagtggacctctggcatcatatcacccgagagcacttattcagtctctttattcaggtcaatggaaacgggcaaacactgttctgcagcatcttgttcaatccatgcaagcaaataaaatatcaaacaccttgttggagtgcagtttctgtggtaaatcatgccataatattcctgaatgccctttatctgaaagcttcaccgatatgacatctaatgacatatctaatagagggttactttggggtgacaatcaacgtagcacagcctttagtttgctatcaccatcaaattcatatcctcggatggaggatatcaacaccaccactagcacatctcaaagttcagaaataaataagctccttgctacgaatgttagcatatcaacaataagtgacatggagagaacccagatagttgcactttctgatcttttgggtaaaattactgatcagagccatgcatctccctataaaagccttgatgaagcagggagaaggttctgggttgctgtgcagttcgaacgcctatatgcacttaggagatctgaagatccatccagtgccgaagtcttccatgttgattctgcttctatcgcgtgggccttacagtctgattgtcaggatgatctacttaattctgttcttcctgcagaaccaagttggtctgagatgcgaaaccttggtatggggttatggtacaccaacgtgtcccagttaagaaccaagttgtctggataatcacctgtgctgattaggtatgtctgacattgtagatggagaagttggcaaggctgcaatatcttaaaagcaaggacccaaaggactgtgctcttctctatatagcattaaatagaacaaaagtattagttggcctattcaagattagcagagatgaaaaggataaacgtctctatgagtttctctccaggaacttccaggaagaaaaacacaaatctgctgctctgaaaaatgcatatgtgctaatgggaaggcatcaatgggagcttgctatagcatttttcctccttggaggtgatacatcctcagccatcagtgtttgtgcaaagaaccttcaagatgaacaacttgctattgtaatttgtcgacttcttgagggatctggagggcccttggagcgtaatctcattgctaatgtactgctccctgaagcagttgataaaggagaccactggctttcaagcctacttgaatggatgttagggaactactctcagtctgtgaatcaattacttgattgccacctcaagtcactgattgaagaatccagcattcccggtgatacaaatgtctttgcagaccctggagtgggtcagtattgtgcaatcattgcgacaaaaagtagtttcagaaactgtgttggtgaagctcaatctgcaaatttatctaagctttcattagcaatggcttcatgcgccttgaacagatgtggactgcctcttgaagcacttgaatacctatgttgtaactcgggcatagagggaaaggacaacacctcactggatggcggagacaagaagattgtttatggaatattgaaccctttccatgcttcgtccaactggctctcagcatctgtagtcagtgatgttgaatcaaacctgaaaataactatggcttcaaaatatctgtcgcgcgtgctgagaaatcagtcactctgttcacggtgcagcctaccactaactaaagataaggtcctgcaagaattcaacagtaatcacgtgaatgaactttcacgtgatgtcaaggcagcgctacaagtattcgataaaaaattctcacttcaagttgctgatatagctgagaagatccttaccttttgttgcaacgatggtatattttttctcgcgtacgtgttgttatggggtagtatatcatcagatgttggaaccggtacttgtggtcttgaaggttgtgctttccatccaattgattatatgtttatggtgtcaagtaaggagagctgcaagtttcttacacaatatgttgtctcctgctgcttcatatgttctgctctgaacatggactgcgctaatactactccatgcacaattaaagtgggcaagtacattatggcaagtttatcacacttcctgagtactagcaggttacttctgaaacaagacaatactagaacttttgtgttaggtcgtacatcagctatgcttacagttatggacctccttgaatacaacatggagttttccttttcttggttatgtcatgacataaaagcattgcttaccatgaccagtccagttataggtgcttgtgtcaacagagagtcctttcaagtactattagatcagttgctgcaagctgtacatgataaaattcatggtgtatcaattggcacagatgggggcacagtcaatggtttgttgtgtaatatacaacaagaaagaagtgagaatcagagtcttccaattgatgaaaaatggcatttgataggtatttctttgtggactcgattgtcatctttcatgaaacagtttttgactgagttcgttg

SEQ ID NO: 19283 - DNA, 1529 bp, Oryza sativa
  ref <308>: DATABASE ACCESSION NUMBER: AK069651
  ref <309>: DATABASE ENTRY DATE: 2001-12-06
gagtactccactactattgcctgttgcttgtaaccattgcctaccacacatacatcttctttacatctgtgtcttcttcaacaaccagacctccattactccacaaagctgctttctccccctccttccctaggtatcctcaatggaagctgcttcctagatccagccccaatccacccttccttccaagtccccatatccacaaatcaacacaccatgtcttcttgttcttcctcctctccccagaaagccatagatgctagttatcaactatcaactccatggatcttgttcttcccagcttcaaagcccctccaacaccaaagttcagatctgtcctccttcccttcacctagctctatattagaagcttgtgagggctaagatggccatggaggacaatgaatcaggggcaagatgaactctaagatggctggccatggatgaagattgaagctgctattggtctatgaatcaaggggatgatgaactggatcagacgtatcatcttctgtatcgcccgcgcgcgatctggggccgccgtccccgccccaacggtggccgacgccgccctcgccccatccaagggttgttccgcgtgagccatccggcggtgaaccctacagccgagcccatcaggcggcagttcctggagcagctggattaccctttgccaactatcactggttctgctctgttggatgagacaaacctgattcttcatgatttttacaagaatatatctgacatcaggtctcagatctacaaccagcaaggtctgtgacttgcaaagatgaatgttgtcaaggaacaagctctatgggaagaagctgaagagctcgtatgcatttccaagaagatcttcgattccactaatcttgataagaagctgctttaccccttccctagttggtttaactcaagggagactaggaagaagaattatctagatcttacatcttgggttagtttgcttgagacgtatgctaatgagaggagtgctagccctgaagctgatggtgaggcatatgatgtgggtcttcttgatgacaagactggagacgccagtgctgatcttgactatgaaaagagtgcctgctctggagagacaagtgatgctgcctttgatgaagagagtgctagccctggagacgctaccaaagaggctgatattgatgaaccggttgctatcctggggacgccaatggtggcaagatctgtagagtggaggcctatggcttgagttcttcagtgaaggaaaagtacttggataaatgcttcctaacgttgtcatatattcctgatattgtcatgtgtcatctaggtatcatctaggaaagtacttggataaatgcttcctaacgttgtcatatattcctgatattgtcatgtctcatctaggagaagttcagaagcccctgaggcaatctaacatcggctacttatgccgtgataaaagactttgcatggaagtattatctatttcagaatcttgtatgcaatcaaacaactactacttattatggtct

SEQ ID NO: 19284 - DNA, 1744 bp, Oryza sativa
  ref <308>: DATABASE ACCESSION NUMBER: AK069652
  ref <309>: DATABASE ENTRY DATE: 2001-12-06
gtggcggaaggaagattggccggataagccggaggccacggaggggcggtgacgagcagagcggccacggcggccggaatgaagggcggcggcggtggcggcaaggaggccgtcaccgcctccatcctccggttcctcctcctgctccttctccccctcaccgccctctatttcttctacacgctgcacctcctcctcgcctccgccgcctcgtcatcctcctcctcctgcccacctgacgctgcctcctcctcctcctccgtgcgcttgtcgaccaatggcaccagcgcgggtgctgctgcggtgacggtggcggcagggaagaaggcccccgccgcggcctccacggagacgacgctgcagcatgtcgtgttcggcatcgcggcgtcgtcgcggttctgggacaagcggaaggagtacatcaaggtgtggtggcggccccgcggcgccatgcgtgggtacgtgtggctggaccgcgaggtgcgcgagtccaacatgtccacggcgcggacggggctcccggccatcaggatctcgtcggacacctcgggcttcccctacacgcaccgccgcggccaccgctccgccatccgcatctcccggatcgtctcggagaccttccgcctcggcctccccggcgtgcggtggttcgtgatgggcgacgacgacaccgtcttcttcccggacaacctcctcaccgtcctcaacaagttcgaccaccgccagccatactacatcggctccctctccgagagccacctgcagaatatctacttctcctacgggatggcgtacggcggcggcggcttcgccattagctggccgctcgcggaggcgctcgcgcggatgcaggacgggtgcatacgccggtaccccgcgctgtatggtagcgacgaccggatccaggcgtgcatggcggagctgggcgtgccgctcaccaagcacccgggtttccaccagtacgacgtgtacggcgacctcctcggcctcctcgccgcccacccggtggcgccgatcgtgacgctgcaccacctcgacgtcgtgcagcccctgttcccgaacgccaagtcgcgccccgccgcggtgcgtaggctgttcgacgggccgatcgagctggacccggcggggataatgcagcagtccatctgctacgacggcggcaaccgatggacggtgtcagtggcgtgggggttcgccgtgctggtgtccaggggagtaatgtcgccgcgggagatggagatgccggcgcggacgttcttgaactggtaccgccgtgccgactacacggcgtacgcgttcaacacgaggcccctggcgcgaagcccgtgccagaagccggcggtgtactacctctcttcggcgcggcgcgcggccgccctgcgcggcggggacaccacggtgacgcggtatgagcggtggcgccgcgccaacgagacgcggcccgcgtgccggtggaatatcgcggatccggacgcgcatctcgatcacatcgtcgtgctcaagaagcccgaccccgggctatgggacaggtctccaaggagaaattgctgtagggtgctatcttcgcccaaggaagggaagaagggaggggacaagacgatgaccatcgacgtgggagtatgcagggatggcgagttcagccaagttgtgtaatactgtaacctagccaaagtgaaataggatgattcaattttttttctcttctgttcttgtattcttctcggaagattacaaacttgtcatc

SEQ ID NO: 19285 - DNA, 1100 bp, Oryza sativa
  ref <308>: DATABASE ACCESSION NUMBER: AK069653
  ref <309>: DATABASE ENTRY DATE: 2001-12-06
ggttcggatttgccttcctttccaaaccagagagcggtttacagaaaaccgcctttctcttcttccgtcttcttccctttccatttctcccttttcctacctcgcctcgccgcccgcaccgagcaaactcaaaccctcgccgcaagaaagaaaaacaaatcgagagaaaaaaccctcgctgctcgccgccccaagcgaagccagccatggtggtgtacacgcaggagcacgtgtaccggcacccgtgggaccgcgtcacggcggcggcgtggcggaagttcaccgacccggcgtcgcgcacggcgctctcccacgtcgccgacgtccacaccctccaccgccgcgtcgacccggaggcggggcggctgcaggctgcgcgctccatcacggtgcgctccccgccgctccccttcatcctccgccgcctcctccccgccgcggcgtcgtccccgtccggcgcggcgctctgccactgcgtcgagacctcgctcgtcgacgcgccgcgccgcgccatggacgtcgtcgtccgcaacgtctccctccgcggcctcatcgaggtcgaggagcggtccacctaccggccgcacccggagcggcccgaggagtggacgcagttcaggcaggagaccacgatccggtgccgaccgctctcggccctcgccgccgtcgcggagaaggtcgagacccgctgcgccgagagattcctgcagaacagcgccaaggggagggaggtcgtcgagcggatctgccggtatctcgaggccgaggccgccggtgctgcatcctccgccatctgagttggcctggtttgcgcctcctcacttggccttccttgatctgatcggatcgaaggattcgctcgatctgtgctgcgtgcgcgcggcgggacctcgcctcttggccaggtcccttgcagttttccatttttttttatgaaatgatgagctgaatcctgaatggaataaagcttctggacatatacttaatttcttcttgaccgtggaaccatgttaaccccaatttgtgcctgttcttgttaagcatattcagatatgctatgacatttctagttgttattgtgctgatttgacgaattcgtt

SEQ ID NO: 19286 - DNA, 2768 bp, Oryza sativa
  ref <308>: DATABASE ACCESSION NUMBER: AK069654
  ref <309>: DATABASE ENTRY DATE: 2001-12-06
ggatggccttccctccccatttcaatctttcagtggatgaacaatcaaccagcagagtttttctgaagacattggtagcagagctgtgcgcaggaaggaaaatggcatggaactagtacaggatagcaaaaagcttcgagcactagagcaacgaggaagggggaactaaattggttaatcggttagccctggcaatgggcaaggacggcggcgaccccggcggcggcgggtacccgctggtggcggtgtgcatcgacaaggacaagaacagccagaacgccctcaagtacgccacggagtcgctcgcccacaagggccagaccatcgtgctcgtccacgtccacaccaagggctcctcaggtggcgtggaggacgcggccgggtacaaacagccgtcggacccgcagatgaaggacctgttcctcccgttccgctgcttctgcacgcggaaagacatccactgcaaggacgtggtgctggacgaccacgacgtgtccaaggcgatcgtcgagttcgccgcgcacgccgccatcgagaagctcgtcgtcggcgccaccgccaggggcggcttcgtcagattcaaggcggagatctcgagcagcatctccaagacggcgccggacttcagcaccgtgtacgtcgtctccaaaggcggcaaggtgacgtcggtgcggcaggccgtccgccaggcgccggccgtctcgccgctccgcacaatgatccagggccccaagcccgataacgtgtccacgcagaaatggacgccgccgcctcctccgtccacgacgagacctgacatcgccgggacaccgaagatacaggacaacttcattatgtcgccgttcgcgaggggggcgaacacgtcggtgaggaaggcgttcccggactactcgatgccggagtcgtcggacatctccttcatcagctccggccctcgccggagcttggtcctgtacccgccgcggctgtcgtccggttcggacgcccacgaccaccacagcttcgaggcgacgcggccgcccagcatgtggggcggcgactccttcggcagcgactcccagtccagcaactcctccttcgcttcctcccttcccatggaggacatggaggccgagatgaagcggctgcggcttgagctcaagcagaccatggacatgtacagcaccgcgtgcaaggaggcgctcacggctaaacagaaggcgatggagctgcagcgctggaagacggatgaggagcagcggtcgcacgagacgcggctgacggaggagtcggccatggcgctgatcgagcaggagaaggcgaaggcgagggcggccatcgaggcggcggaggcgtcgcagcggctggcggagatggaggcgcagaagcggatcagcgcggagatgaaggcgctcaaggagaccgaggagcgtctcaagtccatgggcggcggcggctcgcgcggcgcggtccggtaccgcaagtacaccatcgaggagatcgagctcgccaccgagcacttcgccgacggccgcaagatcggcgagggcggctatggcccggtgtacaagggccacctggaccacacgccggtggccatcaaggtgctccgccccgacgccgcccaggggaggtcgcagttcaaccaggaggtggaggtgctcagctgcatccgccaccccaacatggtgctcctcctcggcgcgtgcccggagtacggctgcctcgtctacgagtacatggccaacggcagcctcgacgactgcctgttccggcgcggaggcggccctgtcatcccgtggcagaaccgcttccgcatcgccgccgagatcgccaccggcttgcctcttcctccaccagaccaagcccgagccgctcgtccacccgcgacctcaagccgggcaacatcctcctcgaccgcaagtacgtcagcaagatcagcgacgtcggcctcgcccgcctcgtcccgccctccgtcgccgacagcgtcacgcagtgccacatgacgtcggcggcggggaccttctgctacatcgacccggagtaccagcagacgggcatgctcggcgtcaagtcggacgtctactccctcggcgtcatgctgctccagatcgtcaccgcgaagccgcccatggggctcacccaccacgtcgcgcgcgcgctcgaccacggcaccatcgtcgacatgctcgacccggccgtccacgactggcccgtcgacgaggcgcgctgcttcgccgagatatccatccgctgctgcgagctccgccggaaggaccgccccgacctcgccaccgtcgtgctcccggagctcaaccgcctccgcgccctcggcgaggacaacatgcagctctgcaacaccatgagcggcggcggccggagcagcatgcacagctcgccctacaacagcaactcctccatgcatcaacctcatcgacaaaccgatatggcgattgagcacagcgtagggaggtcgtcgtacgacgcggacacgagccagcaagccatgcagggacgaaggctcaactacaactaaattaaagctgacctgagttttgcactacgactgcaataggcgttactgcaaggctcacttaagcatgatttttatccaatgcttctcctgattaatctgagtaggaagctactgtttgttaatgcagagacagagagccatgttcatgcctacatgttggtgtggttgtaaactagttgtcggtcgtttcttgatcctcctgttgtttgtaaatgacctgacattttaaaactaatcaaaatgctgacagttc

SEQ ID NO: 19287 - DNA, 1296 bp, Oryza sativa
  ref <308>: DATABASE ACCESSION NUMBER: AK099102
  ref <309>: DATABASE ENTRY DATE: 2002-08-28
ggcagattactaccaccacctccccaaaatcccaatcgaatcgaaatcgaatcgagtcgagtcgccgccggagccggagacggaggcggcagcggcgcagcggtaatggcgagcctcaccctgccgccggcgcccaccaaccctcgccaggacgccatcgacctccacaaggccttcaaagggtttggctgtgatagtacaacagttataaatatacttactcatcgtgactcgatgcaacgcgcgctcattcaacaggaatacaggactatgtattctgaggatctctctcgccgtatatcatctgaactcagtggacaccacaagaaagcaatgctgctatggattcttgatcctgctggacgagatgcaactgttttgagagaagctctgagtggtgatactattgacctgagagcagccactgagataatatgttccaggacaccatcgcagctgcaaataatgaaacagacttatcatgcaaaatttggtacttatcttgagcacgacattggtcagcgcacatcaggcgaccatcagaagctcttgcttgcttatgtggggattccacgctatgaaggtcctgaggttgatcctactatagtgacacacgatgcaaaggacctctataaagctggtgagaaaaggctgggcactgatgagaagaccttcatccgcattttcactgaacgcagctgggcacacatggcatctgttgcctctgcttaccatcatatgtatgatcggtcactggagaaggttgtgaagagcgaaacatctggaaactttgaacttgctctgctaactatcctcagatgcgctgagaatccagccaagtattttgcaaaggtcttgcggaagtccatgaaaggtatgggcactgatgatagtacacttataagggttgtagtaacaaggactgagatcgacatgcaatatatcaaggctgagtactacaagaaatacaaaaaatcattagctgaagctatccattccgagacctcaggaaattatcgaacattcctcctttctctagttggtagccattaggctacatttcgtcgaccctgtggcacttgacgttccatgactatcctaaatgcagtggttctacctggaaactgtaaaatttcgccatcattgtgctctctattcgtgtgtgcttgcttaaaaatgtgtgtatatatataacctgggcattaaatagttggtgcttaatatggtttggtggttccatctgacaagtcactcgttactcggtgcatttattcgaataagtgatggtatttggtc

SEQ ID NO: 19288 - DNA, 1397 bp, Oryza sativa
  ref <308>: DATABASE ACCESSION NUMBER: AK069655
  ref <309>: DATABASE ENTRY DATE: 2001-12-06
gcttttatcttccgatgaggaattagttagctctcgaacagtagtacgagatttgtgcaagttgtggtcctgtcgtcatcctgtggagttgtggtgagtgtttgacgaattttttttttttttggcggctcgattgcaacccgcggcccgcaacaaatccgacgccaaatcggacacggccggcgactccggcgaaccaccaccacacaccaatcctcctcctcctcatcgccgcctgcgacggcgaggcggcgagcgatggattccctgggcgtgctgctggtggcgccgatgaacgcctacctggagcaggagctggaccggcggtgccgcctcttccgcctctgggagtcccccgccgaccgccgcgacgactacctccgcgcccacgcctcctccatccgcgccgtcgtcccctacgccctccagggcgtcgacgccgccatgatcgacgccctcccctccctcgagatcgtctcctccttctccgtcggcatcgaccgcgtcgacctcgacgcgtgcctccgccgcggggtccgcgtcaccaacacccccgacgtcctcaccgacgacgtcgccgacctcgccgtggggctcgccatcgccgcgctccgcaagatcccccaggccgaccgctacgtccgcgccggcaagtggaagtccaagggcgacttcacgctcaccactcggttcagtggcaagagagtcggcatcatcggtttgggcaggatcgggctcgccgtcgcgaagcgagtggaggccttcgactgcccggtgaactactaccagaggacgaagcaggatcaccccggctacacctactacccgtcggtggtggagctggcggcgagcagcgacgtgctggtggtggcgtgcccgctgaacgagcacacccggcacatcgtgaaccgggaggtgatggaggcgctggggcccaggggcgtgctgatcaacatcggccgggggccgcacgtcgacgaggcggcgatggtggcggcgctggccgacggccggctcggcggcgccgggctggacgtgttcgaggacgagccgaacgtgcccgaggcgctgctcgggatggacaacgtcgtgctggtgccgcatgtgggcagcgcgacgcacgagacgcgcacggccatggccgacctggtgctcggcaacctggaggcgcatgtcgccggcaagccgctgctgacgcaggtggtgtgagctaattgagtgactggatgattctgatttgattgattccaaagcaggtgcaattcgacaaaatgtagtatgtactgtttcaggatgtgaaaaatctgttttccctttttgtaaacacggtcggtctgggacgatccagtaataacgatttaatatttgtcattggaaatgtgaaaagtgtgttgggc

SEQ ID NO: 19289 - DNA, 2347 bp, Oryza sativa
  ref <308>: DATABASE ACCESSION NUMBER: AK069656
  ref <309>: DATABASE ENTRY DATE: 2001-12-06
gacgtcccgacgactccacgcagaggaggaggaggaggaggaaggaaacccacgagggcacgaggccgtcgtacacccgccgccgatcacgtcgacggaggcggccggagcccactctggcaggccgtgcgatctcacatggcgccggtggagacgcggtcgagggcaggaagggggcggccggcggggtcccgatcatcccctgtgcgccgccgggacggcggcgtggctgcctcccctggctcccaatcggcggcatcaacagagcggaggaagaagaaccgaggttcgaagaggaatttgtccgatgggagcggtgaggacgggaggccgggtaagaagataaatctggaggaggaggagttggaggaggagaggatgccactggaggacgaggcctctgcttgcagttcttgcagttctccgctatgtgagccatacatacctcgagtggtgattggatgcaatgctaagggcaaggagatttataagccaatcgaatgtgatgagttgagggcacttgatctgtgggaagcgaaataccaggcaaaaagagatcggcaaatgaacttgtgcactctaaaaccatgcatacctcccacatgcctagtcgatccgaagcttcttcacatccgtgaatcttcaactgaaactgttcttcgtgctgccaagtttgtcatgggtctttcatcttctgtagatggtaatccactatcacagtgttctggtttcattgtcgattgggatgacaagagcaagacgggaattatcatgacatcagcacttcttatttgcaaaaagtcttcacacacagacgattggaaatatgcaagccaatatgctactgatgctcaggttgttgtgcactttgtggatggtaccactgtagagggtcaatttctctattgtcaggagcattacaagattgctttctataagattgtgctggataaacccactcacttgccctcttttaataagggagtaaaatgggctgaagaagtcttcatactgggaagagatggaagttcacatctgaggataagccatggtagggtgcagtatttaaatgcacatgtgaatgaacgccatcactatatgtacattcatggtgtcgatgcagcttctgagtactacaacggggggccagtcattgacttcagaggagatgttgtgggcatgtataacctcagtacaagggggtcttttattccttctaacatcctacttaagtgcttgcagttgtggaagaagtttcagtatgtcttcttttctcattttgtcatgatgttaccaaattaatttattactaatcgagcgtgttctgcaattaaaaaaaagaagcttattgattatattggtttaatcttcataagatagtgggagccatccaactagaatatcaaggctgtccaactagaatattaaggctggtttggattggagacaggaacttcaataatagcatctagatgttttgtttaatattgttttttggccgcactattaatatatggttctaactagtagaagttctaccctaccaaattcggtagtgccaaaaccttcccataatatttgtaatacgattgtttgtacagctacatccctcgaccacatcttcagttgaagctctggggcatcaaatttcttgagcctgcccatattgagataatatcttgcaagtgcaacattgatgatggtcttattgttgaagaggtgtcaataggttcttgcgctgagagacttggggttagagttggtgatattattgaatgcttcaatggaaaatgtatttcttctactgttgagttagaaaatatgctgctgcagatcttggaggatcattttgatgaaggaaatagtcttgattctacaatagatattgagattggagtattccacacacgcaaaggtgttcggagcacactgaatttgacaacaaatgtatctgacaagggagaagttgttgtaagaggcgatttacccatcaccggagaaaagatttatacaagttgtccaattgaccaagcagatccagacgattctcaaatctctctcacgggtagaacatcatcatcaccaagatcacttgaccatgaagatttaggttctccccattctcccactcgcgaagagaggacacccacctgaatatccaccagctggaccaagcttcgttttaaactgatccgtgcttacttttgcttatcaacttgtacatagatagtctcatcatacaccacttgctctcttctacccctgggccctgctaattgtaatctcactacacgccacttctgttctcttctccattttcttggaattcaacggttcttttatactc

SEQ ID NO: 19290 - DNA, 3003 bp, Oryza sativa
  ref <308>: DATABASE ACCESSION NUMBER: AK069657
  ref <309>: DATABASE ENTRY DATE: 2001-12-06
gctcttcgccaaatcggaaaaaaaaggaaatcgtcgcccagaccgcccgcgcctcctcctcctacgccttctccgccttctgccaccgcgcctcctcctcctccttccgccgcctcgcctcctccccacctcccctcgccgcctcctgcgcgcgcccgcaggacagccggccgccgccgccggctccgactgcacgcccgctggaaccacgcgccctaccccgcagcctccttgtgcacgcccgccggttccccactccctcctccacctcttcacaatctcatcccgttcgccctgccgcatggagccgccgctgtctactcctcgcgccgtcgccgccgtttgcccttcgcgccaccgccgccgacttgcgcgcgcccgccggagccacctcgccctaccccggctgttcggcctcttgcttccctgctcacactgggacagagaggaaggagagacgggatctgcccaccctgccgcaccgcctcctcgcgcgcgggccgaacagccggtgtccttagttccctactcgcgacgcgatggagaggaaggagaggggggatctatttgcgccgacaccgtctcgcctgctccttcagctccgtcctgccctcgccgccttgccgtaccacgccatagtccactggaatgacctcgctcgctgaagacgacatgacgacatccctctaaagtctaaaccaggtactaactattctccccctaatcagttcaatctgcattttaagtcttgagtgctctcttaattgacttcagtgattgtcaacacagggatgagctaaatatatttgtctcagataaatgatttctaccagttctcaaattagatggatggctgcggcaatctcagttttgttagtataagctcttcaagcctttcaacgctatggctatcagatctttcttccctaacaaaattgataacacaacctgctactacaagtattttcagttaaattgattaaccattgcaagttcattgagatattaatttcttgcaggtcataaactgtccagatttgaatgaactcagtgagatttacctatctgattaatctgatggataatctaggtcgtcatgctcaaatttgagaagcgcgcacatatcctcaattcactaaactgcctttgatctttctcaactccaagtattgtttctgattttacttttatatgttcaaattgacttgatataggttacatatttttacccagataatttcaaaatcagaaccgaccaccaaaatgtttatacatccgttgattattttttttgtagtaaggactgctgatatattttgtcttagtctacattggagaacaatgttggtggctccacacgagcagtagcagaaggacttccgcaaggtgcacctctccatgcttcctctgcagcgcaggagcagttcaagaggctcttcccaccagcacgctgggcctgatgatcaatgccaacctcacgtcctcaccgtgcccttctatcaccagcttgtcagccgatcagaggtaactctcacatctcctgctactaggtctgcctcgctttccttttctttagatgtgatatactactgttcggaaaacaattatttcttcaatacattcatttctcaggttgtggaggttgaggtcaatggactgaggcaaaagagtagtgctgataaacgaatgcaggtatatacaagtcactggtataacatccatttcagatttctatagaattattttgtgaaatgtaagcatacctcttatgcttccatctccatggaattcattcaggtagttggagatgtttatcttgatgaatccatctccatgaaagcttatctcttggtttgttagtcaacttcacatcacctgactcatcgatttcatcaacttcatttgtctttagtgtcgatttgataaacgacgtttgtctgtatccgctgcattgttgctgctaatattatcgcctccttactctactgcgatagattgggtggtggtttcttccctacgactgccattgaaatttggaaatctaccaggctcctatttattctggtcatgagagggaggagaaaacatctcttatcgcccattcgctctccggttggtctgccatcatagcctctggtgagtcaagctatcatcattcctctctgattcatttatattccttacaaaatttgacgtgttttttctgcatggtgccctgcctgcatggtgtaagtctaaatggtttgttgggcttgagatttggatcgatcctagcttttaaataagtagcttcaaaaatttaaaggtaccttattttcaccagttaggcattgttaatagaatctaaatttaaaattgctaatgaaacgcatgagagaaatttttcgtttgtagttagatctgtagatgcttgcattattatatagataatgatcgctgaaaactgcttattttttggtagaatatttctatgactacctcaaaagataataaacttatccgattgtaattgagccaaatacataatgaactgattttgttgcttaatgagccaaaagcactatttgatctctacagatttttttcctccaatcctctactgcaacctctttattctgttgcggtgtataatctatgcataatatgtactaactttatgcttctcgagttgaacctacccagcaattaaattttgcccttttacagtcttatgttgtatgacacagactcattcaaataaaaaaatctatctcgccctgtgacctgttctggtgccaaaatcaaggatagtaagggtgtaatgaagtgatgatataccattcagtccgggacctcatggtggtgcgcaatagatatgattaatacatatggcataatagtgtttgtacttatctttccattggaatttttctatgtagatcatcatgcccaatcatgttgttacaaatctcaaatgacagaataatgtctatctatacataataaagtaacttcaaatgcagc

SEQ ID NO: 19291 - DNA, 2571 bp, Oryza sativa
  ref <308>: DATABASE ACCESSION NUMBER: AK069658
  ref <309>: DATABASE ENTRY DATE: 2001-12-06
ggtcgtctcgtcctccacacaaaccctccccaactccacgaatcccgccgccgccgccgccgccatgaagcgcgccgccgacgggatggagaagcccaatttcctcacgcgggaggagcgggagaagctggcgctcgagcgccgccaggccgccgtcaccgaccagcgccgctccgccctcgacctgctccagtcgctcccccgcccccctccgccgccgccgcctcccctttccaacccccctcgcgactcctcctcctcccaccaccgcgactcctccgaccgtgaccgtgaccgtgaccgggaccgggatcgggacagggaccgggaccgtgaccgggagcgccgccgcgacgacgactcccgccgcgaccgagatcgggatcgggaccgcgaccgaggcgactcctcccgccgcgaccgcgacagggagcgcggtgaccgcgaccgcgaccgtgaccgggagcgcggggacagggacagggagcgaggggacagggagaaagatcggctggagaagatggcggagagggagcgggggaaggagctggacgcgatcaaggagcagtacctgggttccaagaagcccaagaagcgggtcatcaagccgtctgagaagttccgcttctcgttcgactgggagaacacggaggacaccagccgcgacatgaactcgctctaccagtcgccccacgagggcccgcctgctctacggccggggattcctggctggcattgatcgccgcgagcagaagaaggtggccgccgcgcatgagaaggagacccgtgccgagcagcggcggcaaggccggtctggatgaccgccctgaggacgacgcagttgataagaaggaggctgatgctgcagcgaagtatgatgccttcgacatgcgcgtggacaggcactggactcagaagtctcttgatgagatgacggagcgggattggcgtatattccgtgaggacttcaatatatcctataagggttctaaggtaccccgtcccatgcggaagtggtctgagagcaagcttggtactgagctgcttcgtgctgtcgagaaagctgggtacaaggaaccttcgccgattcagatggcttccattccacttggtctccagcagcgctgatgttattggtattgctgaaacaggctctggcaagactgctgcttttgtgctccctatgctttcgtacattacccgcctcccacccataagtgaggaaaatgaggctgagggtccttatgctgttgttatggcacctactcgtgagcttgctcaacagattgaggaagagactgtgaaatttgcgacctatcttggcattaaggttgtgtctatcgttggtggtcaatccattgaagagcagggttttaagattagggcagggctgtgaggttgttattgcaactcctggctcggcttcttgattgcttggagaggaggtatgctgtgctcaaccagtgcaactatgtggttctggatgaggctgataggatgattgatatgggcttcgagcccgcaggttgttggagtccttgatgctatgccatcgagtaacttgaaacctgagaatgaggatgaggagcttgatgcaaaaacgatctataggactacctatatgttcagcgccactatgccacctgctgtggagcggcttgctaggaagtacctgcggaacccagtcgttgtcacaattggtacagctggcaaggccacagatctcatcacacagaacgtgatcatgacgaaggagtcagagaagatgtcaaggctccagaagatactcacagatcttggggataagccagccattgtgttctgcaacacaaagaaatcagcagatgctcgtgcgaaggatctagacaaggcaggcttccgcgtcacaacactacatggtgggaagtcacaggagcagagagagacgagccttgatggatttagaaaccggcggttcactgttcttgtggcaactgatgttgccgggcgtggtattgatattcccgatgttgctcatgtcatcaactatgagatgcctagttcaatcgatacatacacacatcgtattggaagaactggacgtgcaggaaagaagggattggcaacttcgtttttaactctggagaacactgacattttctttgatctgaaacagatgcttatacagagcaacagtcctgtgccacctgaacttgcaaggcatgaagcatccaaatttaagccaggctcagttcctgatagacctccaagacgaaatgacacagtctatgcaactcactgaagcatctactgcagaatgggccaaagatcctccagtattacaagggaacttttggaaacagaaggatctaattctagattagtacttcgaggtacaaacattatgatgattactcgttttttattatatgtctgaaaactatgccctatattgtcatgaatttaggatatgtttatgatggtttagttctggacttatgtatcttttcttattgttggtgatcaatgcaaactctactatggcccatgtagtgcattattttaccgcctaaatatatatcatattttgtc

SEQ ID NO: 19292 - DNA, 2022 bp, Oryza sativa
  ref <308>: DATABASE ACCESSION NUMBER: AK069659
  ref <309>: DATABASE ENTRY DATE: 2001-12-06
ggtgcctcactcacagtcacaggtgcttgcttagcttagcttagctttgctgctgctccttctcattcataagccagcagctagctagcaagcagcacacacatatatcacaggccatctctctatccctaattaagctatatactccatatagctagctaaacacaggaggagtggaggaaggagaggctagctgatctagctatctgcagtgattagttaaaatgatggcttctgataggttggatgcagaaaggatcatagagtacttcaagggcaagagcatcctcatcactggagcaactggctttcttggcaagattcttgtggagaagatactgagggtgcagcctgatgtcaagaagatctacctgctcgttcgcgccatcgaccaagcatctgcaaaccaacgcgtccaatctgaggtgacggagacggagctgttcagcgtggtgaaggagaagcacggcaagggattctcgcgattcatcgaggagaaggtggtcgccctcgccggcgacatcatctacgacgacctgggcctcgatcccccgttgcttcaacacctcgccgacaacctcgacgtcatcgtcaatggcgctgccaccaccaacttctacggcaggtatgatgtgtcgctggatgtgaatgtgctgggagtgaagcatctgtgccaattggccaagaaatgcaggggcctcaaggtcttcctccatgtctccactgcttacgcgggcggcgagcaggaggggctaatccaggagagggcgttcgaggaggggtgggcgctgcgagaggggatgcacctggacgtggacgcggagcttcggctggtggccgacgtgcgtcgggaggttgaagacgacgacgacaaggcgcggaggaaggcgatgaaggagctggggctcgccagggcgcgccacttcgggtggtccaacacctacgtcttcaccaaggccatgggcgagatggtgctgtccaggatgctgctgcaaagctcgtcgccggcgccggcgatcaccggcgccggcggcgtggtggtggtgcggccgagcatcatcacgagcatccagcgggacccggtgccggggtggatgcaggggacgcggacgatcgacacgctcatcatcgggtacgcgaagcagaacctgtcgtgcttcctgggcgacctggacctggtgatggacgtcatcccgggggacatggtggtgaacgcgatgatggcggcggcggtggcgcactccggcgaggccgggcaggagcggccggcggtgtaccacgtgagctcgtcgctgcggaacccggcggcgtactcggtgctgtacgaggccgggcggcggcacttcaggagaagccgagggttgggaagcgcggcgaggtcatccccaccaaggagatgcacttcttcaagaccatcgccagcttccaggtgtacatgctggtgaagtacaggctgccattggagatcctccacctggtgaacctcctcctttgtggcctcttctcccgcctctactctaacctcgcccgccagtaccgctacgtcatgcacctcgtcgacgtctacggccccttcgccttcttcaaaggatgcttcgacgacataaacttggagaggctgaggcagaggatggggaagagcaggaaccctcaagacgatgaaatgttcaacttcgacccaaagaccatcgattgggaggactacttctacaggatccatatacccggtgtgctcaagtacatcctcaagtaaaacacacatggatgatgatggattatatcatcatgtataacagctggatgaagaagacttaagtattgtactctggctctgctcctccctgttacaaatgccagcaatctacctaagtatgctgatactagcttgtatgggaatatgcatgcttgctcaaagaattaatctttaatatatgtcaactactagactaagtaatgcttgtatcggagaagaatcaccatatcttaatcaataataatacactgtgtgcttgtgcttgtgcc

SEQ ID NO: 19293 - DNA, 1313 bp, Oryza sativa
  ref <308>: DATABASE ACCESSION NUMBER: AK069660
  ref <309>: DATABASE ENTRY DATE: 2001-12-06
gctcgagccagccatagcctcctctcctctccacgcgacgagcaagtggaggagcggcggcggcggccggcgatcgagctgctcgatcggccatggatgctccagttattacactcctcgtcttcctcgtcgccgtcgctgcggcaactgcggcggcggagatgccgcggatggagcacccgcgcaagggcgacgggtcgctgagcctcctcgccgtcggcgactgggggcgccgcggcgcgtacaaccagtcgatggtcgccgcgcagatgggaatagtaggggagaagatggacatcgacttcgtcatctccaccggcgacaacttctacaagaacggcctcaccggcgtcgatgataaggccttcgaagaatccttctccgacatctacaccgccaagagcctccacaagccatggtacaccgttcttggcaaccatgactacaggggcgacgccctcgcccagctgagccctgttcttcgcaaggtcgacagccgctggatctgcatcaagtccttcgtcgttagcgcagagatcgcggatttcttcttcgtggacacgacgccgttcgtgctcaagtactggactgatcccaagaacagcaagtacgactggagaggggtttctccccgtgaaacctacattgcaaatgtcctcaaggatctggaggatgcactggagcagtccaaagcgccgtggaagatcgtggtcggacaccacgccatcaggagcgtcagccagcacggcgataccaaggagctcctggagcatctccttccaatcctcaaagcacatggagttgatctctacctcaacggccacgaccactgcctcgagcacatcagcagcagggacagcaagattcagtacctgacgagcgggccgggtcgaaggcgtggcgcggggtgcagacggcgaacacggacaaggtggagttcttctacgacgggcagggattcatgtcgctgcggctgacggcggcggaggctagcctcgccttctacgacgtcgccggcaagatcctccacacatggatggtcgccaaaccagccaccgggtactgagatagtgagattgcgagcagctagctagctctgtgatgtacttgatggtgtaatggcaagcggtgtgtggtttcaacctaaacccccgaggtgttcgacggtgaaacttgggttttggtgctattgctatgtcaacggggatgagttttctcatgattgattgaaatcttattcgtctaattcctccttcgggacttgttcggtttgaatggaattgaagaaaattgagagggaataatttcacatc

SEQ ID NO: 19294 - DNA, 1953 bp, Oryza sativa
  ref <308>: DATABASE ACCESSION NUMBER: AK069661
  ref <309>: DATABASE ENTRY DATE: 2001-12-06
ttgaagccgcggaattccggaagcgactcgctctcgtcggctcgtcgcacgcgcgagcccactttgccggccaccgggatggcgccgccgcggccctcgccggcggcgaggctgctgagggagtacgggtgggacctgttgctcggatcgattgccgcgttctacgccgtcatggtgccctacaccaaggtggaagagagcttcaacgtgcaggccatgcatgacattctctaccacaactatcatattgagaagtatgatcatttagaatttcctggtgttgtccctcggtcatttataggagcattggttgtatctgttatctcatcgcctgcagtcttcgtaatgcatttatgtcatgttcaaaaggtttatggtcttctagcagttcggatagtgttgggtagtattatcctgatgactttgagacttctccgagttcaggtaaaaaggaagtttggtcatcatgctgaagcattctatctgatactaactgctacccagtttcacttattgttctactcaaccaggccccttccgaatgtcttagctttagcttttgttaacttgacatactatttctggttcaagggaaaccatcgacgcacattacaggccctgattgtcgcagcagttatttttaggtgtgacatgattttgcttcttggtacaataggacttgcacttttgctgagcaggtctatttctctattggaagcaatcaaatgttgtgtaagcactgccattatatgcattggcttcactgtactggttgactctatactgtggcggcgaatcctgtggccagaatttgaggttttgtggtttaattcagttctgaaccggagttcagagtggggtacacattccatccattggtacttcacctcagcacttccacgctccatgctggtagcatatcctctttgcatggtcggtgctcttcttgacagaaggatagtgccatacatacttccagtcttctcatttgttgtgctttattcaaagcttccacataaggagcttcgcttcattatggcttcgattcccatgcttaatgtgtctgcttcactagcagcaagcagaatatataataacagaaagaaaactgggtggaagttactttatgttctcatgattggtggctttctttccagtctaggatactctggtgtaactttcatggcatcctacaataattatcctggtggatatgctctaaaggctctacatgaagcagattctgtaatgaaggacaaaattgttcacattgatgccttcactgcaatgagtggagtttcacgtttctgtgaaagtgaatatccttggagatattctaaggaggaaaaaatttccatcgaggaatatcaggaaagaaatttcacatatctgctgaatgaacaccgccatatcagtggctacaagtgcttgtttgccgtggatggattctccagagcgaaaattcaacctcgaatcccactactctcactggtgaaagagccaaaagtgtttgcacatgggaatacgagagaccctgatatctttcgctgaattggcccggttgcccttgaggtgaggatactgatcggatctctaccacaggaccactaactgccaattgtgaagatgcccagcctgtgtaaatcactggatcaatcgagccccttcccaaaccccagctcggaagatactacaccttgccacctttgggctattcaaggctcacactttagcgcaaaaaactcgcgtttttatgttgaaaccatgtgcttcggtttctgacctagttgctcgtatctggtggccaaaaggaggggaaaaaaaactgaggaataggagagaccataacaatcttgtgctctagcaagttgctccatttcatacacaagtaccatgtatcctatcttacattacgtcaacccacttgctgtatagcgtgactcttggccgatg

SEQ ID NO: 19295 - DNA, 659 bp, Oryza sativa
  ref <308>: DATABASE ACCESSION NUMBER: AK069662
  ref <309>: DATABASE ENTRY DATE: 2001-12-06
gatcgcggcggcatcagcagcagcaagagtcctcaacgtactcatcgtccacgcgtacgcacgcacgtactctagcagcctagcaggcagaagccacgagcagccagagcttagccagccatggaagaggacgagatgaggatgagagagaagctggccacgatggacgagaggcaggcgatggcgatgcggctcacctggatctctgagctcgtcgccagcaacaagaagtcgatcgccggcaacaaggcctacatcctggccctgatcgacgccatcgacaacgaccggtgcccgtacaccgccgccgagctctccgacaagatccgcgagctccgggaggacagggtgaccgtcatcctccccgcgcaggctgtcatcaagacgatgatcgactcggtgcgagcagctacgcccgccgccggcggcgatggtggtactcgtcgtcgtggcgccgacgacaactccggtgccattggctgtggcccaactcaccagtcgcggacgatcagccggtagagtatgtaattaggatatatgtaacccatcgctgtcgatttaatttagccaggagtagtttcttttttcaattacatactctaccatgcaatgaagggtgtgtttagttcacaccaatatcgaaattttggttgaaattg

SEQ ID NO: 19296 - DNA, 1220 bp, Oryza sativa
  ref <308>: DATABASE ACCESSION NUMBER: AK069663
  ref <309>: DATABASE ENTRY DATE: 2001-12-06
gttgcagacccaagtgccaaagctttccatgtccaccgatctcaccatcccaccttccatggaggcacccggcgccgacatccaggcgctcatccagcgcctcaggctccaccgcccgcgcccctccccgtacgccgccgcggcggccccctcgcccgacgcggccgcgccgccggccgagctgctgttccgccctcggagggccgccgtgctgatctgcctcttccgcggcgccgccggcgagctccgtgtcctcctcaccaagcgctcctccaaactctcctcccactccgggaggtttctttgccaggaggaaaggctgaggagggtgatgctgatgatgcagcaacagcattaagggaggcaaaggaggagattggacttgatccagcttctgttactgttgttgcctctcttgagcacttcttgtcaaagcatcttctggtagttgtccctgttgttggcatactctctgatatacaagcatttaaacctgttcttaatgttgatgaggtggatagcattttcgatgtacccttggagatgtttctcaaggatgagaaaaggacatctgaggggcgtgaatggatgggacaagaattcacaattcattacttcaattacgagaaagggagtgagaagtacgtaatatggggtctgactgctggcatcctgatacatgctgcttcagttgtattccagcggccaccagactttcctgcacgaacagtgcaattcaacttgccgaagtactcaaaggagtgttcttcaatgccatgagcagcacctgtgaaacactaatgtttacaatacaatttcagttgtagaccattggggtgtacagcagagcagatttcatctcaaaagattggtactgaatcaaaaggttgttttatagtttatattctttgcacattttttgtacataatactatgagaacattaacatttatgaaaatgttaatgctattcgagtacaccccaaatccctgattagatgggagtaatccattataaatatgggtacccattagtccgctagttttactaaaaacacactttttctttatttctttatttgtaggtgaaatagagttgggcaatgggcacctatggattaaactactgtcatccctacccccagttgtcccaataagtattgatgtaaacaaagacttgtactaaaacagtttgtaatatgtcaaaatcaggttgagtcc

SEQ ID NO: 19297 - DNA, 2511 bp, Oryza sativa
  ref <308>: DATABASE ACCESSION NUMBER: AK069664
  ref <309>: DATABASE ENTRY DATE: 2001-12-06
gacttcgttgtcatcgtgcgacttcttcgcgttgtgagttgtgacccgtgaagaccgctatatatacacacgctactagcccctgttgcattgtatacacatattcattgcctcattggtactttggttagctatgggctccctacccgccgccgacaagccgttgccggcgctccggtaccctccggctcgccgcgacgacgacattgtcgacgactaccatggagttaccgtgccggacccctacagatggatggaggagctggagtcggaggaggtgaaggggttcgtggacgcgcaggcggccgtggccgaggcggtgctctccacctgcgacgaccaccgcgtccgcctgcgcgggcagctcaccgcgctcttcgaccacccgcgctaccgcgccccgttcaagcgcgccggcagctacttctacctccacaaccccggcctccagcctcacagcgccctctacgtccagcacgggctggggggcggggaggaacctgacgtgttgctggacccaaacacgttcagcgacgacgccaccgtgtcgctcgccatgttcggcgtcagccacgacggcgagcacctggcgtacggcaccagcgcgagcggcagcgactgggtcaccatccgggtgatgcgcgtgcgcgacaggcggcacctgcacgacgagatatgctgggtgaaattctcggccatcgcgtggactcgcgacgggaaggggttcttctactctcgttttccagctccaaagaatgatggggcgccattgggtgctgggatcaagactagtgttaatctcaatcatgaagtctattaccattttcttggaaccgatcagtcagaggacctgttgtgctgggaggaccctgaccatcccaagtacatttacacccctgaagtttcagaagatggcaagtatgtgattctgtcagtcgcagaaacttcagaaccggtaaacaagttgtactactgtgacctctcggctctccctgacggcctggaaggcatgaagggaaaccatggcaatgccatgcttccttttgttaagcttgtggatgaatttgaagcatactacgcactcatcgccaatgacgacactcaattcacatttctcactaacaagaatgctccaaagtacaagctgtcgaggattgatgtcaacgagccacactcatggatggatattctccctgaagacgagaaggctgtcctagagtcggcttgtgcagtccatggtgataagcttctggtaaactacctgtcggatgtcaagtatgtcttgcagatgaggagcttggttaccggggagttgctccatgacatacccattgacattggcagcgtcaatgggatctctggcagacgtgacaattcagaggtgttcatcgagtttgctagcttccttactcccggaatcatctataggtgtgatgtcagcaaggagactcccgagatgaacatatacagagaaatctcggttggtggttttgatcgcacagattttgaagcaaagcaggtgttctaccctagcaaggatggaaccaagatcccaatgttcatcgtgtcgaagaaaagcatcgttcttgatggatctcacccgactctgctgtacggctacggtggcttcggcatgaacatgacgccccatttcagcgtcacccgcatcgtcctcatgcggaatctcgggttcgtgtcgtgcatcgccaacatccgaggcggcggggagtacggcgaggactggcacaaggccgggtcgctcgcgaacaagcagaactgcttcgacgatttcatcgcggctggtgagttcctcgtctctgcaggctacacgaacccgagcaggctgtgcgtcgagggtgcgagcaacgggggccttcttgtagctgcctgcatcaaccagcgtccggacctttttggttgtgctctggctcacgtgggtgtcatggacatgcttcgattccacaagttcaccataggccgtgcatggacctgtgatttcggctgctcggagaaggaagaggaattccactggctcatcaagtactctcccctccacaacgtcaggcggccatgggagaaaggtcaccggaggcagcagtacccttccaccatgctgctgacggcggaccacgacgaccgcgtcgtgccgtcgcacacgctcaaattcctcgcgacgatgcagcacgtactgtgcacgagcgtgaaggagagcccgcagacgaacccgatcgtcgcgcggatcgaccgcaagagcgggcacggatgcggccgctccacgcagaaaatcatcgacgaagctgcggacaggtatgcgttcgcggcaaagacgatggggatctcttggatcgactgaacaagcctccgagcagttggtgccttggtgggtgctaatgggtttaacttcttatagcatataaccctataaaatttgagagttggatctagaatgagatgaacacaacttctgtatatttttggcttaaaaatatttatgggctagatatggttgtg

SEQ ID NO: 19298 - DNA, 1201 bp, Oryza sativa
  ref <308>: DATABASE ACCESSION NUMBER: AK099103
  ref <309>: DATABASE ENTRY DATE: 2002-08-28
tcaggtcctcggccatggcgttcttctcccatcaccacctccagcagccgcatcctcaggctccgccgccgccgccgccgcagcagcagcagcaaccggtgcccccttccttcaggaacgcgctgccggtgccggtagatgggcagatcccggcgcctcttcccttcttcaacccgccgccggccttccaggaccagcccgcgcagccaccactggtggacgcgatggggcttacggccgcggcggggctagggtggaggcagcctagggagcaggagctgctaggagagaactcccagatgtcgtccatcgatttcctgcagacgggctccgcggtgtccactgggctggcgctctctctggaggacagacgccatggcggtggcagcggcgctggggctgggaactcctccggcgattcgccgttgctcctgctcccgatgttggatgatgacatctctcgcgaggttcagcggctcgatgcagatatggaccgcttcatcaaggcccagagtgagcggcttaggcagtccatattggagaaagttcaggcaaagcaatttgaggcgctggcctctgttgaggataagatacttagaaaaatacgggataaagaggcagaagtggagaacattaacaaaaggaactctgaacttgaggaccagattaaacagttggcagtggaagttggtgcgtggcagcaaagggccaagtacaatgagagcatgataaacgcactgaagtacaacttggaacaggtatgtgcccatcaaagcaaggatttcaaagaaggttgtggtgatagcgaggtggatgacacggcatcctgttgcaatggtggtgccgccaatttgcaactaatgccgaaggagaacagacactccaaagatttgaccgcatgtagagtctgcaagtcaagcgaggcttgcatgctattgttgccttgtcggcatctttgcctttgcaaggagtgcgaaagcaagctgagcttctgcccgctatgccagtcttcgaaaatacttggcatggagatatatatgtagaatagaatttatgtattactcgagtatcgtcccagatactgctgtgtttatacaacagtctattgttaaactgtaccactagtatggaccaacatgagatgccactggatcgaaaagaccaccatttatggtggatgtactgctgcaaatgttacttt

SEQ ID NO: 19299 - DNA, 1802 bp, Oryza sativa
  ref <308>: DATABASE ACCESSION NUMBER: AK069665
  ref <309>: DATABASE ENTRY DATE: 2001-12-06
ggcctcgatactcgatcgctagctcatctgccgcagtgcaagccgtggtgttcatccgtcgtcagacctgttaccagatctggacttccctgagatattgattactactcttgtcgtccgggaccgattgagttcatcagacaccatgtttcgtccggaaattctgcggttgagcgtggaaatgacgggtttgtcgaattccgcggactctgctccggcttcacccaacaatggaactgaaccgccgatgatgaggacgaacggcggggagcagatgggtggcagtgaggcggcgcacattcgcatcgacgaaatcatccgacgtctcgacgccgcggagaaagaagcacaagcacaagtcgtggaggcaaggcgcgagatcttccgcgtcccggggaggcatcggctggccgacgaggacgcttaccagccgagcttgttctcggttgggccttaccaccgccacggcacggaggagatgggcaggaacgagctcaccaaggttcggttgatgaagctccaactcggcgccgacgccgatcaggcggcgtcgctgcagagagagtgcctgctgtccatggcgtcgctggagcaggaggcgaggcgctgctacgacggcgatgtcgccatggattcgggggaattctgcatgatgctgctggtggacggggccttcctgatcgcgatgctcaccgcgtttggcatccaggaacaggatgacgcgcctgctaataaagaagaagaagaggattctggaccgggcactggcagcaggacgcagaagagggtgctcgtcgacgggtttctcgacttggtgctgctggagaatcagatcccgttcttcgttgtgcacagcatcttcggcttgctcgtcgatcatgctggtacaactctagccaaaacggcctggaatgcggtgaggaacttcatgcaacacatcccaacggcttccaacgccgacgacgtcaaggaggactgcaagcatctggtcgacctgtgccacacctacctgaggccagccgggtggcagcaggcagcggcggcgggtggtggtcacatccagcggttcaggacggcgacggagtacagtgaatcgggcgtccggttcagggtcaggtcagattcagagcctgcccctcgtttcgggctcctcgacgtggacttctcgtggggcgtggtgaccatgtcgcgccacgtgatcgacgagaagatgagctgcgtgttccgcaacgtgctggcgttcgagcaggacagcggcgccggcgtggagcgcgacgcgtacgtgacggcgtacgtggtgttcatgtcgcagctgctggggagcgctggggacgtggcggtgctgtcccggtcgggcgtcatggagcactcgctcgggaacgacggcgacgcgtgcgccctgttccgggggctcgcgaggggcctcgccttcgacaccgacggcgatcactacctgcgaggggtggggctggagctcaacaggcaccacggacgccgcctcaaccgctggctcgcgtgggtggcgcgccgccacttcgacaacccgtggctcatattggcctggctcgccgccgccgtcctcctcctctgcacgctcgtgcagacggtgttcgcggtgatgtcctacaggccaagtgcaaaactcaactcctagctagttagctatactctaaccggccctgtcggtccgtcctgtgattcaatttgctgggcaattaattactgcttgcgttttgttatatatgttcttgttgtctccaatttcataattgatcttagcctaacacgatcaccttcttgct

SEQ ID NO: 19300 - DNA, 1472 bp, Oryza sativa
  ref <308>: DATABASE ACCESSION NUMBER: AK069666
  ref <309>: DATABASE ENTRY DATE: 2001-12-06
ttgtcgacgagctcatcgagaaggccgacggcttcgccggcgtcttccccgagcacaagtacgagatcgtgcggaggctgcaggagaggaagcacatctgcgggatgacgggggacggcgtgaacgacgcgccggcgctgaagaaggcggacatcgggatcgcggtggcggacgcgacggacgcggcgaggggggcgtcggacatcgtgctgacggagcccgggcttagcgtgatcatcagcgcggtgctgacgagccgcgccatcttccagcggatgaagaactacaccatctacgccgtgtcgatcaccatccgcgtcgtgctcggcttcctcctcctggcgctcatctggaggttcgacttcgcgcccttcatggtgctcatcatcgccatcctcaacgacggcaccatcatgaccatctccaaggaccgcgtcaagccgtccccgttgcccgacgcatggcgcctccaggagatcttcgccaccggcatcgtcctcggcacctacctcgccctcgccaccgtcctcttcttctgggccgtccgcgacaccgacttcttcacgaggacgttcggggtgcacccgatcggaggcagcacggaggagctgatggcggcggtgtacctccaggtgagcatcatcagccaggcgctcatcttcgtgacacgcgcgaggagctggttcttcgtcgagcgcccagggctcctgctcgtcggcgcgttcctcatcgcccagctgatggcaacgctgatcgcggtgtacgcgaactggccgttcgcgaagatgaagggcatcgggtggtcgtggggcatggtcatctggctcttcagcatcgtcaccttcttccccctcgacatcttcaagttcgccatccgctacttcctcagcggcaaagcctggaacaacgccttcgacaacaagacggcgttcgcgaacgagctggactacgggaagagcaagagggaggcgcagtgggcgatcgcgcagaggtcgctgcacgggctgcagcaggcggagacgtcgacggcgctgttcgacgacaacaaggactacctggagctgtcggagatcgcggagcaggcgaagcgccgcgccgagatcgccaggctacgggagctgcacacgctcaagggccacgtcgagtcggtggtcaagctcaagggcctcgacatcgacaccatccagaaccactacaccgtctagctagcaccatcgatctcacacgcatgaataccatacatgatcgatgatgctgctcgttagcttgataagtgagacaggatattctttttttttcttttttttttggcagcttaatttaacggggtcaggagactgtcttaatttggtcagatgaataatgggggtacgtagcttttgttgttttaatggttttactttggagaggttgtaggtttgttggtacgtttgattggtcgaagaccagaataaaatgagggctaatttagt

SEQ ID NO: 19301 - DNA, 2281 bp, Oryza sativa
  ref <308>: DATABASE ACCESSION NUMBER: AK069667
  ref <309>: DATABASE ENTRY DATE: 2001-12-06
ggccgccttcttcccctctcactcccacctcactaaaaccctagcccaaaccccacctcctctcccgccatggctgccgcggcggccacctcccgcctcctccgccgccacccgcctcccctccccctcctcctccgctcctccatctcctcctcccgccctctcctccagcagcccgagctctcccccgccgccgcggccgatgcggcccccgccaccgatgccgcgccgctcccgccgaagccgagcacggggagccccttctacggcgagaactggcggaaccccgccgcggcggccaacccgtcctcatcctccctcctccccgcggtcgtcggcggcggcgcgcacgcccgcgcggcggcgtactcggcgtccccgggcgcggcggagctgaaggagacgttcgcggagtggatggcggagcagcggtgggaggagatgaagcagctgttcgagttctgggtgaggtcgctcgacccggcgtccgggaagcccaaccgccccgacctcgacctcttcaaccactacctccgcgcgcagctcatgtccggggcgctcccgatcgagatgctggatctcgccgagcagatgcgcgagttcgagatcacgcccaacacggcctcccacaacctcatcctcaagagcatggtccaggcccaggaggctgatggcgccgagaagctcattgagcggatgttgcaaacaggaactcaaccagatgacgaatcctacaatttggttgtaaatcttctgattaaactgaaccgggtggactctactttgaaatatttggatttgatgcttaaatcaggctacacaatatcttcctctgtttttgttgagtatgtccgggcatgtgtaagatctggtagattggatacattggcatcagtcatagagaagtgcaaggctacagatcagaacaaagtcttgtgtccaccatggtcctggtgtgttgaaatagcagaagctgcttttgaagctaacaacagcaagctgggtctttttgctttggaatatcttgcaagatggattgctcgttctgagcgtgttattcctcctcttcatctttcagttgatgaaggtttagtactctcagctctaagtgctgctgccagaacttgtagcactgatctcctgaatgctgcttggtcaatattacgtaagtccttgcaccagaaaagggcaccgacgccagaggcatatcttgccaagatttatgctcattcatccattggtcatcttcagcgggcttttggtaccctacgtgaatttgaaaatacctatgggaactttgaggatattgattcagagctcttctcaccgttcacttcattgcgaccactcgttgttgcttgctgtaaggatgggtacaccacactggactcggtctatgtgcaattggagaatttaagttctgcagattcgccatacaaatctgttgctgctcttaactgtgttatattggggtgtgcaaacatttgggatcttgagcgagcatatgaaacttttgaggcaataaaagaaaagtttggacttacacctgacatacattcttacaatgcgcttttgcatgcatttggaaagcggaaaaagactgaagaagcttgcaacgtctttcagcatctagtaagccttggtgttaagccaaatgcaacaacttatggccttcttgttgacactcatcttgtaaatcgggacgcaaaagctgctcttgctgtaattgctgagatggttgatgcgggctttactccttcaaaggagacacttaagaaggtccgaagacgctgctcccgtgaatcagattttgatagtgacgagaaagtgcaatccctggctaagcagtttaactaccgaatgggtggtgaaaaccgcagggagatgctctttaacattgaatacagcgctgagttcacaagtactcctagtccaagttgattttgatgatgccggtgcgctctagtagacgtaacgtgtaccctcgctcactttgctggtacctgaagggcacggaagctgtagtctgtaaattatacttctttgtaccaacttccctaattatttcaagcatctcaagctatcatttttgttggcagaaccctcaacaggatttatgttaggatttcagaataagggtcctaatagatttttttttttgcctgctcaaagcaccatgttttacaatcaatggatgtttgctcaacttatctctcagttccagccttttttacggctctcgtgttatttgttcctatactgcatgccatgtcaattatgt

SEQ ID NO: 19302 - DNA, 1969 bp, Oryza sativa
  ref <308>: DATABASE ACCESSION NUMBER: AK069668
  ref <309>: DATABASE ENTRY DATE: 2001-12-06
gaccagcacagggtcgtcgtcgtctccttcctctcgccagtgccaccacagctcaagcgtgatccagcgtcgggccgcgcgtgcgagcgagcgagcgtgcgagatgtcggccgccggggaggaggacaagaagccggcggggggagagggcggcggcgcccacatcaacctcaaggtcaagggacaggtctgcctctcttcttgctctcaaactcgtagccttattatccagtagtacataggagtaagtttgttccatagtggatgtatggattgtagaattgagatttgagggttaggttcgattggtaagcccgcaagcgatatagtggcggttgttatgttcggcgatggattcggattgctttgcggagctattagcgtggctgcgaccaagcacttggttcgatggtttgactttgcttgattcgtccagatagggaacgttttgttttatgttgtgctgatgctagtgtgaagttcaatttatgcatgaatcgatcttttgttaggttgttgagtgatgagtttcatgtggatttataatgggaattcgtatttagttgaatgagcatcatcagcgcttggtagtctcacggagtttatggataagggttttatttatggaaggatttgagcttggattactttcatcctaagtttgcagcaacatcttttagatgatttgacaataatgttaactcagtaacactgctagtgtagggtacataaactcaggtttgatgccagcaatctgaggacactgaaattttgatttttgatttttgccataaaaatgctaacttttcagcaaacaagatgaaaaatatggtcagtattgctcgtttaatctgctagagtttgcaaattagtatccatcttccattctttaacttgtatgatatcttgtaaaaatgtggtcagtattccttgtaaaaacttactgtgggttttatgaactgtggggattgtatggttaatactaccttcactaactcttctgttgttcatgctaatgtgtatgctggtctattgaatttgtagcaatagttggaagaatcactcgctcattcatttcaacagattgtatgtttttgttgcatgcaactattgttctgaacgttgtcgtactgcatttttcagtaatgggctaatcttttgcttcctgaaaagtgtggcacaatcgagagcgtactttgttaaatatatcagtttacagtagaaatacgtatcttacaagttacagtcaagtctagagaccataacttcagatgcctttgtttttttccccttgagcatcagaatttcctctgtacatgatattttggttatgcagcactctcgaatgagaaattatttgacaatagttgtgtttttttgtgctcgattcgttaacaatttcctttgttctgtaggatgggaacgaggtattcttccgcatcaagagatctacgcagctgaagaagctgatgaacgcctattgtgaccgtcagtctgtggatatgaatgctattgcattcctatttgatggtcgtaggctccgtggcgagcagacccctgacgaggtgcgtagcttatcttctcttcatactcaattcagtatttgcggagcctagcaaatcatcaccaatccattactgatgaccattgcaaacttgttcagctcgagatggaagacggggacgagatcgacgccatgctccaccagactggaggctgcctgcctgcctagaagcttaggagttcttgcagcctcgtaaaattgtgcctttagtaggctcaatatctagaagtacatgaaaaaaaagaagcctaaaagaacttgtgaggctttggtcctgtgccatagctgaaggacattagaagagctttgtttggcaaaaatattttggtacttcggctgttatgactcgtttatccataccctaatatgtccatcgttgctggtgcttggcatgttttcttttgc

SEQ ID NO: 19303 - DNA, 2927 bp, Oryza sativa
  ref <308>: DATABASE ACCESSION NUMBER: AK069669
  ref <309>: DATABASE ENTRY DATE: 2001-12-06
gtggagagagagatttagagtttcagagtttcagagaggcagtagaagagaaaggaggatcatcatcttgatctgaatctcgggaagtttttactgtggcctgatgatctgagttcaaccaaggctcgaattttgtaagagaagccaagcaaagaaagtctcgcggagaagagaagaagaagaagaagaagaagaagaagaagagctctctgaccaaagcggcggcggcggcgagcggcggcggaatggaggggcagtcgcagcaccgggcgccggagagggaggggagccacaactacgacatcgagagcacggacgggtccggcgggctgtggcggcggaacggctcgtcgtcgggggcgctgctccgctacaacgacagcggcggcggccgcagcgggagcgccggggagccgctgctgcggaagcgcaccatgaacaccacctcccagatcgccatcgtcggcgccaacgtctgccccatcgagagcctcgactacgaagttgttgagaacgaccttttcaagcaagactggcgatcaagaaagaagaagcagatatttcagtacattgttctgaagtggaccttggtgcttcttattggcctgttgactggacttgttggcttcttcaacaatcttgcagttgaaaacattgctggattcaaactgttgctcacgggtaatcttatgctaaaggaaaggtatttaactgcatttttcgcttatggaggttgcaatttggtcttagcagctgcagcggcagcaatatgtgcttacattgcacctgctgctgctgggtctggtattcccgaagttaaagcatatcttaatggagttgatgcatattcaatattggcccccagtacgctctttgtgaagatatttggttcaatacttggagtttcagctggatttgtacttggaaaggaaggtcctatggtacatacaggggcatgtattgccaacttgcttggtcagggaggatcccgcaagtaccggcttacatgtaattggctaagatattttaagaatgacagggataggcgggatttaattacatgcgggtctgcagctggagtggcagctgccttccgtgctcctgttggtggtgtcctatttgctcttgaggaagcagcatcatggtggcgaagtgctcttttgtggagggcgttctttacaacggctgttgttgctgtcgtgttgagatctcttattgagttctgtcgtagtggaaaatgcggtctctttgggcaaggtggattaattatgttcgatctcagttcaactgttgcaacctacagtactccagatctaatagcaataattatccttggaataattggtggaatctttggaggcctttttaattttctcttggacaaggttctccgtgtttacagtatcataaacgagagaggtgctccattcaagatccttctcactataacaatatcaattatcacatcaatgtgctcttatggtctcccttggcttgctgcgtgcactccatgtcccgtggatgctgtggagcaatgtcctaccattggacgctctggtaacttcaagaactttcaatgtccaccagggcattacaatgatcttgcatcactctttttcaatacaaatgatgatgccatccgcaacctctttagcaatgggactgaatctgagttccacatgtccacccttttcatctttttcactgctgtgtactgccttggaattctgacgtacggtgttgccgtcccatccggtctcttcatccctgttattctcgctggtgcaacatacgggcgcatagtggggacacttcttggatccatatccgaccttgatcctggtctttttgcccttcttggtgcagcatcttttcttggtggaacaatgagaatgaccgtgtcagtctgcgtgatccttctagagctcaccaacgacctggccatgctccctctggtcatgcttgttcttctcatatcgaagactatagcagataactttaataaaggagtttatgatcagatagtggtaatgaaaggcttgccatacatggaggctcatgctgaaccatacatgaggcacttggttgctggcgatgttgtgtctggcccacttattacgttttcaggtgtcgagaaggtgggaaacattgtccatgcgttaaggttcacaggccacaatggattcccagtggttgatgagccacctctaacggaagcacctgaattggtcgggctcgtgacaaggtctcatctgttggttttgctgaatggcaagatgttcatgaaagaccagctgaaaactagtggtagctttgtccttcaaagattcggtgcctttgattttgccaagccagggtcagggaaaggcttgaaaattcaggacctggacttcactgatgaggagatggaaatgtatgtggatctccatcccgttacaaacacctcaccttatacggtggttgagacaatgtcactcgcaaaagctgcaatcctttccgtgcactaggattgaggcaccttttggttgtgccaaagacaccagataggccacccattgtcggaattctcacgaggcatgatttcgtcgaagaacatatccacgggctgttcccaaatctcaatcctcacaagttccactcgacatcgatgggaggctgatttttaagcgttttgccgccactcgttttatgtgaagtataggaagtgttcattatatgtaatttacaaaattgtgtctgtcatttgttggagagagctcatcatctgtacatcggttgtagcatatcctcttttacaggattcatcttgtagcgtattttgtctcagcttgcttattttgagtctgacaggaagcgctctgtaaatgtagagcaaacattcggaacaccgaaattttatatcataaagttgtgctaaggcatatttg

SEQ ID NO: 19304 - DNA, 1861 bp, Oryza sativa
  ref <308>: DATABASE ACCESSION NUMBER: AK069670
  ref <309>: DATABASE ENTRY DATE: 2001-12-06
gtgccacatcaatgaaggagatggctgcacaggatccaagcctgctgcttggaacaactcctcaagggaacacctgcctccacatctcctccatccatggccatgagggattttgcaaggatgtgctgacgctaaacaattctcttctcactgtcgcaaacatggatggtgagacaccactgctcactgccgtgacaaatggacacatgtctttggcctctattctacttgaatgctgctgcacactagggttcagtgaggcaatcttgcaacaagacagaaatggttgtaatgcactgcaccatgccattcattgtggtcacaaggaccttgcactggaattgatattaaaagagcctgccctatcaaaagctgtgaacaaatacagtgagtcaccaatgttcatcgcggtaatgagagattttacagatgtttctgagaaactgttgggaattcctggatctagccatgttggaacatatggccacaatgccttgcatgctactgtgagaaatggaaatgcagttatggctaaaaaaattttggagggtcgtccttggctggggaaagaacgaaccagagagaggaagaccccaatcctgatgacggtaatttgggacaagatagacgtgcttcgtgtgttgttggaacatgatgtgcttttagggtatgaatgctatgatgatggtggtaatctgagccctcttcttgttgctgctgcatatcgaggtcatgttgatgttgctcaagagcttcttaaccactgtccagatgctccctattgcgacagaaatggttggacatgccttcatgaagctgtaaaggaaggtcagacagagtttgtggaatttatcctaaggacaccacaacttcgtaagctcatcaacatgcgaaataacaaggacggacaaactgctctgcatcaagctgtccggatgtgcaatcctaaaattgttgcctcgttgttgtctcataaagacacagacttcacactgaatgatcacaaaactggccagtcagtaatttggcaattatgtttgggttcagagcgtgccaagactttaaactggaatgaagtgtccatgcttatgactaaagctgatcctgaagctgcaaccacgcttcaccgtcagttcgcaaggaaacgactaactgatgaattagcaaggaatgttaagtcactcactcaaacatacacaagcaacacttcgctagtggctattctcatggcgacgataacctttgccgcagccttcaccctgcctgggggatacagcaacgattctggaagcgagggacttcctgtcatggcaaagaagttagcgtttcaagcattcttgatctctgacaccgtagcaatgtgctcctcgcttgccgtcgcattcataagcatcctagcaaggtgggaggatcttgaattcttgctttactacagatcctttacgaagaagcttatgtggtttgcatacatggcgaccactatagcgtttgcaacgggtttatacaccgtgttggccccacgaatgctgtggttagctgttggaatttgtttcctttcggttttactgcccattctcactaagctgctaggtgagtggcctgtcgtgaagctcagatttcgtttgggtaagactttcaagactgatctccttgatatggtatgacgtcatcaaatttatattatttgttctgctttccaacactacatataagttcatgcaaaatgtatgttgtaatatatacattttattttggtgatatgtctagaagatatcatggagagttggagacgattataccagagacaatatttatgagttactccctctatctcaaaatataagacataattattttttcc

SEQ ID NO: 19305 - DNA, 2017 bp, Oryza sativa
  ref <308>: DATABASE ACCESSION NUMBER: AK069671
  ref <309>: DATABASE ENTRY DATE: 2001-12-06
gactgccagaatagcagaaatatttttgtttgacaccccgacgttatataagcccgcgagccgccgccgccgccgccgctgctagggcggacgagcgctcgccatggcggctagccgagcgaggcaactccacgctctctacctgacgagaggatgccgtgacccagacatgtgggccaacctcgccaaggtctacgcctccaactccttcctccgggaggccgctatcatctactcgaaactactgccccatcgtactcaccacctgccccttgtcatcgtcctcctcaaggcaaccgcctcccgcgcggatcccgtcctcggcagggccctccacgcggaggccgtgaaatccgccaacgcccacgaccgcctcgtggggacgacgctggtgtccgtgtactgcaagtgcggcctcctggccgacgcgcgcagggtgttcgacggaatgctggaccggaacgccgtgacgtgcaacgccatgctcgccgggtacgcggcggcgggagacatggtgagcgcggaggcgctgttcgccggcatgggctcacggactcccgtcacgtgggcaacgctgatccgggggttcgcggggaagggcgacatggcggaaacgcggcggtggtttgaggccatgccgctgggcatgcagaacgtcgtcacgtggaccgtggccgtgcaggcctacgttgccgcgggggacatggagaccgcgagggagctgttcaacaagatgcctgcgcggaacgcgtttgtgtggtcgtcgatggtcaccgggaacttcaaggctggcaatgccgacgaagcgcaagcggtgttcgacaaaatccccgtgcgcaacttggtgaactggaacgcactaatagcagggtatgccaaaatgggatgctgcgagaaggcactggaagcatttcactccatgctaaaggacaagatcaagccggacgagttcaccatggcaggtgttctctctgcctgcgcacagctcggttcgctagagcaagcgagaaaggttcacaatttcatcatccagcaccgtatccggaagaaccagttcgttatgaatggcctggttgacatgttcgccaagtgcggtgacctcgctttcgcacgaaatatcttcgacaacatgcaatggaggaacaccgaatgctggaactcgatgatctctgcactttccagccatggacagagcattgaggctattcggttgttctccaagatggagtgttcggagcagaagcctaatgagatcacacttcttgccgtactcggagcttgcacacacggaggatttgtagatgaaggactaagaatcttcagcaaattcgatatttacggggttgctgctgcagtagagcattacggctgcctggttgatctcttgggccgttctggaagattgagggaagcttatgagattgtcaagaacatgcttgttgaacccaatgaggtgatctggggctccctgctcggagcttgcagggtgcatggcgatgcagagatgtctgaactcgtatcaagtgagatccaccaattgcactcccgtcgtgtgtcaaccaacgatgcagagtacatcttgctgtcaaatatcatggcctcgtcggagaggtgggagcaggctgaacgcatgaggagaaagatggcgctccatggagttgggaagaccccagggtgcagttcagtggagctcgagattactgaacaccaagtatgtgcaggcagtggtacgttatcccagctacactgactgcattttttgcatgtcccaaatgttcttccgaaagtgttttcacaagttgcccagaaaagaaaagcccctcatgtgctggatattctattaactgtacttcttatacatagatgattagacaaggacattagattattagacaagggaattatctgttctgttgcatccctttatcaactggtgctggcatagaaataactacacacttcgtgtcaattttatatgctaatatcagtcaacaggcacaattgaattatgtatttg

SEQ ID NO: 19306 - DNA, 1327 bp, Oryza sativa
  ref <308>: DATABASE ACCESSION NUMBER: AK069672
  ref <309>: DATABASE ENTRY DATE: 2001-12-06
gcagtgttgcgtttcgcttccaaatgctgatggctacgctgcgtccggcgccggcgtcgatggtcgttctctgcgcggtggtcgtcgtcggcgcggtattcgtcgtggtggcggagggcggcggcagcgaggaggcggcggcgtcgacagggaaagcagcgatggtgccggcgctgttcgtgttcggcgactcgctgatcgacaacgggaacaacaacaacctggcgtcgttcgccaaggcgaactactacccctacggcatcgacttcgccgccggcccaaccggccgcttctgcaacggctacaccatcgtcgacgagctcgctgagctgcttgggctgccactggtgccaccatactcccaagcgtccgggcatgcgcagcagcttcttcagggcgtcaacttcgcctccgccgccgccggcatcctcgacgaaagcggcgggaacttcgtgggacggattccgttcaaccagcagatcgacaacttcgaggccacggtggagcagatcgccggcgccgtcggcggcaaggaggcggcggcgtccatggtggcgcggtccatcctcttcgtcgggctgggcagcaacgactacctcaacaactacctcatgcccaactacaacacccgccgccgctacaccccgcgccagttcgccgacctcctcgccgaccgctacgccgcccagctcaccaggctgtacaaggccggggcgaggaagtttgtggtggccggagtggggtcgatggggtgcatcccgagcgtgctggcgcagagcgtggagagccggtgctcgccggaggtggacgcgctggtggtgccgttcaacgccaacgtgagggcgatgctgggccgcctcgacggcggcggcctccccggcgcgagcctggtgttcctggacaactacggcgtgttcaaggccatcctcggcgacccggcggcgcacgggttcgccgtggtggaccgcggatgctgcggcatcgggaggaacgccggccaggtgacgtgcctcccgttcatgccgccgtgcgacggccgcgaccgctacgtgttctgggacgccttccacccgacggcggcggtcaacgtgctcatcgccagggaggctttctacggcggcgccgacgtcgtctcccccatcaacgtccgccgcctcgccgccctctgaatcgatccatcaaaccatcaatagcaataaacgaattagatatcgatgatcatgcatgatcgatgacagcatgcatgagagtgtgctcaccttcagctaattaagccactgagctgatgctacaagtatatttgatcagctatttatttttgttcctt

SEQ ID NO: 19307 - DNA, 841 bp, Oryza sativa
  ref <308>: DATABASE ACCESSION NUMBER: AK069673
  ref <309>: DATABASE ENTRY DATE: 2001-12-06
gaatggcgaccgacgcgatcctcgagacgatcaagccgcggcggagcgcggagcgcgagaacctccccgtgacgaacgccaccggcaagggcagaggcggcgaccacctcatcgggctgcggcggcggatgtcgtcgttctcggtgcgcatccagccgctgatgtcgtcggcgggggccgggggcgcgttcaggcgggcgacgtcgatgccgtcggtgaaggcgctggcggcgcaggcgggcgcggtgcggcggtggtgggggtggggtctcgggtgggtgatgaaccggaggccggcgttcgcgcgcgacctcgagatgaacgacgacgaggccgccgccctcggctgccactgccgcggcacgtggcgccacgtcttctacaggctccgcgccggcgcgcgccgcctcctcggccgcgacggcctcccgctctccgcccacgacttccgctacgactccgtcagctacgcccacaacttcgacaatggcgacgccgccgccgccgccaggccggagccctgatccgatctcgccggcgaaaaaccgaagctaacgtacagctccctcaataagcagccgatctggtgatggtggtcaggtatatatatacatatatatagtacatatatatttgtgtgtgatgaactgatgatgaacatgtcgcaaatggccaagcaaatcaagatcggatcatgaacttaaagctgtagtgtatatcattaattcctccatttttgcgttcttgccgctgctgtctctttctctttctctctttgattcttggaaatgtaaatgtcttgtaatcagacgaacgaacagatgatcatcagtggagaatt

SEQ ID NO: 19308 - DNA, 2241 bp, Oryza sativa
  ref <308>: DATABASE ACCESSION NUMBER: AK069674
  ref <309>: DATABASE ENTRY DATE: 2001-12-06
gcccaacccaccttccgacggcgaccgggccgccatatccctcctaccgtttgttcctcctcctcctcttcttctccccccctatctctctctctctctcccctccctcccctcctcgctcaccaactcctcctgtcccgactcgcgagcgaatccgccgagcagcccaagaacaagggggaaggaggaggaggaggaggaggagggatgggggggattgcctcgtgaagtgatccgacatacatatccctcccagcttggggttcgaatcccaatcccgagcggaaaaaaaagtctgaaagttaacgcgtccttcggccgcggattcagaattctgcgaatataagtacattacggtgggccgtgataccaatttgtaccgagcaattaattgaaggttagagtttgagcttataggagatgaagtgattggagctgaatcctgttgctgaaagcagcgatttcgtgtcaaaatttgatgcctttgcttggttcgagagctgtacatgcttgatactgttgcgatcctgcaatgtcccgaaggaatgccggggcaatgcagcgggaggggtcagtcaaggactgggaggaatttgacccctcgccgtctcccaagctggcgtactcgcagtcctatgttgcaatgagggggcttctgacatcggtggcctcgctggaccttgtcctgatgtcgagcagcctcaagtctgcttgggcagctatatcatcccacaagcatgcccggtccttggagaggtcaaggtccaagggaatgagcttgaagagggccatgctgcagttattagtgtgcttcatggttggtatcttcattgggttcacgccacccttttccgtggatctaccaggaaagatagcttctgaaaatgggaggcttccatttgatggggatgccattgacagaagacaaatggtagagcgtcaaggcaccaagttggagccattcgtagccgaggctgaatctgaagcaagcagcgagccacaggttgaagagggcccaccagttcctgcaatgttggatgacgaggcggactttgttgaagcctcgcctatcgtacattctgttaatgattctggcattgttgtgaggaagcacctgataattattacaacaacctctgttcgaccacaccaggcatattacttaaatcgtttggctcatgtattaaaagatgtcccgcctcctcttctgtggatagtggcagagtggccatatcagtcccgcgaaactgcagaaatactgaggtcttctgggatcatgtacagacatcttatctgcaatcggaatactacaaatataaggaagattgttgtctgccaaaagaataatgcaatttttcacattaagaagcaccgtctagatggtatagtgcatttcgctgatgaagagagagcatactcagctgacctgtttgaagaaatgcggaaaataaggcgttttggtaaatggccagtagcaatacatgttgggacaaagtacagagtggttctagaaggccccgtttgtaagggtaatcaagtcactggatggcatacaaatcagagaaggggtgtatcacgtcgatttccaattggtttctctggatttgcttttaacagcactatactttgggatcctcagagatggaacagccccactttagagtctattatagtccattcaggtggcagaggtggcttgcaggagtcaagatttatcgagaagcttgttgaggacgagagtcaaatggaaggccttggggataattgcactcgtgttatggtctggaatttcgaactggaacctcctcaagtcaactacccaattggctggctgctgcagaggaatctggatgctgttgtgccaataacataactgtcctgctgctcctctttttgtttgccatcctagtgtgaatgatgccttcctgaacttggtagcgtccaggatcatgagaagctgctctgccaagatctggtccaaataatgtcatactagtaacagttgaaaagtgagaagcctgacaaaagaaagtttttctctctgttgcattcttttctatatgttcattttttccccatattcatccagctagatatagccatgtacatttcattttttttctcgtttctgtccgttatatacatacatatcacctcacagatgtgaatgttcccctccattggaactgttgaagagcaaagcagatactctctttgatatacatgaacaaaggttaaacc

SEQ ID NO: 19309 - DNA, 3209 bp, Oryza sativa
  ref <308>: DATABASE ACCESSION NUMBER: AK069675
  ref <309>: DATABASE ENTRY DATE: 2001-12-06
gttcccccctcgacaactagcccaccgccaccgccaccgccgccgagggcgatccgatatgcatttgctgctcccgtagaaggcgcgcgtcgcagcaatggaggcggaggacgacgagcgagccgaggcggaggcggaggcgcggcgggagaaggaggccggcaacgccgcctaccgcaagctctacctcgagacggccgtgcgccactacacccgcggcgccctcctcgacccccgcgacatctccttcctcaccaaccgcgccgccgcctacctcctcatgtccaagtacaaggagtgcgtgagggattgcgacgaggcggtggagaaggggcgggagctacgcgccgacaacaagctggtcgcgcgggcgctggcgaggaaggcgtcggcgctgctcaagctcgccgcctgcgccgcggactacgacccggcgatcagggcgctgcagcagtcgctggccgagcactacagcgaggagacgctcgccaagctgggcgaggcggaggaagccaggaaggagattgaggagcgggagcggcttgatcaggaagctgccgatcaccaccgagacagaggcaacgatttcttcaagcagaaaaggtaccaggaagcagcaatgcactatactgaagccatgaaaaagaacccaaaagatcccagggtttttagcaacagagcccaatgccacatctacctaggagcattgcctgaaggtcttgaagatgcagataaatgcatagcgttggatcctacttttctgaaaggctatctgcgtaaagctaaagttcagttacttatgggcaattatgaaattgctctggcaacttatgtagagggtttgaagtgtgacccaaacaacctcgaagttcttgatggcttaaggagatgtgcagcatgcattaaaagagctaatggcggtgattctagagcagaggacttgagagagatactgggagatttgcatttgaatgatgatctgtgtaataaacttcaaaaaagcatggatgaagctgcggtgttgaagaaggaagcatccgacgagcgcttaaagcggattgaatctgaacgattggccaggacattggaagatttgtatttaagccaggtccaacaaaggaaagaaacagaggaatctctttcaagggtacaacaagagtttgaacaacttaaaatacagcaagatgaggtcaccgtggaacttcagagagtcaatgagcagaatgagaatctactaggtcaactctcagactccagagagcattttgaatggcttctatctgagcatgaccaattgctacgtgaacgagataatgcagttcgagaggttgaagaactacgtcagaaaagaggacagatgctttcagttttggttacagcgatgcactgtgaattttcatcatctgaagtggaatctgcaacagaaaattttagtaattcattgaagattggagaaggtgggtttggctgcgtatacaaaggtatcctccggaacatgacagttgcaataaaggtgctgagacctgatagtttacagggacaatcacagttcgaacaagaggtttctatcctcagtagagtgagacaccctcaccttgtgactctcttaggagcttgctcagagtcttcaacactcgtatacgagttcctgccaaatggaagcctagaagattttcttatgtgttcagatgagaggcaaactctgacgtggcaggctcggattcgaattattgctgagatatgttcagcactaatctttctgcataagaataaacctcacccagttgttcatggagatctcaagcctgctaacattctccttggtgttaacttagtcagtaagcttagtgactttggtatttctcgcctcctaatccagtccagcaccaataacaccaccctgtaccgcaccatgcatcctgtgggcacccctctgtacatggacccagaatttctttccactggagagttgacacctcagtctgatgtttattcatttggtattgtagtcttgcgtcttttaacaggaaagcctcctgttggtataaagaatatcgtggaggatgcaatggagaaaggtgacttgaactcagtaattgatacctcagtgggagagtggcctcatctgcacatcgagcagctggcataccttgctctcagatgcactgagttaagcaggaggtgccgccctgatctttcaggtgaggtgtgggcaatagttgaggctataagggatgctgcattatcttcaccttcatcctctagatcagcacaggatcaaaacagtccaccgtcatatttcatctgtcctatatctcaggatatcatggatgatcctcacattgcagcagatggattcacctatgaagctgaggcaatcaggagttggctctgcaatggccatgacacgtctccaatgaccaacttgctacttgaacatgaggagctcattccgaatcgcgcactgcgttctgctattcaggagtggctccagcagcacagcatgtcgctgtagccaactgccctccatgtgtgaggcaagtgagcaagtggtaccaattggcaactgtatagtatttgggtaaattcggacatccccccttctgatgcaatttcggtatgccttctttattcagatcaggagaagtagttgagtgaaggtactcctacctcttttatgatttgagggttggatccatcgtcgtcgtaaggtaggggcctcatgtacacttgcttgatcacaaggcgacaggtcttctgttgcaaaggaaaggacgacgtacctaagcattgatgaatgatgatcgatgatgatgctagctgcttgtccagcttcatgcacagttttcactacctggattttagcacatgtttccttttgtcggataccagcatgcatgtatggaccagctgggtgctgcaaattggatgatggattgatggttattggttcaggtattcaggagcaggctggtgcccagtgggccagtttgatacttgtaggtggaccaaaggagctttgaaggaattttcagcagatgaattctgggaactttttttcgattatgatatgccttttgggctgcacaaatgggaatagaagaaaatcttgtagaaatcactttctttcctatgcttttgtagtgatttcagacttgggtttaaaggctgtgttaagatttattccagaagttcattgcaaagtgtgc

SEQ ID NO: 19310 - DNA, 1060 bp, Oryza sativa
  ref <308>: DATABASE ACCESSION NUMBER: AK069676
  ref <309>: DATABASE ENTRY DATE: 2001-12-06
gttcttccaattctcaactgctctcctcttccctctctcccttgccgccgccgcctcccacaaatcccctacggtcaccaccactcgttcggcgtcttctccgatggtggactggcggccgacctcgagctccctcggccgaccccggtggagaagctgcagccgctattacatcccttgccatctccatcgccggcttcctcgccattgccggcgccgcctctcttttctgtcgccacaatcgccttctccgaccgccaggccaccagatccggcgaccatggtggcgttgagcagctaggagcagctgggagcgccggtgaagcaagtcaacgatgagattgaggggattttttttttgttttctcttttctattttcaattgagagaagagcggaggagcgcgcgtggcagatccgtatgagaggccagcgacggaggagcgtggtactggccggccggcggcagaggagccgggaacggctggcagcgatgagtttctagctatgtttgccacatgtatatcaaatatagtgtcatgggaggaatccatcgctgctcttggaccagcaaagggcaatgcattgccattggtgggtggaatcaaggttggctattgtagtgaaaggcaaactagaggccctcttgttgcaaagatgtggtggatccttaactacactgcgagcctcccaggcctcaccaccatgaattgcccatctatgccctcccaacccaagccccagctcggtaaaccctcgtaagaggggttccttgttctgcacgtgcccatcgaccactcctgcaaaccgttctcctgccaaacgcggttgaactcatcggtgtttttttccttcatgggatagcactggtgatacctaactatatatatttagcatatagtttctcacctcataggaccatcctattttcgcctccattaaccggcttggttttgctgtgccttttgttttggatggtgcattgcattgtgattgcaaggttgcagtatttgccgaatgaactgtacttgaagtgctaattgatttgctgatctgatccc

SEQ ID NO: 19311 - DNA, 960 bp, Oryza sativa
  ref <308>: DATABASE ACCESSION NUMBER: AK069677
  ref <309>: DATABASE ENTRY DATE: 2001-12-06
ggttccccttcgccacgcttccactctgctcgtcctcctcctcctccccttctccgcagcaacagcccaaacgggcgcgggcgccaatggagaccgcggcgatgccaagatctccgtgctgctccctcccctccgcccgtgtcctcccctcccgccttcccctcctgccccgccccgcgccggcggctctctcggccccggccgccaggccggtcgtggcccggtgcgccgccgccgccggccacgggggcgagggcgagatgcccatagagaagaggtttcctcccttcccggctgtgatggacatcaaccaaatccgcgatatcttgccgcacaggtttccattccttctggttgatagagtgattgattacaagccaggggaatatgctgttgggatcaagaatgttacaataaatgataacttcttcccagggcattttccggagagacctataatgcctggtgttcttatggtggaggcaatggcccaggttggaggtctggttatgttgcaacctgaagttggtggatctcgagagaacttcttttttgcagggattgataaagtgagatttcgtaagcctgtgattgctggagacaccttgattataaggatgactctgatcaagttgcagaagaggtttggaatcgcaaagatggaaggaaaagcatatgttggaggcgacctagtatgtgagggagagttcttgatggcaaccggatctgaataaggtacaaggcaatggtgcagcttcattgcctaccacaatcaagttttggaccatgtttgtaacagtgtactgtagctcctatagtctagtctcgatggtgatgcttaatgcaggactgctgagctataaaatgctttttatgccgatgatggtaaaattgaatcaaccagatatgtatatggacgacgtctttgctttttgaaaataatcctgcaaaaatgttcgc

SEQ ID NO: 19312 - DNA, 521 bp, Oryza sativa
  ref <308>: DATABASE ACCESSION NUMBER: AK069678
  ref <309>: DATABASE ENTRY DATE: 2001-12-06
gtgagcgagggagaaagagagaggcgttggtcggtggccgcccgtcgcttctcctcttccgacgccggcgcggccgagagaaatggcggtggctgcgagggctccgctcggggtggtggcggtggtggccgtgctcgtcgtcggcatcttcatgcccgccgcggcgcaggccccggcgcccgcgcccgtcagcgacggcacatcgatcgacctggggatcgcatacatcctgatgctggtggctcttgtgctcacctacctaatccatccactggatgcttcttctccctacaagcttttctaatcccttgttcttccttcatctggcttggttagggtaaattctacttattatttagccatggcgacgattgttaacattttaggtgagatgttaggaggtttggagtgatttgtctgtccatgatgggggtggtatcaatcagatcgttgtttggtggtgcgattggctgtattggattccatgatttggtgccaagttgtgcgtgctggattcgttc

SEQ ID NO: 19313 - DNA, 2251 bp, Oryza sativa
  ref <308>: DATABASE ACCESSION NUMBER: AK069679
  ref <309>: DATABASE ENTRY DATE: 2001-12-06
gttcgacatctcccacctttctcgcgcccccattggattgggggcgtccgccattgatgaccagctccgaatctagtacggcgaatcgcccgcggcaaggagcagcgtcgccgtcgcccgtggatcgccgggagcccggagggaggcggcgatggcgggcgcggaggccgccaatggcaggaacaagtacgcggttcttgatcccagcgacgagccggaggggcggaggaggccctcggcgtgggagcggaggagcaaggagcggttcgtgctcgcctgcgccatcttcgcctcgctcaacgccatcctcctcggctacgatgttggtgtaatgagtggcgcaataatctacattcagaaagatcttcacattaccgaatttcaggaagaaatcctagttggttgcttgagtgtggtttcactcttgggaagtctgtcaggaggaagaacatctgatgcaattggcaggaaatggacaatggctcttggtgcaattgtcttccaggctggtgcagccataatgacgttcgccccttcattcaccgtgctcatgatcgggaggctccttgctggtgtgggcattggctttggtgccatggtatctgcagtctatatcgctgagatatcccctgcagctgcccgtgggactctcacatccctccctgagatctgtatcaatttagggatcctccttggttatgtttccaactatgctttctcgggcctttcagagcatatcaattggaggattatgcttggtgttggtatcctcccatctgtcttcattggatttgcactttttgtgatcccagaatcacccaggtggttgatgatggaaaagagagttccagaagccagggcagtattgctgcagataagtgagtctgaagctgaggttgaagaaaggattgctgagattgaggaagctgcaaatcttcttaaatcgacgaaatccgaggacaaggcagtgtggatggagctgttgaacccttctcctgctgttcgtcggatgctatatgctggctgtggtatccaaatgttccagcagatcacgggtattgatgctactgtctattacagcccaactattttcagagatgccgggatcaagtctgatcaggagcttcttgcagccacagtggctgttggttttactaagacagtgttcatattggttgcaattttcctcattgataaagttggacgcaaaccgcttctttatgttagcaccattggaatgactatgtgcttatttgtcttggggattgcactcacattgcaaaagcatgccatgggacttatttctccaagaattgggattgacctagcagtttttgcagtttgtggaaatgtggctttcttttcaattggcatgggtccaatatgttgggtcttgtcttcagagatatttcctttgagattacgagctcaagcatcggcactaggtcaagtaggtggtagagtgagcagtggtttggtttccatgtcatttctttccatggcccgtattatatcagtggcaggaatgttctttgtctttgcggttatctcgactgtctctgtggcctttgtgtatttctgcgtgccagaaacgaaagggaaaactctggagcagattgagatgatgtttgaaggtgggaaagaatggagagggagtgagatagagcttgaggatacacaacatttaatacagagcagcaagaagtctgtgtctctaggctgacactattagaaacaataaattcgaaatcattcgatgttcaatgatgaaccatacttatcctgcttccatcgcctacgggattctgaaattcaggtctgcaaaatgatcaggctgccttggactgctacggattttgagggcttaacacgagtatattaggtgtaggcgcaaaacagcatgtaaatgtctgctttacacaactacatcccaaaatgttacctgggaggacacagatgatgttgtatatggcggtatcttccacctaccaaaaaatatagttgttgaagttccttattccacagtttaattttaatagaggaagaggtgtgtgatttccaactgaatgaattctgtgtgattcttgatccagctttttgatttagtccttcatgatattgtagtactgtggctttgttggtctagtataaaaccttcaagaccatgccatgtctatagctttgcattgacgtgcagagttctgtaaataccagatttggatgattcattctgtcaaattaattatttact

SEQ ID NO: 19314 - DNA, 1115 bp, Oryza sativa
  ref <308>: DATABASE ACCESSION NUMBER: AK069680
  ref <309>: DATABASE ENTRY DATE: 2001-12-06
gatgtgggaacctccagtggcttcagctgcgcgcctgtgacggcactggggacgggccctcgtcgcagttcttcgcgggatgccttgctggcctgctcgcgctagagctcagtgcttgtcgctccgtctctgaccacgtcctcctcctcgctgctgatcgctgccgtgtgctcaagtcactcctggtgtacgatggcggcagccgggagcccctccaccggttcatccaccagcgtggcgcagcgttgcacacgttagacctccgcctccctctcgacttgcacaatgaccacctcctagcgatcggtgccgaggccgagcaaggtcagcaaagccagaatggcgggcatagcctcgctgcgctccggcttcagagctgtgtgctcatcactggcgacggactccggtccctcgcacgcacaaccactggagctggtatcgaagagcttgccttggtgaactgcgatgtggtggaacgggagcctggactgcttaccttcctcagccagagcatgcgccgccttcgccgtcttgatttgtcatacaacgagactctcagtgacaaggaggttggtgccatgctatcgtcctgccataatctaattgatatcaggctcaggggttgcaggtgcctcactcgaggatctttggtatcgttgctcagatactgtggccggtcagtggaggtcatcgacatcactcgctgccttagcattgcagcagccgatgttgaattatttgcacaggaagccactcgattaattcaggtaatcatcgaggacagcttgttgtcagaggaattgcgggccattgcacataagaaaggcataagggttggcccattgcgttgcgattgataattgtgataaaaggtaatcttcttcataatgcccctcatagatgcttgaatctgagcaatcccaactccctacttgaatgtgggaataaggtttcacaacgacatctcactacttgtgtatatgagtttatatgttcaagtatgtatatattattagggaacctattattaattgcaaacttgtctggcaatgtaaattcagcaccaagaattgtgctgttttgtatgctcctagaaataacacgtgaaataatac

SEQ ID NO: 19315 - DNA, 1061 bp, Oryza sativa
  ref <308>: DATABASE ACCESSION NUMBER: AK069681
  ref <309>: DATABASE ENTRY DATE: 2001-12-06
tatgttgcaccagagataatcaataagaggggctatgatggagcaaaagcagacatatggtcttgcggtgtcatactctttgttctgcttgctggctacctcccattccatgactcaaatctaatggagatgtaccggaagataagcaaaggtgatgtcaagttcccacagtggttcactactgatgtccgaaggcttctgtccaggctgcttgatccaaatccaaacattaggatcaccgttgagaagctagttgagcatccatggttcaagaaggggtacaaaccagcagtgatgctatcacagccaaatgaatcaaacaacctcaaggatgtccatactgctttcagtgctgatcacaaggacaatgaaggcaaggcaaaagaaccagcaagctctttgaagccagtgagcttgaatgcatttgacatcatctccctctccaaaggatttgatctgtcaggcctgtttgagaacgacaaagagcagaaggcagactcacggttcatgacacaaaaaccagcatcagcaatagtgtcaaagctagagcagattgctgagacagagagcttcaaggtgaagaagcaggatggactggtgaagctccagggatccaaagaagggaggaaagggcagctcgcgatcgatgcagagatctttgaagtgacaccatccttctttgttgttgaggtgaagaagtctgcaggggacacgttggagtacgaaaaattctgcaacaagggcctaagaccttctctcagggacatctgctgggatggtcagtcagagcatccatcactggcacagtcatcaactctgactcagtcctctaagtcaatctcgagacatgccatttaagtgcaacctcataagagatgcagtaacaatccattttcctctctccttttccctttcatcaaagtgctgagcctgagagtattctcacttgagcatcaggcttagggctctttgatgataatttttgccagttttccttgtatagtagcagtttgtctacatggatctcctgttctttcaccaatagaaacagggagattgac

SEQ ID NO: 19316 - DNA, 3640 bp, Oryza sativa
  ref <308>: DATABASE ACCESSION NUMBER: AK069682
  ref <309>: DATABASE ENTRY DATE: 2001-12-06
ggcatagtcctctcctcatcccttctcctcttatttcctttcttttatttatgagaagatagatttccagagggggacgcttcaacttggaaaccttgaattttatttaccgacttgccgagcagcagcagcagcgaaaccctcctctttgcaaagcccccattgccgccatgccgccgccgtacagtcatatcaaggtggtaagggaagaggatttccgctcgcgtattggggaagatggccactacttcgatctcatcgacttcagcgcaatcgagggattcaacgtcccgcctaccatgaccatcctccgattcaaggagaagctcacggagaaatttggaacccctctgcaatgtcaacgcctgtggtggtgggctagacgtcagaacaacacataccgtgttgacaggccgttgacaaccgaagaggagaatctacctgtagaaagtctaatttcagcattgtgtttcgaaggagatcatctacagctttttctggaggtgctcaacactaattccctaccaacatggagcaacatggatgatgcactggtgtttctaaagcattatgacccagggaaagcacagctaaggtatgttggattgctgtccgtgaaagttgcatcgaggccttcagaaattcttccaaaactaagaagtctagctggtttctgtttaagcgaaatgatagaattgtacgaggtcagactttcttttttttttttttgccgggcagccaagaaaggccaaccaaatttacttaagattgaagaatatatacaaatatacaaagttattacttcaacaagaagctgtcgaagtaatggaaattgtcaccggagcaacttcccaaaagccaaagattacactaagagactactctcctatatttctgaaaaccccagcttccttccaaatcgccacttcctctttgattgaaccaaacaggaaaccggctgagcgccgctggttctgaaacacacgcgcatttctttccttccaaaccatccaacaaacaagcagcacaaggctgtcaatggcgtccctgtagttgttccgaaaattttgccgcatcgctaaccaccattcgcccaagtccaagcctgactcagatggcagcaggaagccaaccccaatccagcccttgatcattctccacaccctggtcgtgtaggtgcaagacacaaataggtgttcacaatcttcatcacccaccaagcaaagttggcaaacctgctggtgcggccagccacgcttacttagattatccgccgtgaggcatcgccctttttcggccaaccacataaagaatttcacctttgacagcgctcttgtttgccaaatcagagtaccacatcgcgccaccgtgtttgccatgaagaacatgctgtaggccgagcagggagtgtattttccatttggtgcccacttccagattgtctcatcttcctccccatcttgaagttgcaccccctggaccgcgtcccaaatctgaaagtattccccaattgcgtgattggagggtacccccttgatgtctcgtacccacctgtggttcagaagccctcgtgccaccgtcaagcccgagcgctcgacatggctgaagatcaaggggaatctcgactttatgctccccaccggcaaccagtccgccagccaaaatttggtgttcttcccatcacccaacacttgtctcgttcatgcgaggtagaggtcttgcaagtctttcgactgatctattggaaccgtgaggtcagactttctactgatgcaaaccgggttctccaattctcgaatgaacagttttatctcatctgtactggttttgcacttcaacaagcaggaaataaaatttgaaccttcagtgtggtgtgaagccattgacattcgtaataccttttcagctggcgagattataactggggacattatttgcttccaaaaaatcttgaagccaccggacataccaaaatatccttctgttgcatcttttctccagcatgtttgtgatcggaagacgtatgaagaagtgaggaaggtacacattttagaagaggagattgttacattaaaacaccaggctgatacatatcttgttcagaaagaaaaggccgtaacagcgtatgatcagttgaaacatgaacgagacaatgctgtgcaacaagtgaatgaattacgcgaccagagcacacatatcattctcgatttctcccgcaaggacatggagcaagcaacagaacatttcaaaaatgctagggaggttggtgatactgaatatgggcacacatataaaggcatgatacacaatatgaaggtgttaaatcaagctgtccagttcccaaaagttatttcaacaagaggtctctattcttcgccaatggagacatccaaatattatcacattcataggagtatgctcggaggtctccgctctagtatatgaatggctacctaatggaaatcttgaagaccgcattatttgcacaaataattctgcacctctctcttggtacaaccgcacacagatcattggggagatttgttgtgctctgccttttccttcattcgaacaagtctactgctttggtccatggtgatctcaggccttgcaaccatccctcattgatgccaactacagaagcaagatctgcaactttggtatgtccaacctgtttctgcagcttgggaccttcccaccaaacctgacggcaagggctgccgtacatggaccctgagttcaacaccaccggagagctcacaacactctctgatgtctactcactgggtgttatcatcctacggctcttgaccggaatgccccccttaactctatcagagaaagttgcagaagcattggggagtgatagcttgcacttgctgatagataaatctgcaggggactggccttacattgaagccaaacaattagcactcattggccttagctgcactggaatgacgaggaagaaacggcctgatctcttaaacgaggtgtggatagttattgagcccctcacgaggaagcctcctgcagccacctggccatacttgcaatcagcatcaggagatagcagtgtacctgctgcttttatttgtccaattagcatggagatcatgaaagatccgcaagtggcatctgatggattcacctatgaagcggaggccataaggtgctggtttgatagagggattagtaggtctccgatgacgaatttggcccttcccaatctcaatctcgtccctaatcgtgtcctccgttctttcatccatgagtatcttcagcagcagcagccgaaccctgcttaccaacagcagttgtcagaaacctagtttctggagtgtattttttcttttgtaagtaacagcaagagggctgtcgttatttcagataagtaggcagtaacagtgaagtacaaaatggcaagaacaacaaatacaggggggaactttactagacaaatgctcaaatagggtcgggctgtcgtaatttcagttaatggagaggaggaaaaggaagatgggtgtaattttggacatttcatctgatggtgtggcaaatgagcaaattggaccatcaactttctggcattttagcaaagcaaccaacttcgtggcatttgagagaatgccacatgagc

SEQ ID NO: 19317 - DNA, 1241 bp, Oryza sativa
  ref <308>: DATABASE ACCESSION NUMBER: AK069683
  ref <309>: DATABASE ENTRY DATE: 2001-12-06
gagtattcctcttactctgcaagcgcgtgcaagcaagaagagaagaagaagaagaaggaaggtagcggcggccatgtctctcacgggatgcctccctcctcggccgccatgctcgatgaggaggagaaccagtggaggaggagcctctgtctctcctgtcgtggcgatggcgtccacggcaggagttggcggcatcggcaaccccaccccgagaggcaagaagcccttcgccccgtggcgcgaggtgccaccccaggtgacccacacgctgccgccggagaagaaggaggtcttcgactccctggaggggtgggcggcggacaccatcctcccctacctcaagcccgtggaggagtcgtggcagccgcaggaccacctcccggacccgcgctcgccgtcgttcggcgacgaggtggcggcgctgcgggagcgcgcggcggggctccccgacgaccacctggtgtgcctcgtcggcgacatggtcaccgaggaggcgctccccacgtaccagacgatgctcaacaccatggacggcggggtgcgcgacgagaccggcgccggcggcagcgcctgggccgtgtggaccagggcgtgggccgccgaggagaaccggcacggcgacctgatgaacaagtacctctacctcaccggcagggtcgacatgaggcaggtcgagaagacgatacagtacctcattggctccggcatggatccacgaacggagaacgacccgtacatggggttcatctacacgacgttccaggagcgcgccacctccatctcccacggcaacacggcgcgccacgcggggcgccacggcgacgccgccctggcccgcgtctgcggcaccgtcgcgaggtggggcgtccccggcctcgccgcggggctttccggcgaagggcggcgcgcgcaggacttcgtctgcagcctcgggccgaggttcaggaggatggaggagagggcgcaggaggcggcgaagcgggcgccgcccgccgccgccgctccgttcagctggatccatggccgtcaggtgcagctctgattctgactgaatcggtggtaattattacagtaacaagtttgtgtttagacagaaagaaaatctgacaacaccagttgctgagaaagacataaaatagctttaagtctaataattgttatgtgatcttgcaaattaaaatgtgtatactttgtcctttgttgataacttgatatggtacatgaaagaaaaaaaatcatgc

SEQ ID NO: 19318 - DNA, 3063 bp, Oryza sativa
  ref <308>: DATABASE ACCESSION NUMBER: AK069684
  ref <309>: DATABASE ENTRY DATE: 2001-12-06
gagaaaggcgaatcgccccaatcccacaagaggcgaggggagagaggagagcgcgcagcgggagcagcagaagccgccagccagccatggcggtgggcgcgaccgccacgaagctgcacatgccgtccgcgggcggccgccgcccgtccctgttccacctcgcggccgtcgcggtgctctgcacggtgtcctacctcatcggcatctggcaccacggcggcttctccgcctccccggccggcggcgtcgcctcctccgtctccatcgccaccaccgcctccgtctcctgcgtctcccccaccccgacgctccttggcggcggcggcggcggcggcgactcctcgtcgtccgcgccgctcgacttcgcggcgcaccataccgcggaggggatggaggtggcgtcgggccaggtgcaccgcacgtacgaggcgtgcccggccaagtactccgagtacacgccgtgcgaggacgtcgagcgctcgctgcggttcccgcgggaccggctcgtgtaccgggagcggcactgcccgtcggagggcgagcggctacggtgcctcgtgccggcgccccaggggtaccgcaacccgttcccgtggccgaccagccgcgacgtcgcgtggttcgccaacgtgccgcacaaggagctcaccgtcgagaaggcggtgcagaactggatccgcgtcgaaggcgaaaagttccggttccccggcggcggcaccatgttcccccacggcgccggcgcgtacatcgacgacatcggcaagatcatccccctccacgatggatccatccgcaccgccctcgacaccggttgtggggtagcgagctggggcgcatacttgctgtcacgcaacatcctggccatgtccttcgcgccacgtgactctcacgaggcacaggttcaatttgcactggaacgtggtgtgccggcgatgatcggtgttctttcatccaaccggctcacctatccagctcgtgcctttgacatggcacattgctcccgctgcctcattccctggcagctctacgatgggctgtacttggctgaggtggatcgcattctgcggccaggagggtattggattttgtctggacctccaatcaactggaagaagcactggaaggggtggcagagaaccaaggaggacctgaatgcagagcagcaagcgattgaggcagtggccaagagtctttgctggaagaagatcacgctcaaggaggttggtgacattgccatctggcagaaacctactaaccacattcactgcaaggcctcccgcaaagtcgtcaagtccccacccttctgctcaaataaaaatccagatgctgcatggtacgataagatggaggcttgcataactcctctcccagaggttagtgacataaaagagattgcgggtggccagttgaagaaatggccagagaggctcactgcagtgccacccagaattgccagtggtagcattgagggtgtcactgatgaaatgttcgtggaagacaccaaactatggcagaagagggtcgggcactacaagtccgtgataagtcaatttggacagaaaggacggtaccgcaacttgcttgatatgaatgcgcgctttggcggcttcgctgcggcattggtggatgaccctgtgtgggtcatgaatatggtcccaactgttggcaattcaacaactcttggggttatatacgagcgtgggctcatcggaagctaccaagactggtgtgagggcatgtccacgtaccctcggacctacgacctcattcatgccgattcagtgttcacgctatacaaggacagatgccagatggacaacattctgctggaaatggacagaatactgaggcctgagggtacagtgattataagagatgatgttgatatgttggtgaaaataaagagcattaccgacggtatgagatggaacagccaaatcgttgatcacgaagatggcccgctcgtccgggagaagctcctccttgttgtaaagacatactggacactcggggaagaaaaggaatagcaataacgtgaaataaagtgttagaaaaaattgacatattgggcaaatatcgtaatcggcttaccatttgccttgtggatttgaagtttctttttccatttcattctttgggtggaatagttcacatatggagttcagccctcgatgtttaggtgtaaaagaggtgctgagaaggaaaccctgcaaagttttttacattaaaggacaaccaaagtattccaggtctggtttctacggtcagtagcattcttcatgcgctgtcatcaggcattttagtacggagtaccagtgtaccaccatagtacgcctactctccctagaacagtagaactaccgtggaatgtttacatggctagacgcaaattgtctgaactgcctttacgtttgctcgcacatgctactggagtgctgaactcaactactatgcctgtgaggtttgactctggattcagctgaaaatttggtggcccacactgagcgtaccatatgcattcgtctacactaactccagatcttgcaagtaatggactaacggctaattaaagagttcatcaccattggcatgcatgcaatgcgacggcaacagaacgcactggtccccgacaggaggagcagaagaaacaattcacttttgggcgatcggtgcatgtattgaaatgatgaggacacttgacagaccacgaggtccccctgtcacaaggattcatctgagatatcccccattatccaccggaagaacagtgatgcataccaccttacagctaaccaaagtgtcaatctcacctaacgctgcaataacagagctcttaacagtggcatctctgtatacaataggagggctactggttactggttagctcgcaacagtggttacttgttagctgttgagctagcaatggcaatcagtctatataggatgctagtggtagtggttaagaatcttctgtcaaggacatgcacggagaaaaaataattgacatttagtttgtggtaatgccataggccagagcaaataatacagtaaattttcatgtcc

SEQ ID NO: 19319 - DNA, 1378 bp, Oryza sativa
  ref <308>: DATABASE ACCESSION NUMBER: AK099104
  ref <309>: DATABASE ENTRY DATE: 2002-08-28
gagtggagaggcggtacactggtggtggtgggggtggtgtggtgggggacgcgacgcgacgagatgcctcgggagacgccgccgccgccgccgccggagggcggcgaggtgcacgaggtggtggagggggaggacgggcaggcggaggaccaggaggagaggtgggcgcggctgctgccggagctgatgtccgaggtggtgcggcgcgtggaggcgtccgggggcgagcgttggcccgcgcggaaggacgtggtctcctgcgcctgcgtgtgccggcggtggcgggacgctgccgtcgccgtcgtgcggccgcccgcggagtccggcaagatcaccttcccgtcctcgctcaagcagccagggccaagggagttcccaatgcaatgtttcattaagcggaataagaagaactctacgttctacctctaccttggtttgacaaatgcaactgtggataaagggaagttcctcatggctgctagaaggtttagacgtggtccccataccgagtacatcgtatcccttgatgctgatgacctttcacaaggaagcaatgcatacatggggaaactgagatctgatttttgggggacaaaacttcaaaatatatgatagcaagccaccatatgatggcgctaaagcatcaagtagtcgatccagtcggcgttttggaagtagaaggataagtccccaagtgtcagcaggaaactatgaagttggacaggtttcctataaatacaacctgctcaaatccagaggtcctaggagaatgtattgtgcacttgagtgcccttcaactcaagagacatgggaaaactgtctaaagacgaagttcagaaaacccacagggaacacagttctaagaaacaaagctccccgctggcatgagcacttgcagtgctggtgcttgaacttccatgggcgggtgacagttgcatctgtcaagaatttccaactagttgctgctgctgatcccaatgatcctgctagctcgaaggatgaggaaacagttctgttgcagtttggtaaggtcgatgacaatatcttcacgatggattaccggcagccactctcagcgtttcaagcctttgctatcagcctcagcagctttggtaccaagctagcttgtgaatagcaacatagtttgatgtcctcatattgccatctggttgtggttgtggatgcatgccgttgtggttgttcccggcatttttcttctttcatttctttcctttttactctggatatcaaggtactattcatatcctgttcttgtgcgggaaatgtaccattttaccaaatggatttagctccgagaaggaaattgtgttgtaaaacttttgctttttaagtgaaagcagaaggcagtctgttgtac

SEQ ID NO: 19320 - DNA, 2503 bp, Oryza sativa
  ref <308>: DATABASE ACCESSION NUMBER: AK069685
  ref <309>: DATABASE ENTRY DATE: 2001-12-06
gtggagctgtccggcagcaggaagttcaaggtggccatccggcacgtcgcgccggtcagcctgcaggacctgcggatggtcatggccggctgccccgccggcatcccgtcgcaggcgctgcagctgctcgacatcgtgctgcgcgacatggtgctcgccgagcgcaacgacatggggtacgttgcgtttggtcggtcttacttctcaccggggctcggatcgagggaactcgacaagggcatctttgcgtggaaggggttctaccagagttgccgggtcacgcagcagggcctttctctgaacatagacatgtcttcgactgctttcattgaacctggtcgggtgctgaattttgtagaaaaagctattggacgtcgaatcactaatgctattactgtgggatattttttgaacaattatgggaatgaattgatgaggacccttaagggtgttaaggttgaagtcactcaccgaggaaatctacgcaagaagtacagcattgctggcttcaccgagcagtctgcagatgttcagacgttcacatcatctgatggtatcaagactgtcaaggagtatttcaacaaaaaatacaatctgaagttagcttttggttatcttccatgcctgcaagttggcagcaaggagagaccgaattacctgcccatggagctttgcaatatagttcctggacaacgatacaagaacaggctcagtccgacacaggcttccaatctgattaacataaccaacgatcgtccttgtgaccgtgagagctccattcgtcagactgttagcagcaaccagtataacagtacggaacgcgcagatgagtttggcatagaagttgactcttatcctactactttaaaggctagagttttgaaagctccaatgctgaagtaccatgattctggaagggtgagagtatgcacgccagaggatggggcgtggaacatgaaagacaagaaagtagttaacggtgctacaattaaaagctgggcatgtgtcaacttgtgcgagggtttggataatcgtgttgttgaagcattctgccttcaattggtcagaacgtccaaaataactggactggactttgcgaatgtgagccttccaatattgaaagctgatcctcataatgttaaaactgatcttcctatgcgctatcaggaagcatgcagctggtcgagggataacaagattgacctcctacttgttgtaatgacagatgataaaaataatgccagcttatatggtgacgttaaaagaatctgtgaaacagaaatcggtgtattgtcacagtgttgtcgagcgaagcaagtctacaaggagaggaatgttcagtactgcgcaaatgttgctcttaagatcaatgccaaggctggaggaaggaactcggtatttcttaatgtagaagcaagtttaccggttgtttcaaagagcccaactattatatttggtgctgatgttacccatcctgggtcctttgatgaaagtaccccttccattgcttcggttgttgcttccgcagactggcctgaggtgaccaagtataattctgttgttcgtatgcaagcttctcgtaaggagattatacaagatcttgatagcattgttagggaacttctcaatgcattcaaaagggactccaagatggagccgaagcagctcattttctacagggacggcgtaagcgagggtcagttccagcaagttgtagagagcgaaataccggagatagaaaaggcttggaagtctctgtatgctggcaagccacgaattaccttcatagtggtgcagaagaggcatcatacaaggctgttccccaacaattacaatgatccacgcggcatggatgggactggaaatgttcgtccaggcacagtagttgatacagtgatctgtcaccctcgagagtttgatttcttcctgtgcagccaagccggggatcaaagggacaagccgtcctagccattaccatgtgctgcgcgacgacaacaacttcaccgcagatcagcttcagtctgtcacaaacaacctgtgctacttatatacaagctgcactcgctcggtgtctattccacctcctgtttactacgctcataagctcgcattccgcgctcgtttctacctcacccaagttcccgtcgccggtggagatccaggtgctgctaagttccagtgggtacttccagagattaaggaagaggtgaaaaagtccatgttcttttgctagtcgtccttgtgcccccctgaaactgaagcctggagccagccggcaagctctggaaatgctctgaataatcaaacttggaagaataagcacctgcccaggttgccattcgtttccatgtggcatggaggatggcatcctgaaaaggatattgtcatgtttgtgtggtttttaaacgacattgaagtttatctccggtgttactatctcagcactttggttgttttattttgttatgtctgaagatatagacacaaaacttcatttttgttt

SEQ ID NO: 19321 - DNA, 3119 bp, Oryza sativa
  ref <308>: DATABASE ACCESSION NUMBER: AK069686
  ref <309>: DATABASE ENTRY DATE: 2001-12-06
gactgcctcctgagtcctgactccccccgagcgccagtctctctctctctctctctctctctctctctcctctcgcacgcctcggcggagcggagcggagagcaacaaaagcgcaaaaaccctcgtagagatcgaaaccgccgcggcggggtgggatcgcgtgttccgatcgtgcggaggcctcccgctcttatcgagaggctttcgatccgcttgcgattttttttctgggatttttttggtgcatttttttcggtttttttgttttccatttcaggtggcgcgtgggggatcggtggattcctggagttgctggtcggtggaaatcgtttctcttcgtgtgcgcgtttgcgtttgttctggggtttttgttttgggtggtgggttttgatccggttgctgcgggcttgtaggttggattttgcggtttgggagaaagtcacaatgtcaacgtgtcctgtgctgaatgaccgaccaattgatgagtggaaggttactgaattgaaggatgagctccgtaggagggatctatctattaaaggtttgaaggatgatcttgtgaagaggcttgctgaggcccttcagggggaggttattgatggcggggaagaaacagtcaatggaactccccctgtggagaatcagacacaagacggagctcttgttttagatgatgcatctggtttccaggcttcagcagaacaaaatgttgatgaaggccctgctgaggttgctgcaaagaatgaaggccttgtctctgttatagaagctagtacagagggcggaactcttgttttagatgatggatctggtttccaggcttcaacggaacaaaatgttgatgaaggtcctgctgaggttgctgcaaagaatgaaggccttgcctctgttacagaagctagtacagaggacggaactcttgttttagctgatgcatctggtatccaggcttcaacggaacaaaatgttgatgaaggtccttctgaggttgctgcaaagaatgataccagtactaataccaagttggaggaatcatctgctaaaggtgaaccatgtgtcagtataggctgtgagattctagaacaggaaacgaaatcatcacatcttgatgttattttgtcacatgctgacgctgttgcaagtgcagaggaaatgattacagagagcctgattcttaagaaaggttccaatgagaatgatttaatgtatgagaaggaccaaaaggattctgaccacataagcactgactgcaaacccgagcagtctggaccaaaggatcaggtatctgaagtcaaccaagatctagagtctcaaattaagtgtgtgtcaatttctcctgatgatatactagtcaataaaaacgacaatgtagaaggcaacatgaacgctgacaattttggtttaggactagagtctaagcaggatattgtcaagccatcatccagcaatccctcctccgttggtgatgatttgcagacaccagatgatgacaaagagatatctctgatcgacatgtctctgcaagatactgatatgagcttgaaaaagaaagaaggcagtcctgatagtatttatcctgaaaaactaaatttggataggagttcaggagatgaatcaatggaggaggatgcgatggaaactaagcacatggattccaaaacaatacctgattatctcgaaggaaagagtgaggtcaccttagagcatgtgagttcaggagatgaatcaatggaggaggatgtgatggaaactaagcacgtggattccaatacaaaagttgaacatgtgagttcaggagatgaatcaatggaggaggatgtgatggaaactaagcacgtggattccaatacaaaacctgattatctcgaaggaaagaatgatgtcaccttagagcatgtggtaaaagaggtgatcctccttgatactgtcactgagggttcatctgtagatcaaaaggaagctataagtcaagagaagccagtaatgccgactgaaaagaggaaagctgaagatcaagaagttgttgcaaataatgagccaatcaaacgtcagcgcctatggaatgtggatgatgtcaaacctgagcaagcaacttccaaactaagtggttctgatgcttctaaagttgtacacccgcctgctcgaagacgttcttttggcaggtctgattcaacagcacgtggaaattctccgaaggagaggatggtaccaccgcctcagaaacctgcaacaacttccttgagaatcgatcgatttgtgcgcccgttcactttgaaagctgtgcaagagcttcttggtaaaactggatctgtttgtagcttttggatggatcctatcaagactcattgctatgtcacattctcttcggtggaggaagctctggctaccaggaatgctgtttacaatctccaatggcctccaaacaatggcagttccttagttgctgaattcgttgatccacatgaggtgaaggccaaacttgaaccccctcccccacctccagcacctatcaaccccacagcagctacagcaccttcccaccaatccaaggccaaccaaatcatgcctcctcatgctgctgatacatcaagggggctattacccacaccaccagcacttgctaggcttccaaccttcaacaacgcaccagcgagggagatgcttccgcccgctccaaagaacccagaaccacctgtggtggtgactcttgatgatctctttaggaagacacaggcctctccgaggatctactacatgcctgtttcagaagaggtggtatctgccaagcttgcagcacgcggcaaagggaagaaggcagcgtagggtggctcaaatttgctgctgctgctgctgccatgagtggtacaatttgacacttgaagaggcttttgcaagggttaggtcttgagagccgagaaggtcattttggttgtacatacaactaggtgtagttttctgcatctccgaaactgttagctgttgctcgcccatgccgatctggattgtatgttaattgtgcaccttttgatcgatggagacgatgcttaccttcaatgttgatgaactgggggaatgcatatgtgctaagtcgcagcatttcccccctaaactcgtcgcgc

SEQ ID NO: 19322 - DNA, 812 bp, Oryza sativa
  ref <308>: DATABASE ACCESSION NUMBER: AK069687
  ref <309>: DATABASE ENTRY DATE: 2001-12-06
gatttctctcccacaaaggcacaaaccgcgtctccctctccctctctccgcccatccatcctcctagagagggagcgcgcgcaaggaggaggaacaagggctcctcggatcgggaccagctgaggatttgaacaagtcagcttgtcgccaccatggttcttgattcattatcatctcctcacaggaggtcacagaacacattttttctatcatccccaaagaagcttcaatcatcgaaggatgatgttggcagttggtctgcactggttgagcggcatcgcttcctcttgacaacactagtggttctggtctttctgtgcaccatctatctgtactttgcagttaccttgggggcacctgatgcttgctctggattagcgggcactgaaaaggctgtatgtcgggcaaaatctgctcttcgacatggaaaattgaaatttttctagcgctgtcgtgcatactctcgaagaccaagttactgaggcttacaatgcgctcttcaggtcacccacagcttattcttcatacattgaatctgtatattttgtggtggatgtattgctttgtattcatgttgtactttgttgagagacctgctattcaatagttgcaacaaatctgctagtgatagagagaatttatatgttgtgtaaacggtacaaggtaggtcatcatattattttttgtcatggtgtactaaaaacaccatgccattactaatccatccaggagaccctgatactgtctccatcctggcatactgtaattcatttgaaactgcatgatactatcaagtgttagtagtgattacc

SEQ ID NO: 19323 - DNA, 1493 bp, Oryza sativa
  ref <308>: DATABASE ACCESSION NUMBER: AK069688
  ref <309>: DATABASE ENTRY DATE: 2001-12-06
gtggctaaacccagcctcgccgtcgccggcgacatgctccgcctctcatgctgccggccgacggccggcggcggcctcgccggcgccatgctccacctcctcccgctgctccgcgcccgcgccgccacccatctccccacctcctctctggacctcagccgccgccgccgcctcctcctctccaccgccgccagatccgccgccgcgacccccttctctgtcgaggagtacctcgtcgacacctgcggcctcaccggcgcccaggcgctcaaagcatccaagaagctctcccacctcaggtcgcccgccaagcccgacgccgtgctcgccgtcctctccggcgtcggcctctcccgcgccgacctcgccgccgtcgtcgcctccgacccgcagctgctctgcgccagggccgacaacatcgcccgccgcatcgcctccctgcgcgaccgcgtgggcttgtcggacccccagatcggcagcttcctcctcgcgggcggcgccaagggcatccacgcgtgtgacgtcgcctcgaggctggagttctggatccccttcttgggatccttcgagacgctcctcaggatcttgaaggggaacaacgtgctggtgctctctgaccttgagaaggtgatcaagcccaacatcgcgctgctccaggagtgcgggctaactgtttgtgatattgccaagatggccaggtttgctccacggatgttcacgtccaatccaaagcaggtggaagggtttgtgcggcgtgccgatgagcttggcgtgccacgcacctcaggccaattcaagtacatggtgggtatttttgctaacatcagcgaaggcagtgccaccgcgaggatggagtacttgagtcgcagtcttggttgctccatggacaagctccgctctgcggtccaaaagttaccacaaattctaggattatctgagacaaatcttggcagcaagatagagttcttggtcggcaaggtcagattggagcctgaataccttttgaagacgccaaagctgttcacgtacagcttggagaagcggttggtggcgaggcattatattgtgcaagtccttgctgcgaagggattgaagggattgaaaaaagatgttcccttttgctcatatgtacagctaggcgaaagttgttttgtaaaaaacttcattgatcagcacgagaacgttgtccctggtctttctgatgcctatgctgcacttcgtgctgggaaagtgcctccagaggtccaacactgacatcttcggacagagttattggaattcattctggcagaatgccttctggagtccaactataacatctttggaggttaattatctttcaagcccatacctcatgttgtgaggatcactaattggtgtgatggttttcatgcatggtcatgcctttttcatattttgatttcagttgtaatatgagttgttgctaacttgctatttatgcagcaacttgatagtttaaatcttgatgctct

SEQ ID NO: 19324 - DNA, 2378 bp, Oryza sativa
  ref <308>: DATABASE ACCESSION NUMBER: AK069689
  ref <309>: DATABASE ENTRY DATE: 2001-12-06
gatcaacagggtgatactgccagcttcttctcaactcgacataagagctccctggcttctctgtaggggggtcactttggtcgatggagggggggacgaagaaagttttcacagttcaggtggaggatggaaagcccaggaaggacggccggccggcggtagggccagtgttcaggagtgcactgtcaaaggatggattcccgccacttgagcctgacatgaaaacatcatgggacgtgttcagggtcgcagcaggcaagtacccagataatcggatgctcggatggcgtcctgtaaaagatggagtgatagggccatacatatggaaatcatacagggaagtgtatgaagaagtcctgcaagttggatctgctttgcagcagctgggggtgaagccaggttcccggattggaatatatggatcaaactgccctcagtggatagtagcaatgcaggcttgcaatggttacagcttaatctgtgtcccactctacgatacgttaggtgcaggagctgttgacttcattattgaccatgctgaaatcgatgttatctttgttcaggacaagaaaataaaagaaatactgtccgcaaattgcaagtctgctaagagagtgaaaggactggtggcatttacttcgggaacaagcgaagaaatcacaagtgctgatcagattgggatgaagttgtactcgtggaaagatttcttaaaaatgggaaaggaaaatccagcccaaccttgtgctccaaaaccaaatgatacatgcaccatcatgtacacaagtgggacaagtggagagcccaaaggtgtcatgcttagccatgagagtcatgccatatatgtgaaaggtgtggacctcttcatggagcagtttgacgataagatgacaacagatgatgtgtttctttcctttctaccgcttgctcacatccttgaccgcatgatcgaggagtttttctttcacaaaggagcctcagttggctattatcatggggatttgaatgccttgagagatgatctcatggagctaaagccaactctactagttggggtgcctcgagtgtatgaaaaaatttatgaaggtatcttgaaggccttatcagaactcagaccactcagaagattaattttcaatgctctgtataaccgcaaactggcaaacatgaaagcaggctgcacgcacaaaactgcttcaccttttgcagatatgttggctttccgcaaggtcaaagcaaggcttggtggtcgtcttcgcctattaatctcgggtggggctccattaagtaatgagatcgaagagttcttgagagtagccagctgcgcatactttatccaaggctatggtttaacagaaacactgggacctagcacggtctgttaccctgatgacatgtccctggttggaactgttggcgtggctgctacctatacggaattgcgattggaagaagtgcctgagatgggttacaatccacttggtactccttcccgtggtgaaatatgcgtccgaggaaacttcttcaccggatactataaaaatcctgagctcacgaatgaggtcatggctgatggatggtttcacacaggtgacattggagagatgaactcagatggaatcctgaaggtaattgaccgaaagaaaaatatattcaagttgtcacaaggggagtatgttgcagttgaatacctggagaaagtatatgttttccctccaaccgttgaagatgtctgggtatatggggacagcttcagatcaatgttagtggcagtagttaatccacatgaagagaacaccatgaagtgggcagaatcaaatggctgcaagggttcttttgctgaaatatgcaagtctgaaggccttaaagagcatatcctgaaagagctgcaatctgttgcagcaaagaacaagctacggggatttgagtatgtcaaaggtgtaatattggaccctattccttttgaccttgaaagggatttggtgactgcaacaatgaaaaagaaaagaaacaacatgctaaaatattacaagcctgagattgagaaagtataccaaaaactggaggaacagagggttgccgccaaatcaaagtaaagaaatatgttccctttgaacactaaatgaaaagctagaatgccattgtaaatttttcaatttttagataatggatatcgttccggcctctacatgtaaattttcagttgaactttggtactcaagattacatgaatgcaataaaatgtatatcgtgtgatgccttgtgtagctattaccccccttcatctcatcttacatatatggaatatgatgagcactacagaagtttgtgctacaccacatacttcgaagatactgaatgagatatcaggtattgaaacc

SEQ ID NO: 19325 - DNA, 5229 bp, Oryza sativa
  ref <308>: DATABASE ACCESSION NUMBER: AK069690
  ref <309>: DATABASE ENTRY DATE: 2001-12-06
ggcttttgcacccaccaccgcatcccccgcccggagaccggcgacgacggacggaggggttagctccgacgagcgaccgaccacgagttatgatatgagctcatctgcgccttccctcacagcgtccacctactgatcatcctccaaaatccggtgaaatggggacgaaagttaatattatagtaggttctcatgtttgggctgaagaccctgaaattgcctgggtcgatggagaagttgttaagatcaaaggtgaagaggccgagatccaagcaaccaatggaaagacgatcaccgcaaatttgtcgaaactgtatcctaaagatatggaagcagctgctggtggagttgatgatatgacaaagctatcctacctccatgagccaggagttctgcagaatttggcaaccagatatgaacttaatgaaatatatacatatacgggaaacattctcatcgccgtcaatcctttccaaagattgccacatttgtatgatccacatatgatgcaacagtacaagggagcaccatttggagagttaagtccacatgttttcgctgtggcagatgttgcatacagagcaatgattcatgaagggaaaagcaactctattcttgtgagtggtgagagcggtgcaggtaaaacagaaacaacaaaaatgcttatgagatatcttgcctatttgggtggccgagctgctaccgagggaagaacagtagagcaacaagttctcgaatcaaatccagtccttgaagcttttggcaatgctaaaactgtcagaaacaacaattctagtcggtttggtaagtttgttgagattcagtttgataagcaagggaggatctcaggtgctgctgtgagaacttacttgctagaaaggtcacgggtgtgccaaatttctgatcctgaacgcaactaccactgcttctatctcctttgtgccgcaccacaggaggaggttgagaagtacaaattaggaaatcctaagacttttcattatcttaatcaatcaaattgctacgagttggttggggttagtgatgctcatgaatacttggctaccagaagagcaatggatattgttggcatcagtactcaggaacaggatgctattttcagggttgttgcagctatccttcatatcggtaacattgagtttgccaagggcaaagaagtcgattcctcagttttgaaagatgacaaatctaagttccaccttgacacaactgctgagcttcttatgtgtgattctggagccttgggagatgctctttgcaagcgtgtcatggtaacaccagaggaggttataaaaaggagccttgatccttacaatgcaactgtcagcagggacggtctagctaagacaatatattcccgcttgtttgactggcttgttgataaaataaacagctcaattggacaagatcctaactctaaatctcttattggtgtcttggatatctatggttttgagagcttcaagttgaacagttttgaacaattctgtattaattatacaaatgaaaaattgcaacaacatttcaatcagcacgttttcaagatggaacaggaagagtataccaaagaacaaattgattggagctatattgagtttgttgataatcaggatgttcttgaccttattgagaagaaacctggtggtgttattgcacttctagatgaggcatgtatgtttcctaagtcaacacatgagactttttcccagaagctgtaccagacatttcaaaagcacaaacggtttgtcaaaccaaagctatctcgcacagattttacaatctgtcactacgctggagaggtgttgtatcaatctgaccaattccttgataaaaacaaagactatgttgtggccgagcaccaggagttactaagcgcttccaaatgctcgtttatctctggactttttcctcctctgccagaggaaacatccaaatcctccaagttctcttcgattggagcacgcttcaagcaacaacttcaagctcttatggaaacactaaactctacagaacctcattatatcagatgtgtcaagccaaacaatgtgctaaaaccggcgatttttgagaatgtcaatgtcatgcaacagttgcgttgtggtggtgtacttgaggcaatcaggatcagctgtgcaggttatcctacacgtcgcacattttatgagtttttgcatcgctttggaatacttgctcaagaggcccttgaaggaaattgcgacgaaaaggttgcatgcaagaggattcttgaaaagaagggtcttgtgggatttcagataggcaaaacaaaagtttttctgagagctggccagatggccgaattagacgctaggagaactgaagtgctcggtgctcggcaaaaacgattcaagggaaaatacggacacatatcatgcggaagaagttcgttaattggaggaaggcatctatatctgttcaggcaatatggagaggaagattggcttgtaaactgtttgatcaaatgcgaagggtagcagctgccatcaaagttcagaaaaaccaacgtatgcatcaggctaggaggtcctataaacacctaaatgcttcggttcttgtagtgcaaacggcattgcgagcgatggcagcaagaaatacgttcagatacaagaagcagtctaaggcagcagttaaaattcaggcccgttataggtgccatacagctcatgtgtaccataagaagttgaaacgcgcagccattgttgcgcaatgtagatggagaggaaagattgcaaggaaggaactcagaaaacttaaaatggaagctagagaaacaggtgctctcaaggaagcaaaggataaactcgaaaagaaagtggaagaacttacatggcgtgtgcagttagagaagagaatgaggacagacttggaagaagcgaaagcacaggagttgtcaaaactgcagagctctatggaagctctgcaggctaaattggacgagacaagtgcaaagcttgttaaggaaagagaagttgctagggctattgaggaggcacctcctgtagtgcaacaaactgaggttctagtccaggacactgaaaaggttgattccttgacagcagaggtggaagaactcaagacctcactacaatcagaaaaacaaagagcggatgatttgaaaaaaaaacgctctgaagaacaacaagcaaatgaagaaaaacaaaagaaaatggaagagactgatgtaaaaatgcgtcaattccaggaatatcttagaaggttagaggagaagctcgctaatgtagaatctgagaataaagtccttcgtcagcaagctgtctcaatggctccaagtaaaattttgtcaggccgttccaagtccattttacagaggaatgcagaaagtgttcatgtatcaagcggcgattcgaaagcagccccagagtccaataacatatcctctcctaaaaaggaatttgacttcgatgataagccacagaagtcacttaatgaaaagcagcaggaaaatcaagatctattaattaggtgcattgctcagcatttgggctttgctggaaatcggccagtcgctgcttgcatcatatacaagtgccttcttcactggagatcatttgaagtagagaggacaagtgtttttgaccgcattattcagaccattggtcatgctattgagacacaggacaacaacgaagtcttagcatattggctctcaaatgcttcaacacttctgctgttgcttcaaaggacactgaaggcaagtggatcaacagggatggctccgcagcgacggagatcgtcatccgccactctttttggaaggatgacccagagcttcagaggaactccccaaggtgtgaatctttctctgataaatgggagcatggttagtggagtagagactctacgacaagtcgaagcaaagtatccggcgttgttgtttaagcagcaacttacggcgtatgtggaaaagatatatggaatgatccgggacaatttgaagaaagagatctctcctttgcttggtttgtgcattcaggcaccaagaacatcaagagcaagcttgatgaaaggatcttcacgttcaaacacaaatacggctgcacaacaagctttgattgctcactggcaagggattgtaaagagccttggaaatttcttgaacatgctgaaattgaacaatgttcctccatttttggtacgaaaggtattcactcagatattctcattcatcaacgtacagctttttaacagtctgctgttgagaagggagtgctgttcgttcagcaatggtgagtatgtaaaagcgggattagctgaactcgagcattggtgctatcgagctaccgatgagtatgcaggttcagcctgggacgaacttaaacatattagacaagctattggtttcctggtgattcatcaaaagccaaagaaaacgttggatgaaataagtcatgacctttgtccagtacttagtatacaacagttatacaggatcagtactatgtactgggatgataagtatggaacacacagcgtgtccccagaggttatatcaaacatgagagtattaatgactgaagactctaacaatcctgtgagcaattcatttcttctggatgacgactcgagtatacctttctccgtcgatgatatatccaaatcgatggagcagattgacatttctgacattgaaccacctccgctcattcgagagaactcaggctttgtatttctgttgccgccccctgaataaatagatggcataaacaatgcaagacttggttatgaaaagcattgcctcagccagataattggacagcttatgcaaagtgaggtgttacgagttactattgcccaattagcgagatacggagattcctcgtttgcaatattactgatacaggtcgatgtaagcaaatgcggcaaaatatgaaacctggcatgcctagacccagcttctatgccttgggtttttttatcccctcctatatttttatttattctttaaagtccagaatggttagacattagttcatatcaaactagtttagaaaattttagcagaatcagcgaagattcatttgtttctaggttattgacttagttctagagcctttttgaggtttgcaagagatgtgcaaattgcaaataggatttttttttcttttcctcttccagtcattgggttacctacgttgtactgatcgtgtgtataacagaatactatattgaact

SEQ ID NO: 19326 - DNA, 955 bp, Oryza sativa
  ref <308>: DATABASE ACCESSION NUMBER: AK069691
  ref <309>: DATABASE ENTRY DATE: 2001-12-06
gttacgcaccactgaaccacctgcaagacggaggtggttttcagagtttagagataagatggcgctgcatcttcttcacctgcttgccttctccctgctcttcgcagtggcgacccctatcagggacatcaccgatgtgtgctcgtcacagatcaagggtatcaataatcctccttgtcttaattagttagctttctcttgattcatgctgttaattatgtctggtttctgcaagtagatgaaagatatgtgctttgttgacatatccataacagtacagcttactactgagtttacatagcgctagccaattgagtagaaagactgaaagagcaagagtaccaattaaagcacctataagtaggatttgaagaaccaatttcagtttgcagtcaaaatagcatcacatcagcttgaggcaccacttccttttttctagcctggagtctttgcttgttttagcacctcggttaagctagtacaactagaatcaacatggtgaatggacgtaaatatggtggtagtgtaaccacaaatttgtattggtcatgtagtatccttcccctgaaaacattttcaggggaagtctgaattttctttgtcgatactataactaacttaagaaaaaaatgaagaaatgacaggagggtgggagccaaatgacaaccaaaatcgaatcttttcggctcgatcatttctcttcttttccaactcttttcgccgccttgaattaaaatatacaggacagtcaatgatccgtcgccaccagaagaaaagagttttgttaggtacacacttttgtcgacggctaattgttgccgggcggcacgcaggtgcagcgatcgatcttatcaccacacaagcgtttttccaatgctttgtcctgaccgacaattttttttgtacaaatccattattagcggcaaaaactccgtccaagatggcatattttcct

SEQ ID NO: 19327 - DNA, 2466 bp, Oryza sativa
  ref <308>: DATABASE ACCESSION NUMBER: AK069692
  ref <309>: DATABASE ENTRY DATE: 2001-12-06
ggagagagagattgcaagggaagggaagggaggaagcggaagaagctttttttacccttcccacgagcattcaggggagagggtacgtgcaggagccaaggtccaacaaagcgatacctccttctcctcctcctcctcatcctcgtcatcagattcgccgcacgcgcacgatgcaggaagaattcgattggccaaccttagtgttatcaacatcaccagaaacagaaaatgttacctccagctctgtgagaagcacaaccaagaatgacgtggttattcagcaaggttccatctcttcatactggccatgggatgtcatgaaacttgaaaacgacacccattttctgtctcattcttcaggagatgggatgaaatgcacaaaggctgaccattttctatctcatgcaaacaggggttcattgaacttggattatcaagaacaaccttcaaagtccaattttgctactgaccttggatcacatgcatattctaaggaagccaggacacttggaagagtatatcatgggcagcagccttacttttccccttcaagctgttcttgggaaaaatcttctgcattaaaagtagtgccaaatagtccagatgcatcagggcatatagtcggggaaatgagaaccaaaaccaacatcctcagtgcaaggtcaaattacctttcatatcctactgatgttcctcatataaggtatcgagatgaagttaaagttgatcttagccaagatgataattccaaacagtacagaagacctgatcaatttactgccttctcaaacttcaatggtcaatcttctgaacaccttgagacagccaaaggggcaaactacatggatgagatcactccaatttcacgtcaatggtgctttgataatagaggcccatcactaccaagagggctggtctatggtgatgagataccatcgctatcttctaagaagtgtaatggcaatgttgcatcatcatattcaagaatatgggattatagtgctgaaaccacatcagtcagacaatgctatggcgataaaatcccatcattgtctcaccattggcactaccgagataagatccccttgcattctggtcagtggtgccatgatgctgaggcacgcccattgtcgaactaccagcaaggtgcttcttatgggaatggtcgtttaagagataatatttccaggggtggtaggaatgagcaagtcaacattatctcaagcagacgtactatgacaaaacctagggtggctaacaaggttgtaagcagcaccgatcactacaagattaataaggataacctatggagaaattctgaggatataagggatcaagttcgtggcccccgggcaaataaattaaataattcttcaacatcatctatcaagaataatgccatccctcctttggtctgtagagatcaaattaatagaccagagttcacagttcagtatgagcatgcaaagttctttatgataaagtcatatagcgaagatgatgttcataaaggtatcaaatacaatgtttgggcaagcactccaaatggtaacaataagctggatgctgcttttcatgaagctcagattttaatgaaggagcagggcaaaaggtgccctatattcctattcttttcggttaataccagtgggcagtttgtaggattagctgagatgttaggtcctgttgatttcaagaagaccatggacttttggcagcaggataaatggaatggatttttccctgtaatgtggcacattataaaggacattccaaatcggttcttcaaacatataactcttgaaaataatgaaggcaaagtagttacttttagcagggacactcaggagattgggctgccccagggtctggaaatgttgaagattttcaaggcatatcaccagggaacatcaattctggatgatttttatttttacgaagaaaaggaaaacatgcgccatgcccagaagggaagaaatttggaaacaaccaatcaagatttgttctctgatgacttcagatcaatatcagtggagaatttggaggccagcatgcagagcttgagtttctatgaaacttgggagtaatttagattgttctagtgtgcatccaaaatcagtaagttgacgagtcagtgaagcagctcaaggcttgaccctcctttgcaaaattgggttgatccaacgacgggataatacacagatgaatccaaacaattttaatgattatatatatatatagtattttgtgtagaaccacgtatgattgtgggtaaccttagaacaagatttgaacacactgaatgtttgtaatagttacttatctggtggctacagtgactttccatagactagatgaatttgacgaaactggcaagaacaaagcacaagtctgtaggcaataatgccatattatctgcgtgaacaatcatgttgatgaatgtgcatctcttctgatgtgtatgtg

SEQ ID NO: 19328 - DNA, 664 bp, Oryza sativa
  ref <308>: DATABASE ACCESSION NUMBER: AK069693
  ref <309>: DATABASE ENTRY DATE: 2001-12-06
gatcctgccactctacaaagagcttaattagctagctagtctcttcgatctgcttctctctttggtttccatggcttcttctcgggttgtcgtcgcggtggcgctgctcgtggcggcggtgctcgccgcgttcggtgcgctggcgccggcgtgcgagggcgcgagggtgatgcgcgagggcgccgccgtcgtcggcaagatgtcgagctaccagccgccggtgaggcataagcctcccgtcccgccgtcggggccgtcgcacaggcacaacaagagggcgacagtcccgaggaagaggaagcacttcccgccgtcgggcccgtcgtaccacgatccgcacagctgagctccggcgatcgtcgtgcgcggccatggaaagacggccggccagtcagcatctctctctgcagtagcttcattaattaattgatttaattagttaggaattataataataatagcaggagagattatctagcttaattgttatttccttcttttgattagtttggtaggttaatttgaggtgtaatgcaggtattgttaattagcatttcgtatagaaatgcgcatgatacatgcatgccatttagtttaatttttagatgtttctctacgaattattcattttcttaaataaagttactttgcttattaattagtc

SEQ ID NO: 19329 - DNA, 3018 bp, Oryza sativa
  ref <308>: DATABASE ACCESSION NUMBER: AK069694
  ref <309>: DATABASE ENTRY DATE: 2001-12-06
gagagaggtctccttggccctcccaactcccaagttccccactccgccgcagcttctgtgccggccggacccccgttgtgccccgatttccgcggccgtcccgcccccgagcggcgctgccatctcgcattgccgccgccgccgccggtatggccacgggtgctgaggccgccgcggcgttatctcctccgggcgccgccggtgccgccgtcatgggagtcttcaagtacaacttcgcggcgcagttcctatccagggtcacccccttcctctacaacagctggttcgtgcgccagctcagcgccgacgactgcgcggcatacgcgttacagcttcctctcttcatcaactgcgtcctatttttaagccgggaggggtttcggcgtgcatgcttgcgtaatgattctgacagtggcaatgcgataagtgatgaagagatactaaaggtagcttggatgattgtcccatttggcatcttagtttcctttatcagcagcttatttgtgttgagggtaaagaaattgcggttatccgatacctatgctaaagctacattaattatcgcatttgcttgcgtactggagctactggcagaacctctgtatattctctcccagaggaagaaatactatcaaataagagtgtatactgaacctgtggctactctgctgcgttgtttaacaacttttatcttcataacaaaaggacattctaaaatggtaacagcagaggtttttactctattgacgttctattcaacttattatgcactttctgtctcagtttgttatcactgataaaataaaatgcttaagttcacattgtttttgttgtttacacctgatactggtatagccatctatttggttatggttacattgtgaaagctagcaaatcaaaaagttccattgccaatttcatattgtgttcttttggtccatgcaccaaagaaaataacttggtgtgagatttctctcttagctacatttgttcagggttaacaggatgtgggttagagaggattaacttaatcaggttgtgacattttaactttattaattaggattaagttaacccacaaaaaaagtgaatatgataacatagaacaactaaacctctttagagttctatttttccaaatataagtgtataatctggctaaccatctaatctagccaaacaaagtcttagactgaccattgtaattgccaaatcgaacaattaagctatatgtattttagacttatagtgttacttaatctagttattttcaactttaagcagatcaccttatgtttttttggttggttatgcctccattgtaaattccatgttaagttcgtctttgacaataataggactttacaaaacaaaaatatgaattctgctgagtgatatgtccaagtaatcttttctttctttacttttcaattaattggtgttcatctcatgtcattcttttcttattcaattgttgatcaacacaacacaaaaacaataatttatttcttgcaggaaaagttggttgtatttgctttgtcacaggttgtctatgcagcttgcattttctttggatattggacctattttcttatatttacaaataccaaaatttccgatctccttccattcaggttccttctatgtctgcctttgcattgtgttgtatcattaggttttgtttgatccatcacatgtttatgtttgtttccacttgatgttaaaacaaacaaattgtcaggttgtcagccatgatggactgcgataaacagttgttgcacatgtgcatgttgtttacaggacagactttcaggaaactgatgctccaagaaggcgaaaagtttgttcttgtttggtttgatactccatataaccaggctgcctatggtcttgtggataaattagggagtctggttgttagaatagttttcctgccattcgaggagagttcttatgctacatttgcacagttggcatcaggacaaaatccccagaatatatccaatttggaaggttctttgctcggagctcttaagcttattatgctgataggcttggtggtcatctcatttggtccaagttattcatatacccttcttagactactttatggggcaagatacagtgatggagatgctacagttattcttcgttactattgtttctacgtcatatgcttagcaatgaatggcacatctgaagctttccttcatgctgttgcaaatgaagacaagcttaagcagtcaaatgatatgttgctcctgttctcggcaatttacattgtgctaaatgttgtcctgattaaatctgctggtgcagttgggttgattgctgcaaattccatcaatatgctgctgcgaatcacatattcagcggcattcattaaagactatttcaagggctcattctctttccgccactgcttgccggcaggctggggtgtgttgctcatttctggcctgaccacagctttctctgaaaggatgtttctgaatagaaacaggttcaagcagacccttcccattcacatggcgataggcataatgtgcctgggtttctcatcactcgagatataccgtggtgaaaagcagttcttgacgagtataatcagatcattgaagagccgcgacaaacttgcatgagtctaacaacattcagggttttgcgagtgtttttagcattcgcctgataaccgcattttcagaaagaaaacatatacgatgccgtaaatataattgtacattgcatgggttgacgacagaagataattatgccaagcggctggaggacttcactgaacatggatcaaactggtcgcgttctctactggagtcgggttaatggtgtgtgcagcagaacaactgttcactaaacggcaacagaaagcatagatcagtggcttatataggcaatttattatcttattctgtagtaactgctgactacaccaaaatctaagggtgttaagagaaaaattgattatattttgttacagctaaaatatactccctctgtccc

SEQ ID NO: 19330 - DNA, 1602 bp, Oryza sativa
  ref <308>: DATABASE ACCESSION NUMBER: AK069695
  ref <309>: DATABASE ENTRY DATE: 2001-12-06
gcttttctcgatctctccacaactccccccccccctccagctctctccaaagtccaagtctctctcggtgctcacgccgccgccggccaccgccgccccccgtccgtacaccgcgtggcccgcccccgcgcaggtgagggagctagcggccttcgtctgccggcgccggaggcggagccagattgttgggaaacgagttttccgcccgcttctctggtttctcggcggtgtcttttactcctggggcggcgatcccgacgcggggatgcggcgggctgtggcgtgatgtgtggatcggagcatggacttgatcgcgtcgcacggtaggagctgcagcggtcggggtgggagcaggggtcgcgcggcggggtgcggccatgacgatttacatagcgcgggaggcttccaaggtatggaggaaggtgaccacggagacgtcggtggagctctcgctgctgcgcgagaagtggggattgctcctcgccggaattgtgtttcagtatattcatgggctggctgctcgaggagtgcattacttgcatcgacctggtccacttctgcaggaccttggatttatggcccttccagagtttgggcaagacaaaggttatctaagtgagagcatatttgcttccatcttcgcttcctttgttttatggacttttcatccttttatttatcatagcaaaagattctacactgtcctaatctggcgccgggtgctagcctttttagttgcttcgcaggttttaagaatcattacgttctattccacccagcttccgggcccaaactaccattgtcgtgagggctcaaagttggctactcttccaccacccaacaatgtatttgaagtgctcctgattaactttcctcgtggagtactttttggctgcggtgatctgatattttcatctcacatgatttttactcttgtttttgttcgaacataccacaaatatggttcaaaaaggtttgttaagcttcttgcttggttcatggccatagttcagagtcttcttataattgcttctcgcaaacactactctgtggatgttgttgttgcttggtataccgttaatttagtcgtattcttcgtggacaacaaactcccagaaatgccggatcgtacaaatggagtacctttgcttccattgagtaccagggaaaaggatggcaggttgaaggaggagaaagacagcagactgaaggaagagttccataagctattaaacggaaaccatggggatcctactgatcggcgacagcgcgcgcagatgaacgggaggcacgatgaagacatcaatcacgcccacagcacgctctccgacgctgctgtcaatggtggtacatgagccgcggcatctgctttccaccgggagtttgtcttctcgcgtcgaccccgaggagaatcctctgggggcggattgagaacaaccgcccggtccatctgcatagtgcatgcacatcctgaacaagattccagcggcagaggcagcattacacatggtttccttgtcgatttctgctcatccaccatcctggtactatagcatgatcgcagataaaacgaatgaaatgaatggatgatttggtgctctg

SEQ ID NO: 19331 - DNA, 1234 bp, Oryza sativa
  ref <308>: DATABASE ACCESSION NUMBER: AK069696
  ref <309>: DATABASE ENTRY DATE: 2001-12-06
gcgtctccgccgccgtcgccgccgcctccacctcccgtaccctcgtcctcgcccgccaccgctcgccgccggcgtctagggtcgcggcgacaagccgcgggcgtccgttctcctccggcccccatcccctcgccgtctctcccgccacccgcgcccccgccatggccaccgacggcgccgccgccgccgccgcggcagggtcgaagaagaagaaggaggtgctcatcttcgacgccgaggaggacctcgcggtgtccctggcgaagtacacggcggagctgtccgcgaagctcgccgccgagaggggcgccttcaccgtcgtgctctccggcggatccctcatcaagaacatcaggaagctcgcggagccaccgtacctggattcggtggattggagcaagtggcatgtgttctgggtggacgagagggtggtgcccaaggaccatgaggatagcaactacaagctcgccttggatgggtttctctccaaggtcccaattcctactggccaagtttatgctataaatgatgccttgtcagctgagggagcagcggatgactatgaaacttgcttgaagcaacttgtcaagaatggtgtgattgcaatgtcgcaatcgactgggtttcctaggtttgatgtcatgctcctgggaatgggccctgatggccatattgcatctcttttcccaggccaccctcttgttaatgaaaacaagaagtgggtcacctacatcaaggattctccaaagccaccacctgagagaattacgtttacatttcctgtgatcaactcatctgcgtatgtcgcaatggtggtcactggagctgggaaagctggtgcagtgcagaaagcactttcagataagcagacttcgtctgatttgctgcctgtagaaatggctgtacttcaagatggggaattcacttggttcactgacaagccagcagtgtcaatgttacagaacaaatgaggtccatgcctggatattgtttaagctttcatcttaaataaagatccaggggctaatcccagcctggatactgcttaagctttcaatccaaagctgggttgtaatgatcttctgtctaaaaaaggatccaggtgactgcatagttgcattcctcttttatgcatcacttgtaaggaaaacatgagcatgtatgttgtatgttgttcagagtgatgtatctgagacactcctggtttcgacttagtaaataacctttcctggcc

SEQ ID NO: 19332 - DNA, 1641 bp, Oryza sativa
  ref <308>: DATABASE ACCESSION NUMBER: AK069697
  ref <309>: DATABASE ENTRY DATE: 2001-12-06
ggcgggagcaaaaggagaaaaaaaaacaacagcgagaaaaaaaaaaatcaagaacacgagcaagcgagaggggaagagagagagagagagagagagagagagagagagatcacgagatcggaggaggaggaggaggaagaagaggggaggaggtggcgtgttgagtcggatcgaggtttgcgtttgtgttcgtttggtcgccggcggaagcgatggagagggcggcggcggggccgctggggatggagatgccgataatgcacgacggtgacaggtacgagctggtgaaggagatcgggtcggggaacttcggcgtcgcccgcctcatgcgcaaccgcgcctccggcgacctcgtcgccgtcaagtacatcgaccgcggcgagaagattgacgagaacgtgcagagggagatcatcaaccacaggtcgctgcgccaccccaacatcatccgattcaaggaggttattctgacgccgacgcatctcgcgatcgtcatggagtacgcctccggcggcgagctcttcgagcgcatctgcagcgccggccgcttcagcgaggacgaggctcgtttcttcttccagcagctgatatctggagttagctactgccattccatgcaagtatgccatcgtgacttaaagctggagaacactctgctagatggaagtactgctcctcgcttgaagatatgtgactttggttactcgaagtcatcggttcttcattcacaaccaaaatcaacagttggaactccagcttatattgctccagaagttttgctcaagaaagaatacgatggaaagattgccgatgtttggtcatgcggtgtgacgctctacgtgatgttggttggcgcataccctttcgaggatcctgaagatcccaagaacttcagaaagacaattcagaaaatattgggtgttcagtactcaattccagactatgtccacatatctccggagtgccgcgatctcattacgaggatttttgttggcaacccagctagtaggatcaccatgcctgagataaagaaccacccatggttcatgaagaacatcccggctgacctcatggatgatggcatggttagcaatcagtacgaggagcctgaccagccgatgcagaatatgaacgagatcatgcagatactggcagaagcaacaattccagcagcaggcaccagtggaatcaaccagttcttgactgacagccttgacctcgacgacgacatggaggatatggactcggaccttgaccttgacattgagagcagcggagagatcgtatatgccatgtaatcatctcaacatttgcaatgaaactgcactgaaaatcagcttgtttcagagcaggtagagctccagaagagatctgtgttcaggctactaggaagcaggctctgctgcctattagttcttgagtctgaatttctgatgaaccatactgcagctgagttgcagcagattgtgtagtatgtaattatgtatgttgtgccaaaaatttagcaccggatgatatcatgcaagactgtttcttgggaacactgagaaatgagaagcattgtatggaacctagttctgtattgtattaaacagagagacagaagagatgtattggttaatgtatttgctatgtgtatgt

SEQ ID NO: 19333 - DNA, 2514 bp, Oryza sativa
  ref <308>: DATABASE ACCESSION NUMBER: AK069698
  ref <309>: DATABASE ENTRY DATE: 2001-12-06
gctcctcctcctcctggattgccgccgccgcccacggtttccagcaatcgccgcggttcgcgccgccgccgccgagcggagcagcgccccgatcgatccccttcccctcccgcgagcaaccgacgccggcggaagtcccagctgcttccgccacttcgcccggtgaagcatccgtactcacgctcatcctcttcctcatctctctttgcggtctttactacccactacgcctaacccccttttcttttttcttctcggatttcgttagccttagcttctcttccagatccgcaagcaattttcctgaattggacctaaccagagtaagagtagcagtttgttaggattggattgggagtgttagcccctgattagttgacaggagtagattaatagtgtacctccgttgaacttgtgatgaactttgctaatatatgccaaagtggcttgtcgtgattgggttagttatgagtatctactgtgccatgattagattagatgcgtgtccagattgctgccatctactgggattaatgtttgagtgagttttgttttttttgttttttgtgtagaaatggatcgacctgatgaaaccgtgaaattcccaagctgtgatgcgtattttgacactatacagtccaagaagaagctgcccctctctttgcaagaatcgctcactgctgcctttgctcagattcctgtctcgtcttttcctgatgttcctaatggccgagtgattgaaattccaggagacacttccgttcttgacgctgtgagaattctctccaaacacaacattagggcagcgccagtgctaaatccggaatgtggagctccggctgattggaaagggaggtaccttggcatcattgattactcggctatcatcctctgggttctagaaaatgctgagattgccgccgttgctctatcagctgggtcagcaaccgcagcaggagttggaatgggtgctgtcggtgcagtgggagtggcagcattgggtgcaactggtcctgcagctgttgctggcttgactgccgctgcagtaggggctgctgttgctggtgggttaacagcagaaaagggtgtggcaaaggatggactaactgctgctgatcatttaggagaagatttctacaaagttctgcttcagcaagaacctttcaaatcaactacagtatgcattttactctatgatgaattattatgcatatttggatttttttttcctttttgttaaatgtcgatcatttatagagtccagtcagtctcaaattatttggtatatattttaccttgaaccactgttctgctgtgtggctacaccgaagtttggctatcctagttacaatatatgccgcagcttggcgtgattgaaaacttcctgtgatttcttagctgcaacttattgttgctaataatagtttggatatctgtcctctttgcctcatttgaatattgcatgatgatcttctgatgtaaatcctgctaaccttcatatttttttctcattattataggttcgatcaattgtagaatcctaccgctggtctccttttgtccccattacactggacacttcaatgcttactgtattactgttgctatccaagtacaggttaaggaatgtcccagtgattgagcctgataagccaattattaagaacttcattactcagactggtgttgttaaaggacttcagcagtgcaaaggaagggattggtttgattatatttcagcgctccctctctcggacttgggacttccatttatgtcacttgatgaggttatcactgttaacagtggtgatctaatcttggaagcttttaagtgcatgaaggacaacaaaattggtggtgtgcctgtagtagaaggtcccaacaaaaaacttgttggcagtgtgagcataagggatattcgctttttgttacttaggcctgacttgttttcgaatttcaggcaacttactgtcatggagttcatgaagaccataggttccaccgtttctgattcagggaacggcctggtgaagccacctctcacctgttcgcctgacgcttctcttggcagcgtgattgacagcattgcatcaagaataacccaccggatatacgtcgtggacggtgacttcgaggttgttggtgtcgtgacactgcgagacgtgatctcttgctttatctatgagccacctggttactgtgacaactatttggcatcagccatggataagcttgaggagaaaggtgcaggttctgtggacacaagttgagcctttttctgtaacgcgaacaccaaaataacagactgaattagggagcagtagcaactctgatgtattcaggtttaatttgtggtgttgctgcagtgaaagtgtgtagaacaagagtgatgctgttgctccatggtctcttaatgtagtttgcttggtgttactaaattactatatagggagaagtcaatataccctcagtaaaagtccatctaacacctcatactttgaagtcggataaccg

SEQ ID NO: 19334 - DNA, 2196 bp, Oryza sativa
  ref <308>: DATABASE ACCESSION NUMBER: AK069699
  ref <309>: DATABASE ENTRY DATE: 2001-12-06
gtgggaaagagggaaacgctatccgctaacccctcgcgccgtcgcgcttcctgtgcctcgaggaccgaccatggcggcggcgaggcgcgccgctggcctcctccctctcctcctctcctcgccgtcgcgagctcgcctaccgcaccgccaagcgcttgccctgacccctcctctgcttcgcccccaccgcctctactcccactcccccaagccctcgtcgtccgccgcgttttccgccttcgcctccgcctcgaatggcgcgcctgcggggagagcccgggagctgcacctctacaacaccaagtcgcggaggaaggagctcttccagccccgggtgcccggcggggaggtcggcatgtacgtctgcggcgtcaccccctacgacgacagccacatcggccacgcccgcgcctacgtcgccttcgacgtcctctacaggtacttgcgttatttggaccataaagtgcgctatgttcggaattttactgacattgatgacaagataattgcaagagcaaatcaattgggagaagatccttttagcttaagcaaaaggtactctgatgacttcctatcagacatggctaatcttcattgtttaccaccatctgtggagcctcgcgtttcagaccacattgatcagattataaacatgattaaacagatcattgataatgattgtgcatatgcaattggcggggatgtttatttctctgttgaaaatttccctgaatatggggatttatctggtcgaaaattagatgataatagagctggtgaaagggttgctgttgatgagaggaagaagaacccagctgattttgctctttggaaggctgcaaaagatggggagccatcttgggatagcccttggggccctggaaggccaggatggcacatagaatgcagtgctatgagtgcacattacttgggccactctttcgacatacatggcggtggggaggacctgatctttccacaccatgaaaatgaaattgctcagagccgtgcagcatgttgtgacagcagcataaattactggatacacaatggctttgtcaatgtaaacagccagaaaatgtcaaaatcgctgggcaactttgtcactatacgcaaagttacggaactgtaccacccacttgctttgaggatgtttttacttggtacacactacaggtccccaatcaactataccatagaacagcttaatgttgcatcagacagactgtactacacttaccagacactacaagattgtgaagaaagttgtcaacagcaccaaagtaaggctggagatccattacctgttaatactacaaattgtatccagaagctccatgatgaatttgagacttcaatgtctgatgatcttcacacttcagtagcactggctgctatttctgagccattaaaagttatgaatgacttgctgcatactcgtaagggaaagaagcaggaaaaacggctggaatcactttctgctatggaagagaaaataaggatggtgctttctgtcctagggctactaccatcaagctattatgaggctctgcagcagctgcgggaaaaagcactaagaagagcttccatgacagaggagcaggtgcttcagaaaattgaagaaaggacttcagcaagaaaggcaaaacagtatgaaaaatccgatgaaatcagaaaagaattggctgctgttggaattgccctcatggacggtcctgacggaacaacttggaggccatctgtacctctttctgagcaaggggtggttgccagtacatgatctgcgcaacaaaagctccggagtgaccatttcaaatacccatcaccacatgatccattcatgaggaactgcgatgttttccaggttttgagagaaaatcaagagaacatctgacgaatcagatggcctgcatgattcggtagagtggatatgagtttctgtctgacagaagatagccaagttttacagttttattacatcatacatattttgttctcgagtcagctgatatggtgcaacattttgcctatttttttacctgcagagtttactgcgcgatactttttagaaacatcagtacaaaatattgtgtgctgattcattttttgaatgataatacggtttggcatttcaaatggaagtaaagcaaatgtataagctattcggagcaaaatgttttcaccatcatttttccc

SEQ ID NO: 19335 - DNA, 1636 bp, Oryza sativa
  ref <308>: DATABASE ACCESSION NUMBER: AK069700
  ref <309>: DATABASE ENTRY DATE: 2001-12-06
gttccatttttatcctcttcttcctccacatgcctcgaagtttagcccatccccgatcgccgcaccatcatggtccaagaattcttgctcatatcgccgtgcaacgtctgaagaggtgttcaatccggacgaacaagatgcagcagagccggcaggacgtggacgagcatgtcgccgagctccgcggcgagctgcgcaaggcgcgcgaggagcgagaccgcgcgtaccgcgtcctggaggtgagcgagtggaaggcgctggcgtcggccaacgaccgcaccaccatagagacgctcgaggcggagctcgacgcgtccagggagtccgagaagcggatgctcgagtccctggcgatgcagacgaagcagctcgagatgaccaagatcgagctcgaggaggccaggctggagaacgcgtcgctgcgtgagaccatccagaggctcgaggccatagcggtgcccgtcgcgacgacgccgagaggaaggtacgatcgcgactaccagagggttcacggcgagctgcggatggcgctggtggcggaggacaagaacaagaaggcgatggaggagctggtgctggcactcaaggaggtgaacggggagctgcacacgacgcggcagctgctggcgcggtcgcagcacgaggccgagacggcgcggctggagtcggaccggctgcacgtctcgctcaagcgcaaggacgacaagctccgcgcgctgtcggaggaggtggccaggctgcgcgccgacgccgaggagtcgttcgcggcgtggcggggcaaggaggccgggttcacgtcgtgcatgaagtccaccgagtccgagctcgccgagacgcggcgcgagaacgcgcgcctcctggagtcgcagcggtccgggcgggacgagatcgccaagctgcgcgacatcctgaggcaggccgtcaaggacaccaaggtcgtgaaggaggcgctggaggaggcgaggggcgagaacgccgcgctcaaggagatgctcggcgacaaggacaccgccatcaagtgcaccaagcaggagctcgagtgcctccgggtgacggaggcggcggcgcgcgacagcgtcaaggagctgcagagcctgctcgtcgccacgtcgtcgagccccacggccgccggcatgaagctatccgcgtcgccgagccccacagcttccgggataaagctggacatggaggattcctcgtcgtcgcacgggtcgagagaactgcacgggctgatcaagtgccactcggaggcgagggtgaagccgccggcggggctcaccctaccgcggcggaggtcggataacttcgaaggatcggtgtacgacatattcgggtcgatggaagatcagaagagcgagctaagcgcgttctcgacaatgccgaggtcgttgcccgcacggcggcgggtgatgatgcgcaaggttggcagcttgttccggtttaagagcttcagtatcaagtagtagctgctactgccgagattcggggcctgtcttctcttctcactacctgtttgggcgtgtcagttttgattgatcggtgctttctgtgtactactactgggtttaccttcctttcgcctgatcatatcatcagatcatgagctggtaaagtgtatacgagtacatcatttcat

SEQ ID NO: 19336 - DNA, 1737 bp, Oryza sativa
  ref <308>: DATABASE ACCESSION NUMBER: AK069701
  ref <309>: DATABASE ENTRY DATE: 2001-12-06
gagagcacgagcttacctagctaggtccagagaaaaaactgatacaacgatagtaacaataacagtagatagtgtgttactactgcacggttcgtcgcaaacaatggagaatagccagatgtggcttctgtggggagccctctccgtggcgctcttcttctacttctccaccctgcgacgacgctacgccggcggcaagcccctccccccgggcccgacgccgctgccgctcatcggcaacctacacttggtcggcggcggcacgttccaccacaagctcagggacctggcacgcgtccacggccccgtcatgacgctcaagctcggactcgccaccaacgtggtcatctcctcccgggaggccgccatcgaggcgtacaccaagtacgaccgccacctcgccgcgcgcgccaccccggacaccttccgcgcctgcggcttcgccgaccgctccatggtgttcatcccgagctccgacccgcagtggaaggccctgcgggggatccacgcctcgcacgtcttcaccccgcgggtgctcgccgcggtgcgccccatccgcgagaggaaggtgggcgacctcatcgcctacctccgcgcgcacgccggggaggaggtgctcgtcggccacgccatgtacacgggcatcctcaacatggtgtccttctcctacttctccgtcgacatcgtcgacatgggctcgcagatggcccgcgagctgcgggaggtggtggacgacatcatcttggtggtcgggaagcccaacgtgtccgacttctacccgttcctccggccgctggacctgcagggcctgcgccgctggacgacgaagcggttcaacagggtgttctccatcatgggcgacatcatcgaccgccgtttggctcacatccgcgacaacaagccgaggcacgacgacttcctcgactcaatcctcgagctcatggctgccggcaagatcgatcgtgtcaacgtgctcaacatgttgttcgaggctttcgttgccggggctgacaccatggctcttaccttggagtgggtaatggccgagctgctcaaaaacccgagcgtgatggccaaggcgcgcgccgagctgagggatgtgctcggcgacaaggagatcgtggaggaggccgacgcggcgaggctgccctacctgcaggccgtgctgaaggaggccatgagactgcacccggtgggcgcgctgctgctgccgcacttcgccatggaggacggcgtggaggtcggcggctacgcggtgcccaagggctccacggtgctcttcaacgcgtgggcgatcatgcgcgacgcggcggcgtgggagaggcccgacgagttcgtgccggagcggttcgtggagaggacgccgcagctggacttcagagggaaggacgtggagttcatgccgttcgggtccgggaggcggctgtgccctgggctgccgttggccgagcgtgtcgtgccgttcattctggcgtcgatgctgcacacgttcgagtgggagctccccggcggcatgacggcggaggagttggacgtgtccgagaagttcaagactgccaatgtccttgctgtgcctctcaaggctgtgcctgtcctgatcaaatagttggacgactatattattggccagatcaattaccatactcggcaccagaattatattatttttaacgaatttgtactagtgcacattgaatagagaagaagcaaaactatacaagtataagcctacacagg

SEQ ID NO: 19337 - DNA, 1798 bp, Oryza sativa
  ref <308>: DATABASE ACCESSION NUMBER: AK069702
  ref <309>: DATABASE ENTRY DATE: 2001-12-06
ggcgcacctacagcaccaagtgtaaccagagcttacacaaaaaaaaaggcaccacctttgctcggtgctcgtgggggagagagagagagagagacagatggcgacgcggatggctgcggcggtggcggccatggtggcggctgtggcgatctcgctggcggcgggcggggcggcgcagtcgtcgccgagcacgccgagctgcgcgtcgaagctggtgccgtgcgcgcagtacatgaacgggacggacacgccgccggcggcgtgctgcgacccgctcaaggaggcggtgaagaacgagctcaagtgcctctgcgacctctacgcctcgccggagatcttcaaggccttcaacatcaacatctccgacgccctccgcctctccacgcggtgcggcatcagccagaccaccagcatgtgccccggtaaccaacttattttaccctcctcctcctccttctatcccttgttcttttaacagcaaaagagagagagagagagagagaatatgttgtttttgatagaaattatcaccgtggcatcgatcatgagttgttaatttttgtaatattggtatccaaaaactcacccaaatagcatgatttgactgttcctacactgaataaatatgaggccttgttcttgctaatgcattgtttgcctggttgatggaatgatggtttgcacatcgaagtcactgcactgtggttgaagaaataaatccggttaggatgttttaaacaaacggccgcataaactgttcttactgccatgtataatgtcatatttctagtgacaagtcgatgtaattaacacaaatttgtccggcgaaaaaaaaaaggtaattactacaaatttgggaaagtaaaggaatgtttttgcctttttgttgcataagtcaataagtggcgtagggaagttggctttgcatttctgtctctatcagggcaaaacgaaacaaagaaaaaacatttaggtgtgaatataagaccaagctccatgatttgggtcgaccagaagtttgtaggcatccagattcctgttttttgcttccccagtcctgtcctgtaataatcgtagtttaatctgaagacgcaacgatgtcagattataccagttcgccttgggtataatactagttgaatgattagtctcagcctaccgttggatatagtattgtagccatttcacatttgggatgatgtttataaatcaactaggaaaatagctaatttctttgacctgatgaaatggaaccatgaaacttaatctagatttgtttagcactgttttgttgtgctggtaacttttaccaaacatcattacaaaattcatttttttttggaagtcacaccagttcgctactatatctgttgtatttggcaaccgtccttttccttagataattttaatacatatatttgtatggttttctgataagtgtcctacaataatattttgcagggaattcccctacgaactctcctccagcctctccatcaggtggcaaaaacgctggtcatcgcactatgtcagttggtcttccaggattgatgagcttgttcctagcgttgtggtctgtattggcataagaattttggttccatatcagagatgttatcgcttatgccacagtagaggatttacatgtgacggtgtttgttgattggctgtatcatcattctgtacttggatcagaattcgttttgctgtgtatcaatgtcgcaagtcagaagacttacattgtgttgtacttagacctgtgctgatcaaagcgtaatggatgaattgtttatcttct

SEQ ID NO: 19338 - DNA, 2733 bp, Oryza sativa
  ref <308>: DATABASE ACCESSION NUMBER: AK069703
  ref <309>: DATABASE ENTRY DATE: 2001-12-06
gacgtgcccccgcccgcgccgccatctctctccttcctcctgtattgttacgcaagccatccgagccaagcaggagaagaggaagaggaagaggaagaggaagagcatgcccccctgcgcggcatggggaaaagctccgccgacttgtccgcctcctcggagtcggccgtgctcctgcacggcgacctcgacatttggataaccgaggccaagtgcctccccaacatggacatcatgtcggagcggatgcgccgcttcttcaccggctacggcgcctgcggctcctcgtgcggcggcaccggcgacaacgcgcgccgggccggcggcggcgtcaggcccaagaagatcatcaccagcgacccctacgtctccgtctgcctcgccggcgccaccgtcgcgcagacgcgggtcatccccaactccgagaaccccaggtgggaggagcgcttccgcgtcgaggtcgcccacgccgtctccaggctcgagttccacgtcaaggacaacgacgtcttcggcgcgcagctcatcggcgtcgcctccctccccgtcgacaggatcctctccggcgcccccgccgagggctggttccccatcgacggccactgcagcagcaacccccatgcggccgccgccggagctccgcctctccgtccagtacaggcccatcgacgacaaccccctctacaggggcggcgccggcgccgtccccaacgcctacttccctctccgccgaggtggcggcgtcaccctctaccaggacgcccacgtcgccgacggcggcctcccggccatccagatcgccggcggaagggcgtacgagcacggccgatgctgggaggacatctgccactccatcgtggaggcgcaccacctcgtgtacatggtcggatggtccatctaccaccccgtcaagctcgtcagggagcccacccgggcgctccccggcgagacgccatcgacgctcggcgagcttctcaagaaaagggctcgcgagggcgtccgcatcgtcatcttgctctgggacgacaagacgtcgcatgacaagttccttctcaaaacggttgaatgcaggatggtgtcatgcatacacacgacgaggagaccaaaaagtttttcaggcattcaggtgttcactgtgtgctggttcctcgctatgccagcactaagcttagcattttcaagcagcaggtagtgggaactttatttacacatcatcagaaatgtgtgcttgttgatacacaagctactgggaacaaccgcaaaatcactgctttcattggtggtctagacttgtgcgacggcagatacgatacacctgaacataggcttttcaaagatcttgataccgctttcaacaaggacttccataatcctacatttcctgttaattcatatggaccaagacagccatggcatgatttacactgcaagattgagggccctgctgcctttgatatactgacaaactttgaacagcggtggagaaaagcaaccaaatggaaggtcaatcttaagaaagttgcaagttggcatcatgacacgctgataaaaataaaccggatgtcctggattgttaccccagctgcagatgaggctaatgcacatgtttgtgaagaaaaggacccagaaaattggcatgtgcaggtgttcaggtcaattgattcaggttctgtaaaggggttcccaaaaattgttcaggaggcagagtctcagaatcttgtctgtgcaaagaatctaaagatcgacaaaagcatacacagtgcatatgtcagagcaatcaggtctgcgcagcacttcatatacattgagaaccagtatttcattgggtcatcgttcttatggtcctcacataaaagcgcaggtgctgataacttaatacctgtggagctggccttgaagattgcaagcaagatcaaggcaaatgagcagttcgcggtgtacattgtcctaccaatgtggcctgaaggcatcccaaccgcggcaccgatgcagcaaatcctcttttggcagagccaaacaatgtctatgatgtacaagatcatagcggacgctctgcagatgcagggattggttgaagctcaccctcaagattatctgaatttctactgcctcggcaagcgcgaggtcgccgccggtgacagcatgtcccagacgagcttatgcaatgacaactccactctgcgctcggcacagaagctccggagattcatgatctatgtgcactcgaaagggatggtggtggacgacgagtacgtcatcatcggatcggccaacatcaaccagaggtccatggaaggctgcagggacaccgagatcgccatgggcgcctaccagccacactacaagtggtctgctgatcacggccaaggccctcctcgtggacaggtgtacgggtacaggatgtcgctgtgggcggagcaccttggggcggtggaggagtgcttcgggcggccggagacgggggagtgcgtgaggcgggtgagggagatggcggaggagaactggagggcgtacgtgtcgccggagatggaggagacgaaggggcacctgatgtgttacccgttgaaggtggacaaggacggccgcgtccgctctctccccggccacgactgcttccccgacgtcggcggcaaggtcctcggcactcaaacctcgctccccaatgccctcaccacctagtacctgtaccatatcccgcgtgaatatgaatatgaatgaatgccactgttttgt

SEQ ID NO: 19339 - DNA, 1113 bp, Oryza sativa
  ref <308>: DATABASE ACCESSION NUMBER: AK069704
  ref <309>: DATABASE ENTRY DATE: 2001-12-06
ggggcaacgccgcggcgtgtcgtccatctccattctccacggccacggccgagcggtggttgctcgccgcccgcactattgccgcggatttttctcgattctccgcgaaccgttcgaagccaccgcctcactgctggtccaatcccacccgccgcttcttcctctccgcccgcacgcggaagctcactttccccctcttctccggtactactcccctgcgctccccgccgccatcaacgctcggcttcaataccaccgcttcttctgcattcgcctcctcctcgtggcgaacgcgcgcctcccacctcgccgtcgcctcgtcgtacgccgcctttggttcgggctccggctccggcttgtcgggaaagcgcgggagccaccgcggcacgtgcttcggcggaggctccttccccgccgccgcgaagctctcccacgccttgccgcgtggggcccctcccctccgcggcacgggcttcgggaacggcacctcccgcaccacgcggacgaagccagcgagctccgagagcgcgccggagcggaggacggggcgggcggggtcggacgcgccggggaacccgccgagcgcgtggtcctcgagcgcgagggtgaggtccgcgaggttgggctccgtgcggccgcgggcctcggcgatggccgaggccgcgcggcccagggaggcaacgtagcgcccggcgatgtcggagagggcgcggagggcggctggctccgccgcggtgtagccggacgagtggaggatctgggcggtggagactctgctaaccgcgtcctggaggatgcagggaaggtgtccggccgcctcacggggggccctcgccggagttcccatacatggcggcgacggcgaggatcttcaaaaaccctagaggtcagatcgttccaaccggtggttttatgccatgtccagtttatgtcttttttttttttttgagggaatgtccagtttatgttttatttatttttctgctgcacttttggttttttttaaatggaaagtattgatgggtattgggccggccatctgcactcgaggcccatgagtccaccagttgtcgtcttaacccttttaataatgagtagtagttcgtctcgttc

SEQ ID NO: 19340 - DNA, 1466 bp, Oryza sativa
  ref <308>: DATABASE ACCESSION NUMBER: AK069705
  ref <309>: DATABASE ENTRY DATE: 2001-12-06
tgatttctttttttccttttcaatcttccgcctcttcgttcaaacttcaaaccaagctttggcctttggccccgggggctcggtggcctcggcgaaatccgccgaccttgcgcctctgtccgcctccgccgctgccctccgccacctcgggggaagggaaccgtcgggccgccgccggggttgtcggtgaggggggctcgctccagtcccccacaatcccaccgttccccctccgtcgtcgagatcttcccgactactacgagcggaggcccggcgcgcgcgcgcgatgccgccgaggaggaagaagggcgtcgccgccaagcagaagccgccggagccacccgccgccgacgcgccgctgcgggaccggctgaggtggctcaacgaccaggaatatgaacatcggagtgctgccattaaagctattcaagcagctgagattgagagtatactttctcggttgcgtttggttgaatcctacatttccaaggagcaacaagagggatgtgccttgcaatattttcaggagaacttacccaacttatcagttgtccggaatgaggagcagaatgagcttgagttgaaacgggaagattgggacaaacgattaattggagaccactgtgatgacaagatttttcgggcttcagtctcttcgttaccaaatgttggttatgttcaattctcaggggattcagtgcggaaaagctttattgagagcatgccttttaattttaatgactttgcttggggtgagctacctgaggatcaactggcaggaattgcagatgctttacagacacccggggctgtgagtactcggctctcttttggtatgacaccaaaaactttaaggttgcccaaaaagggcgagatgctcttatctgtgcgtggctcacctcttggagtgtacaaagaagaaaatctggcagctgttcatgaatctacaaatggaagtgaagatgctgcctcatagtaccagttgccacatatagcatactaaggatgctatgtgatctatccactcttttcgtttagtcgtgtgccccatggttgatatgttttgtctattgcagggacttatcaacccttgacttaacctttgggatattggtgtttttctttttcttacctaagctgggatactcacccagaatcaagatgcaatcactagttcaggtgagttgcagtatctatttgttatccttgtgtagttggcagtccgcacgtgtgttgttggatgctgatttcattcaggtgaaatcgtgtattaagtaatgtgtcaatgtgtcaccgttgttaactttgctgccaaggaagtgggcaaaagcagtctaaatgcgcgtgtccgtgcactcgtgattgtcaatgctgtattagctcattaccagagatgagacaatgtgagctgttgtaaaaccgaattgaaattgtgaatcatcagatttaatattcaaattgcttgc

SEQ ID NO: 19341 - DNA, 1334 bp, Oryza sativa
  ref <308>: DATABASE ACCESSION NUMBER: AK099105
  ref <309>: DATABASE ENTRY DATE: 2002-08-28
atcctggttggtggacctgccgaaccgaaccgaagctcaccggagaccagaggccgcggccgctggagttcgccggcggcgagcgagggcatgggctgctccatctcggggctcaacgccctctacgacgcggcgacgggcggcggcgacgtgtggatcaacgagcgccgcttccgcgtcctgcgccagattggggagggcggcttcgccttcgtctacctcgtcagggagcaccaggcctccgccgacgccgcccgcggccggagcccctccctcgcctcagaggatgggacatatgctatgaagaaggtgctgatacagagcaaggaacagctagatctggtgaaggaggagatccgtgtttcgtcattgttcaaccatcctaacctgcttccgcttcttgatcatgccgtgatagcagttaagaatcaacagggagattggaaccatgaagcctacttgctcttccctgtctatatcgatggtactctgtttgacaatgccaaagtcatgcaatccaggaaggaattctattcaacaatcgatgttttgagaatattccaacagctctgtgaaggactgaagcacatgcacagttttgatccaccatatgcccataatgacgttaagactggcaatgttcttataactcacagaaaaggacaagcacctcttgcaactttaatggattttggaagtgcaaggcctgcaagaaaagaaatccgttctcgtgctgaagcattacgattgcaggaatgggccgctgaacattgctctgcgccttaccgtgcacctgaactgtgggactgcccaagtcatgccgatatcgatgagaggacagacatctggtctctaggatgcaccctttatgctatcatgtacaatgtttcaccatttgagtatgctctcggtgaatctggaggaagcttgcaattagccattgtcaactgcacgctgaagtggccggcaggacccagccctccttaccctgatgcacttcatcagtttattacctggatgcttcagccacaacctgcaatgcgccctcacatcgatgacataattctacatgtcgaaaagcttatggaaaaatattcgtcttaaacctgctgaacatactactgactttgtttacacagttacacaattgaatatattgcaaattgtgaacattgttcatgtctgaggtctttccttactgagaattgagattgagtaggcacaatttattctttgtggatctttcagattgtaattgacatgcctcctaactgttgttaattctggtattcagttttcttgtaaaatattcggtgaataccacaagttttccc

SEQ ID NO: 19342 - DNA, 2255 bp, Oryza sativa
  ref <308>: DATABASE ACCESSION NUMBER: AK069706
  ref <309>: DATABASE ENTRY DATE: 2001-12-06
gataaaaaaattggaaaaagagaaatagaaaaggaagcgcaccaccgctctcggctcgccttcccttggttcccgcaccttctcctccgcatcgaggcaaatcaatcaatccaatccatcccacacaccgcccatctccctggcgggcagcctcggcctcgcgagggaggggaggaggaggagagtggcggcggcggcggcgcgccatggcgttcctgctcggcgccttcctcgggctggtgctcggcgtcgccgttgtcatggcgttcgcgcgcctcgagaacacccgcgctgagcagcgccgcgagctggctgctactgtttcatccttctcaaagttgactgtagaagatttaaggaaactaattcctcttgagttatatccatcatgggtgtctttcactcaaaagcaaaagcttaaatggctgaatcaagaattggtaaaaatctggccatttgtcaatgaggctgcatcagaactgataaaaacttctgtggagcctatttttgagcagtacaagtcattcattttgtcctcactccatttctcaaagttgacacttggaacagttgcccctcagtttacaggagtttcaattttggatagtgatagttctggtatcactatggagcttgagttgcaatgggatggcaatccaaatatagtactggacattcaaacaacacttggaatctcacttcctgtgcaggtgaaaaatattggattcacaggagtacttcgcttagtttttaagcctctggttgcagaactgccttgctttggagctgtttgctgttctttgagagagaagagcaaggtcgattttaccctcaaggttattggtggtgagatgacagcaattcctggaatttctgatgcaattgagggaacgatacgtgataccattgaggatcagttgacatggcctaatcgcatagttgtacctattgtgcctggagattatagtgacttggagctgaaaccagttggactattagaagtaaaacttgtggaagctagggacttgacgaacaaggatcttgtggggaagtctgacccttttgctgtgttatacattcggccattgcaagataaaatgaagaaaagcaaaacaataaataatgatttgaaccccatctggaatgagcactacgaatttgtggtcgaggacacatctacccagcgcttgactgtgaaaatttatgatgatgaaggactccaggcatctgagcttattggctgtgctagagtggacttgtctgatcttcagcctggaaaagtcaaagaagtttggttggaccttgtcaaggacctggaaatccagcgggataagaaacgtcgcgggcaggtacacctggagctcctgtattacccttttggtaaacaggaaggggtttccaatccttttgcagatcagattcagttaacttctttggagaaggtcctcaagactgagtctaacggatttgatgttaaccagaggaaaaatgttattatgagaggagtcctatcagtaactgttatctcagcagaggacttgccaccaatggatgtgatgggcaaggctgacccatttgtagtcctgtacctgaagaagggagaaaccaaaaagaagacaagggttgtaactgagacactgaatccaatatggaatcagacgtttgattttgttgttgaagatgccttgcatgatttactcatggtggaagtatgggatcatgatacgtttggaaaggattacatagggagatgcatcttgacacttacgagagtaatactcgaaggcgagtttcaggatgagtttgttttgcaaggtgctaaatccggaaagctgaacttgcacttcaagtggacgccgcagccaatttatcgtgatcgtgatcgggaccagtgaaatctgtgtagatacatcacgtcaagcagctgataaatatttcttcccctacggtgcctgtacattagtttttctgtacagttaattcacttatcttgtagcaacaaggtgtaatggaataaaagaatggtggtttcatgttccgacggaaatgcgatgtgctgtgaatggagggttgcagaaagatggatggtaacacggggagatgggttacccaagtatggaaacattaagttcatcatgcaagcagatactttatgcatcttctactggtaaaactaaacgtgtttgtctttaaaatgcaacttgtaatataattccttgtactaacaattactacctccgtcccataataattgc

SEQ ID NO: 19343 - DNA, 579 bp, Oryza sativa
  ref <308>: DATABASE ACCESSION NUMBER: AK069707
  ref <309>: DATABASE ENTRY DATE: 2001-12-06
ggccgtagctttctctcatcttcggccctgcaggctgcagcctcatcgctcgtccctgcagcctcccgctgtcctgccagattatctgcctttgtttgtttgatggcctcacctgcatcaccgagagagttcactcaggaagctgcccgtcagtctctgattgcgatctcccggtctgttccagcggcaggagaagccgtcaacatcaagtcaccgagcggcgccatggtgaatggccaccaccacgacgatgacggggcagagaagtacagatcaaagctcatctccatctccaacctgtcgcctgatgcccagcctacgccgtgctctcccaaggacaccgctgctgcttaggcttaattaaccgtgtgaccatgttactgcttacacttccaagtgtggatatcgtgtcccagcgtgtgtcgctaaatgctgagactgtgatcaggacccttggccttaataactgccatgactgtatatggtcttgtgatgaactgcccagtgggatactgcccttcttatgtgtgaaagatgcatcatggcctgaaatcttctcgcgtgtaaaatcagtacagc

SEQ ID NO: 19344 - DNA, 2455 bp, Oryza sativa
  ref <308>: DATABASE ACCESSION NUMBER: AK069708
  ref <309>: DATABASE ENTRY DATE: 2001-12-06
gctgtttgaaactgcaggtcaatcccaaatccatttgattttcgctctcgtcggtcttcccacccatccatccatacctccgccgcctgctccggcgaatcctccgccgcctgacgcctccaccgctcatctcatccgccgccacccgcctctcatctcgctgctgctccacggcatcccccgctgctgctctccggctcggtggcgcagccgtcctctcccgatcgagccggcgccattctcctctcgttccgtggcttctcgagctcaccaccacaagcggttggatcgtcgcagaagatcgagcgggggagatgcgagacggcccggcgccgccgagccgatgtccacccgctccaccaccagctccgtcctcaacttcctacgccacgtctccttcccgccggacccgcgcctcctcccctccgcgctcaagtcatgctcggcgctgcgcctcgcccgcgccctgcacgcggccgccgccgtcgcgggcgtctcgcgggacgccttcgtcgcgtcctcgctcctccacgcctacctccgcttcggcgccacggccgacgcccgcagcgtgctcgacggaatgccgcacaggaccgtcgtgggctggagcgcgctcattgccgctcacgcctctcacggggacgccgagggagcgtgggggctcctcgagcggatgcggagcgatggcgtcgagccgaatgtgatcacctggaacgggcttgtctccgggctgaaccggagcgggcgcgcacgggacgcggtcctggcgcttgtgaggatgcacggggaagggttcttgcctgacgcgaccggagtctcgtgtgcgctatctgcggttggggatgttggagatgtcgctgtcggtgagcagctccatgggtatgtggtgaaggccgggtgcaggttggatgcttgtgtggccactgcgctcatcgacatgtatggcaagtgcggacgagctgatgagatagtccgggtgtttgatgagtcaagccatatggatgttgcctcttgcaatgccctcgtcgctgggctgtcacggaatgctcaagtctctgaggctttaaggttgttcagggagtttgtcggcagagggattgagttgaatgttgtttcctggacctcgattgtagcttgttgtgtgcagaatgggagggatctggaagccgttgatcttttcagggagatgcagtcagaaggaatcgagccaaattcagttacaataccgtgcgtgctgccagcttttgcaaatattgcagctctgatgcatggtcgttctgcacactgtttttctcttaggaagggctttcatcatgacatttatgtggggagtgctttggtggacatgtacgccaagtgtggcagggtcagggatgcaaggatgatctttgaagcaatgccatataggaatgtggtttcatgggatgcaatgattggtggctatgctatgcatggagaggctgagaatgctgtgcggttgttccgatccatgcaaagttccaaagagaagcctgacctagtcaccttcacttgtgtccttggtgcctgcagccaagctggctggacagaggaggggcgtagttactttaatgaaatgcagcacaagcatggaatttctccgaggatggagcattacgcatgtatggttactctgcttggtcgggctggtaagcttgatgatgcgtatgatatcataaatcagatgccgtttgagccagacggttgtatttgggggtcattgctgggctcttgcagggttcatggaaatgtggtccttgctgaggttgcagcagaaaatctatttcaactagagccagaaaatgctggtaattatgtcctgctttccaacatttatgcatccaagaaaatgtgggatggggtcaataggctgagggatatgatgaagactgtagggttgaagaaagaaaaaggctgtagttggatagagatcaagaacaaggtacacatgttgttggctggtgatagttcacaccccatgatggctgcaataactgagaagctaaaacaccttactatggagatgaggaggctaggctttgcaccaagtacagattatgtcctacatgatgtggaagagcaagaaaaggatgatatcctttctgtgcacagtgagaagttggctgtagcattgggccttataagcacaagtcatggaacaccccttcaggtgataaagaatcttcggatttgtggtgactgccatgaagcaatgaagttcatatcatctttcgagaggagggagatatatgttagagacaccaaccgatttcatcacttcaaggatggaaaatgttcatgcgcagactattggtgatttttcttgtcttgttcgactctacattttacagaacttggcaaggatggtgtagaaaagcatctacgtctctgtaccctaggttaatatttcctcatgaggtaattacttaccagc

SEQ ID NO: 19345 - DNA, 1858 bp, Oryza sativa
  ref <308>: DATABASE ACCESSION NUMBER: AK069709
  ref <309>: DATABASE ENTRY DATE: 2001-12-06
gaagctgaagccacactccaacctcacgatgcctcatctccggcggcgccaccgccgccgcctcctcgctgccgtcgtcttcctcctcctctctgccgtcgtcgcgcgaccagcagcaggcgccttcaccgagctcgagtccgcccagatcggccgcttccaggactacctccgcatccgcaccgcccacccgtccccggactacgccggcgccgccgccttcctcctcccctacgccgcctcgctcggcctccgcgccgccacgctccacttcaccccgtgcaagtccaagccgctcctcctcctcacgtggccgggcaccgacccctccctcccctccctcctcctcaactcccacctcgactccgtcccggcggagcccgagcagtggctccacccgcccttcgccgcccaccgcgacgccgccacgggccgcgtctacgcccgcggcgcgcaggacgacaagtgcctccccatccagtacctcgaggccatccgcggcctccgcgacgccgggttcgcccccacccgcaccctccacatctcgctcgtccccgacgaggagatcggcggcgccgacgggttcgagaagttcgcccagtcggaggagttccgggacctcaatgtcgggttcatgctcgacgaagggcaggcgtcgctgacggatgaatttagggttttctatggggacaggttggtgtggaggctgatcgtgaaggctaccggcgcacccggccatggctcgaagttgttcgacggcgccgcggtggagaatttgatggattgcgtggagaccattgccgggttcagggaggcgcaattcgggatggtgaaatccgggaagagaggtcccggggaggtggtgtctgtgaatcctgtgtacatgaaggctggcacgccgagccccacgggttttgtaatgaatatgcaaccctcagaagcagaagttggttttgattttcgacttcctccaactgaagacgtggaacatatcataagaagaatcaaagaggaatgggcaccagctcataaaaacttaacctacaagctgatgcagaaaggaccaacacgggatttggcaggacgccccatggtcacaccaaccaatgcatcaaatccttggtggtctgtatttgaacaggctatcatatctgcaggtggaaagctagctaagcctgagattttatcttcaaccacggattcacgcttcatcaggcagttgggcattccggcccttgggttttctccgatgacaaacactcctatattacttcatgacaataatgagtttctggaggataaagtattcctaaggggcatcaaagtgtatgaacatattattagagcactgagctccttcaaaggttgattcataataggaaactgctattgcataaagtgtaccattgatgtactttcacctcatgttggaagactggagttgcaggaaagaagccaccctcaaagatacagttttctcagaaatggttcaggcccaaccataccataataaacatgttgggaattgggaataatgcatatctgctgaacattgtatttttaatgattgtgtaagcagatcaatctgtacacatatacgaatttatgaactgcgacagtgtggtgttcaagtccacggctggattggtctacctgtagttctgctggttttatctgttttctttgggaaaccacatccgcgttttctcttggcattttttttcccttttgccaattgaactgtcatgtatcactacgaaccagtgatgaatatacaatgaataaaccagtacaatttaggaggtgtaaacacacgatgtaattataatatttggtgaacatgtctgatgttgaaacc

SEQ ID NO: 19346 - DNA, 1027 bp, Oryza sativa
  ref <308>: DATABASE ACCESSION NUMBER: AK069710
  ref <309>: DATABASE ENTRY DATE: 2001-12-06
gaccaccaccaccagcgggccttcaccctcttctactagtcttcttcctcctctcgccctttcacaccggagccatagccggcgggagaggccagcccgactgccagagcctctacctacgactatccgcggccggatggcgccccgcgtgtccctgctcgccgccggcgccgtggccgtggccgtggtcctgcttctcgccgcgccggcgcgggcgtccaacgacgagggggacgcgctgtacgcgctgcggacgaggctgtcggatcccaacggcgtgctgcagagctgggacccgaccctcgtcaacccctgcacctggttccatgtcacctgcgaccacgccagccgcgtcgtccgcctggatttaggaaactccaacatctccggctcgattggccctgagctaggccgtcttgtgaacctccaatacctggagctctacaggaacaatcttaacggtgagatcccaaaagaattgggcaatctcaagaatttgatcagcttggatttgtatgccaacaagctcactggaacaatccccaagtcgctttccaagctcggctcgctgagattcatgcggttgaacaataacaagcttgctggatcaattccaagggagctggccaaactatccaacctgaaagtcattgacttgtctaacaatgacctctgtggaactattcctgttgacggtcccttctcaaccttccctcttcgaagctttgagaacaacaacaggctcaacggcccagagctgcaaggtttggttccttatgactttggatgttaagagctccatgttggtgaagtagcacagcaatgcatgtcgtccgttgataaatggaaaagaatatagtagtacaaataggaaagctagcatgtatgttgtgagttcacatatgcagcagagctgcagagctaaagagggaaggttaatgtacccaggcagcatgaacaaagaatgtattcagagaagttttacttatattcatgatacaggtactatgtatgtaaatttcaagct

SEQ ID NO: 19347 - DNA, 1575 bp, Oryza sativa
  ref <308>: DATABASE ACCESSION NUMBER: AK069711
  ref <309>: DATABASE ENTRY DATE: 2001-12-06
gaatcccaactcccaattcccaagccaaccaccacagcaaagcctcccttcctttcctctcttcgtcttcctcctccctcccctctctccacaggtcaaatcctccccttccttgcttgcaatcctagcaagctccaagatcgcggcaagctagcctcgagggaggcccgcctgcccgggcctcgggctccgggggcccggttcttgaggtttcttggtcgtggggtcgaggaggtggtgggtggtggtggctgcggcttggcgcgatgaacaaccacgcggcgggcgggagcacgagcaacggcggatccggggtcgacggggatggcggcggcggtggcggcgcggccaggaggaacaccaagatgcccaagtattccaagttcacgcagcaggagctgccggcttgtaaaccaattctaactccaaaatgggttgtatcggtgtttttccttgtcggcgtcatcttcgtaccagttggtgttgtttcgctgctagctgcacaaaatgttgttgagatagttgatcggtatgatgatgcatgcgtgccagccaacatgactgagaacaagcttgcttacatccaaaacccaaacatatccaaagagtgcacaaggactctgacaattacagaggatatgaatcagccaatttttgtatactatcaacttgataatttctaccagaatcataggagatatgtgaagagccgaaatgatggacagctaagggacgctgcgaaggcaaaccagacatctgcctgtgaacctgagaaaaccacggcagatggaaaaccgattgttccttgtgggctgattgcttggagtttgttcaatgatacatatagcttcactcgtggcaatgagaacttgacagtagacaagaaggacatctcttggaaaagtgatagggagcacaaatttggcaaaaatgtctatccaagcaactttcagaatggtttgctcaaaggtggaggaacacttgatccggcaatcccattgagtgagcaagaggaccttatcgtttggatgcggactgcggcacttcctacattcagaaagttgtatgggagaatatatgttgacctcaagaagaatgataccataactgtgaagctgagtaacaactacaatacatataactttggtggcaagaaaaagctggtcctttctactgcaacctagcttggtgggaagaatgattttctaggatttgcgtatgttatagtcggaggggtctgctttttcttggcatttgctttcaccttgctatacctcataaaaccaaggaaattgggtgatcacaactacttgtcctggaacagacatcctggaggccgttaagacgtccaaaacacttgtcgcataaaaatggctcatccggtgacatgtatcatgtacttaatgatgatatactgaaaattgtcagggagtgtaatcaggtctttggtttgacctagaccttcatgtacatcttagcataagaaccacgctgttttgtttcattgtttcttttgttatttcggaactgcatatagcagtgatgaatagaatcggtactgattgttttgtgacg

SEQ ID NO: 19348 - DNA, 2807 bp, Oryza sativa
  ref <308>: DATABASE ACCESSION NUMBER: AK069712
  ref <309>: DATABASE ENTRY DATE: 2001-12-06
ggctcgcccgctctctcccgtcgcagccccgtccgcgccgccaccccgctgccgccgccctcgacgcctccatccatctccgccccgacctccggattcgtcaccccctggtccccgtcgcacggcgggcgctcacgccacctccagcctccgctgcgacctagacgcggcctctggcgacccgggcgccctctctgccccctccatcgtgctcctggagccttttctactgcagccccatcggcccccttttttatgatgatttggctttttttgcacactgttggtattgtcaaagcggccgttcatctctttctttgtcactgtgaattacaaggggaagtcaaagtatgtgtaaccaatctgattgagcagtcaacaggttccttaatttgctcttgctcactgttgttgtaaatgcacctgtttatttctttgtttgcaccttgaattatgaggggaaatcaaggtatctaaccaacctgaattggacattagcagtttccctgaatttcttttacttattctatataaatgcgtagaaagatccaagtaggtaacagcctcatggtactgaagaaagaagaaaatgcctggaagtgtgggtttttttttttgtgcaacatgctgcctgtgaatgcttttatgaaacataattaattttattatataacttcattcaacaaaaatgctatggttcctgctattcgaataattgcccaaatttaggctagatttcccatgcttccatatactactgttaggctgatgcttgattgtttccggatttaccaagtttcaatttgaatctccatcaaatattagagagtcacaatcaagcataaaaggtcattcgcttggtgagtttttgattttattatctctctgattccttgacctgaattaacattattttttttacaagaaaagatcattctctaggtaacatataaatattctctatgagtatctcacatgatctgaagttacagctgaaactaacattgtcactgaaacaaaattgcagagtttttaaattgtcatggatgctcatgtctgagtttaagtcgtgtggtaacaggtaaccacctttatcccgtggaatagcatttggcatggccatgctggtgggtggtataaaaatcacaaatgtctaaaatttgaaatagcctttgaggctgaatgatttgtcaaaaggttatgctcaggtgacaaaattctttcgcatgtccgattgggaatcggcttatgaaacgaagcccatatgggtaaggcaacacctgatttgtttgttacctagaattggtgtctgcattgcaattatcacatgaagcatgcctttgattttctcaatcttcaatagccgcatgaaaaagatttgtattctatttttaatcaatttttgttacacaggtatgcgttcctttactattactccatgcacaggtaatttgctttccagttagcagcactaactttggttgtcctaatgtcctctttaataacaatattcttctgtacaaattggttcttcatttagaaggttgttaaacgggtaaaatccatgtaaattcgtgagagtaataatgttactcatgttggcagctgagcactctgctatatatattaaatttggtactgctcaatctaatcccatgacaatatcctggccaagatgatgttgttgcaagaatgggagaaggatgatcggtttatatatgtctggcttcttagtttttttaactaagagattcaacaacagtctcatcttatttttggatcacagttagctgaaactctggtaatgaacataaaggttaagagaaaaaaaaagtattttaaggcaggtagagccatagagcattcttttcagtaaaaagaattataacaaaaattcagcatatttggtacagaacaagcatggctcctttggatcggattcactacaggttcctttagcacaggtgtagatttagcaagacaatatttgaaatttttgtatagatgatggacaccaattgatctgacaagtttggttctaggtgatgattaatctcttctacagtttaatttgctgcgttgattatttagttgatattttgttactttgtcatatccttgtatggacaactggaagggggctaggagctgcagacaatggcatctatggcagcacatgcattactctaaccataataacaggaaaatggttcgaatggtcataatgcttgtggctagcggcagctcaattgtgaccagcaacagtcaggtattattggaagggtctagccaccatgattacttaacaatatcacattttctttttcaccgttgcatcgcatgggcactcaactagtaaagggaaaaataccaataataaataatgtagttgtattaggattagagaattaacttggatgcaggagttatacatcaaagtgaagaagaaatgaagccgacatacaatgaaacatacatccgacgaatcacgtgcgagcacacggattgaaaagcccacaagttagttcaaaccggctcaaagtagggccaaccacttgggaaccgactgagaggcgcaccttgcagcctctcaccaaaggcggtggagagagacagtttgcctggttcggccaaaccagaggttcggtagaaccctagctggcactgacttcaggaaaattagatgggtacctcgtgtgttaccgtgggatatttgtatcctaccaaagtggtattcttgctttgaggaaataatatggaaaagagacatgaatgattagtccaaatggactacatgaaaccttgat

SEQ ID NO: 19349 - DNA, 949 bp, Oryza sativa
  ref <308>: DATABASE ACCESSION NUMBER: AK069713
  ref <309>: DATABASE ENTRY DATE: 2001-12-06
gagtactcacagatagatagtgagatctgaactgtgaaaaccacaaggtgataggtatctaaatagtgatctgagctgagcttccttgcatcaaagtcaagctagcggctcagatcgatctctttcggttcttcagaaacttggtgtcaaatgggaggctcattggagtacttggccggcctgttcagttgtggcgatcatcaccatggccacaagaacagcaagaggaggcagctgcagactgtggagctgaaggtcaggatggactgtgatgggtgcgagctcaaggtcaagaacgccctctccaccttgaaaggcgtcgagtcggtgaagattaacaggaagcagcagaaggtgacggtgagcgggtacgtggaggccagcaaggtgctgaggaaggcgcagtcgacggggaagaagtccgagctgtggccgtacgtgccgtacagcgcggcgagccagccgtacgtcgccgccgccgcctatgacaggcgggccccacccggccacgtcaggaacgtggaggcctcttccgccgcctacgtgtccggcggcggcaggacggaggagcggctcaccaacctgttcaacgacgaggaccccaacgcatgctccctcatgtgatgaaaatgcaaaagagatcagagtatctgagtagctagattgaagctttcaattttaaattcagaggtttaaatttgtactagctttaattttggctgtctgagcgcagtgaccgaatgagtttgcttgttttcggtagttgattctagtctagagtaaattccataaaactacaagtattttaaggagatgactagggatcggacgtccgatcccagttaaaatttcagacaatgtttcatcacataaaagaaaatgttgcacatgtttcaccactcattaaaagatgtttcaataaacttgtttcagatgtccgatcacagtc

SEQ ID NO: 19350 - DNA, 1121 bp, Oryza sativa
  ref <308>: DATABASE ACCESSION NUMBER: AK069714
  ref <309>: DATABASE ENTRY DATE: 2001-12-06
ggtgaacgtggcacgcctgaaccgcacggaacaccggttcatctcgccgtcggtcgcgcgcgcggcgccgccgcgcggccatcgtcgcgcgctgcctccacctcgccgactcgccatagcccatagcgaagcaatcctctcttcccgtctcgtggagagccgaaggtagccgatgcggctagagctaaaaccctagcggaaggtagccgatggacgcgctcgtctcggcggcgctggaggaggtgagcgcccgcctctcggccggcatcccggtgaccgatctctgggcggcgctccgtggcgcgctcgaggcggccggcctcccaattgggccggctgtcaagcgcgccgtctgggcccgcctcatcgtgctccccgtcatcagcgtcgtgctgggggaggcggaggcggaggcggaggggccggtcgtcgacgatcccaaggtcggcgtggaggacgccgagcggctgggcatgcggctggttgcgagcgccgcgctcagggacaacttccttggcatgtatgatctcaggcactccaaatcggagatgagtgccgtccagaagaaggctttacaacgtgtcggggcaagcaggacttctggtgtaacacaaaatgacctgtgcaaaagttttggcatggaagggaacaacttccattatattgtgcaaagccttcagtcccagaagttaattgttagacgatcaactattataaagtttaaaggcaatggagctgagaaggaagatgcttcacagaataaacgagtaaccaataccaactcattgtatctcactagatatgccaaagactgtatgaattcacaccagagaattgagattataaagcccggactattggtgagcaatgaagagaccaacatagatgatctacaagatgggacttttggtgtaaactccgataatgatgtatctatccatgattatcttccagcaatgaaagccatttgtgacaaactcgaagaagctagtggaagggtcaattgttctgttcatttgttcggtgttctttttcatttttccagttttctaaccttcagtaactatttcctataggttcttgtcgtgtcagacataaaaaatgatctcaattacaggacg

SEQ ID NO: 19351 - DNA, 2597 bp, Oryza sativa
  ref <308>: DATABASE ACCESSION NUMBER: AK069715
  ref <309>: DATABASE ENTRY DATE: 2001-12-06
gaaagcacttccggcgagcgtcgacgacgacgaatcgtcgcgagaaattcggaagtcgataggggaggtcggggaggaggggggagatgtcggggttcgtcggcgtcgtggtctccgacccgtcgctgcagggccagttcacgcaggtggagctccgatcgctcaaggccaagtttctatctctgaagagagactccggaggacatgccacgacgaagaacctcccgggactgatgaagaagctgagggggctcaatgaggtgatctccgaggaggagatcgccgcccacttgtcccagtcttaccctgacgccgaccaggagattgagttcgagtcattcctacgggaatacctgaatctgcagtcaagggtgagcgccaaagaaggcggaggtggtggtggcggcggtggcaagaccgcgtcatctttcctcaagtccagtaccactacattgctgcacaatctcaaccaggcggagaagtcgtcttatgtggcgcacatcaacacctaccttcgtgaagacccgtttctgaagaagtatttaccaatcgagcctaccgacaaccagctgttcgatcttgtcagggacggtgttctgctatgtaaattgatcaatttagctgtacctgggaccattgatgagagagcaataaataagaaaagagttcttaacccatgggagaggaatgaaaatcacaccctgtgcctcaactctgccaaggccattggatgtacagttgtaaacattggtacacaagatttggtggagggaaggcctcatttaattcttggattgatatctcaaatcataaagattcaacttttggctgatctaaatctcaagaagacaccccagctggtggaattgtttgatgacagcaaggatatagatgaagtgttgagcttgtcaccagaaaagatgctacttcggtggatgaaccatcatctgaaaaaagctggctacaagaaaaccgtcagcaatttctctacagatgtgaaggatggtgaagcatatgcttaccttctaaaagctcttgctccagagcattcccctgaaaccacattagagacaaaggatcctagtgagagggctaaattggtacttgaacaagcagagaagttggattgcaaaagatacttgactcctaaggatatcactgagggttctgccaatttgaatcttgcatttgtggcacaaatattccagcatcggaatggtctaactagtgacaccagacaagttactctcaatcagactgcatcacgtgatgatgttctattatcgagagaagaaaggtcctttcggatgtggatcaacagtcttggggttgactcttacgtgaacaatgtttttgaagatgttcgccatggatgggtacttcttgaagtactggacaaagtttctccaggatctgtcaattggaagctggcctcgaaacctccaattaaactaccattcaggaaattggagaattgcaatcaagtggtaaaaatcggaaaggagttaaagttttccttagtaaatttagctgggaatgatattgttcagggtaacaagaaattgattgttacacttctgtggcaattgatgagatttaatatgcttcaattgttgaatagactgagatcccactcccaaggatcccaaggaaaagaaattactgatgctgatatactaaaatgggcaaacagcaaagtgaaagcatcaggaagaacatctcaaatggaaagcttcaaggacaagagcttatcaaatggacggtttttccttgaacttcttagtgcagtacaaccgagggttgtcaactggaaagttgttacaaagggggaagatgatgaggaaaagaagctaaatgctacatataccattagtgttgcaaggaaaatcggatgttccgtgtttctgctgccagaggacatcattgaggtaaatcagaagatgatcctaacgcttacggctagcatcatgtattggagtctacagaagcaaccacagtcacaatctgaaacgtcagaacaatcagagccatctagtatggcttcggatgcagcttctgatattgcttcggaggacgctgcttcaataacagctgcatctgagggagaagaggtgaattcgctatctgatagtatgtccaatttgaccacatatgatgctatttcaaatgccccgccagcagaaaatggaaatggtgtggcaggatgatgatgattacacgggctgttcttctgtcctgatagcggttttattatggtggaactagtaccgtcatggtgtccaacgtttgctgccagaagtgatttttttcctgcttctgttccaagcctacttttgaggtagcatgatagatacagatacagatagatagagttgccgtttgttcatttaattttgctctatacatacgacagggaaaaaactatacataggtcactagttgggcatttcttgtactcttagtatactttgatttcaatgtcttcactttgtttcccggacctgtcaaaatgtactggcatcgtttgtaatctgctgctgctctggaccattcatgagctgtatataacataatattgtggagagatctggtttccc

SEQ ID NO: 19352 - DNA, 3363 bp, Oryza sativa
  ref <308>: DATABASE ACCESSION NUMBER: AK069716
  ref <309>: DATABASE ENTRY DATE: 2001-12-06
tttcgtcttcgtcttccccgtgccgcataggcatagagaggcttctcccccccagatccgatccccgcacagagcccagatccaccgaccactcccccagatccaccccccaccggcggccgtgcagcggcggcgtcggcggccatggagaagccatgcaccctcctggtccacttcgacaagggctccccctccatggccaacgagatcaaggccgacctcgagggcagcgacgtcgccgccaaggtcgacgccatgaagcgcgccatcatgctgctcctcaacggcgagaccctcccccacctcttcatcaccgtcgtccgctacgtcctcccctccgaggaccacaccatccagaagctcctcctcctctacctcgagatcgtcgacaagcgcgacgtcgcctccggcaaggtactcccggagatgatcctcatctgccagaacctccgcaacaacctccagcaccccaacgagtacatccgcggggtcacgctgcgcttcctctgccgcctcaacgagcccgagctgctcgagccgctcatcccgtccatcctcgccaacctcgaccaccgccaccacttcatccgcaggcacgcgctctccgcgatctccgccatctaccgcctcccgcacggcgaccagctcctccccgacgcgcccgaggtcgtcgagcgcgcgctcaccggggagcaggacgcgtccgcgcgccggaacgggttcctcatgctctgcgcctgcgcgcaggagcgcgccgtcgcgtacctgctcaccaacgccgagcgcgtcgccgagtggcctgatctcctccagatggctgccgtcgatctcatccgcaaggtctgccgctcgcccaaccgcgctgacaagggaaggtatatcaagattatcatctccctcctctccgcgcccaacagtgccgtcgtgtacgagtccgccggcgcgctcgtgtcgctgtcgtcggcgcccactgccgtgcgtgctgctgccaacacctactgccagctgctgtcgtcgcagagcgacaacaatgtgaagcttattgtccttgaccgcctgcacgagctgcgtgcctcgcaccgtgatgtcatggtggatgtggtcatggatgtgctgcgtgcgctatctagccccaatgtggatgtcaggaggaaggtgcttgatttggtgcttgatctgcttaccccccgaaatgtggaggaggtggtgatgtacctcaagaaggaggttgttaagacacaggccggggatctcgagaagggtggtgagtaccggcagatgctggtgcaggcgatccattcctgcgctgtcgagtacccagaggtggctggatcggtggtccacctcctcatggacttccttggtgacactaatgttgctgcagcggttgatgttgttttgtttgtgcgcgagatcattgagaccaaccccaagctccgtgtgtcaatgattcagaggctgattgatacattttatcagatccgtgcatcccgtgtctgctcatgtgctctctggatccttggggagtactccctttcactatctgaggttgagagtgccatttccaccatcaagcagtgccttggtgatctgccattctacactgtctctgaggaaggagaatcaactgatgcgtcaaagccagcccagcctgtggtgaactctgtcacagtatcttctaggaggcctgttgttcttgcagatggtacttatgccacacagagtgctgccacagagactgccatttcgtctccagctgttgctccagggtcactgagttccacacagaatctcagatctctcattctgtctggtgatttctttttagctgctgttgttgcctgtaccctcaccaagcttgtgctgaggctggaggaggtccagccatcaaaggctgaagcaaacaaggcttctactggggccttgctgatcatggtgtccatactgcagttggggcagtcctcgtaccttccccaccctattgacaatgactcatatgataggattgtgctctgtgtgaggttgctttgcaatactggtgatgatgtgaggaaggtctggttgcagtcatgccgccagagctttacaaagatgcttgctggaaaacaattccgagagactgaggagatgaaggccaaggcgcagatctctcatgcccagcctgatgatctcattgatttctaccacctgaagagccggaggggaatgagccaacttgagttggaagatgcagtccaagatgatttgaaggctgccactggtgaatttacaaaagatgcagatgacgcaaacagactgaatcgcattcttcaactaacagggttcagtgatcctgtgtatgctgaagcatatgtaactgttcaccactatgatattgtgcttgatgttacagtcataaaccgaacaaaggaaacacttcagaacttgtgcttggagttagcaacaatgggtgatctcaaacttgttgaccgcccccagaattacacgctggctcctgagtcaagcaagcaaattcgggccaacatcaaggtttcatcaacagagacgggagttatattcggtaacattgtttatgagacctcaaatgtaatggagcgatcagtggtggtcctaaacgatattcacattgacatcatggattatatctcacctgctacttgtgccgatgttgctttccggaacatgtgggcagaatttgagtgggaaaacaaggtggctgtgaacactgtcattcaggatgagaaggaatttttggatcatatcatcaaatcgacaaatatgaagtgtctaacaccaccatctgcgcttgatggagaatgtgggtttatcgctgctaatctctatgccaagagtgtttttggtgaggatgcattggtgaacatcagcgttgaaaagcaagccgatggcaagctgagtggctatatcagaatacggagtaagacccaaggaatcgccctcagcttaggcgacaagatcaccctcaaacagaagggaggcagcagttaactgagctgtgacgaagacgtcacacgtatatcaaattattacaaaggcccatccgaactcaatttttgctactcccaattttcatgagttgtcagttgttgtcaatttgtttgagttggaatgacaggcagtagagattatcctacatgaacatcattgtgtagccttgtattgtttttagcttacaaaaccgtgatatgtgctcccagatgttttatgatactgtctattctttgctcacctttgtactccccctgagacttcgacttcaatcctggtgttgatctttcttgatgtcccctaaatgccatgtacctgatcgaaataaaatatgagaaggcaattgttttacacttc

SEQ ID NO: 19353 - DNA, 3763 bp, Oryza sativa
  ref <308>: DATABASE ACCESSION NUMBER: AK069717
  ref <309>: DATABASE ENTRY DATE: 2001-12-06
ttgaggtacatcagataccatctgtattgaataatgataagtcgtttgacctgcatgaaatcttcaaaactctacctagtgttatggtggataagaggatgcagataacaagaataacaccagatgaggcagcatcgggagtgggtatttggtctgtccctgatgatgtcttgtataaggtgctggttcgactgaaacccagagatttgattagagttgcagctgcttgtcatcatctaaggaatctttctgcttctatcatgccttgcatgaaacttaagctttttcctcatcaagaggcagctgttgaatggatgctaaggagggagcagaacttgcaggtcctagaacatcctctatacaagggtttgtgcaccatggatggtttcccttattacataaatgttacctctggtgaaatatccactggtagtgctccaactgtacatgatttttgtggaggtatgttttgtgatgaacctgggttagggaagacagtgactgcactgtctcttattctgaagacacatgggactctggcagtccctccaccagggatgaatgttatgtggtgcatgcataaaccagataaaaaatatggatactacgagcttagtgctagcaactcttctaatggaaacatctttttgtcgggatcaaaaaagttgcgaaaggacgtgattagagaagatacatgttcaagtgagtcactgaataatggtggttcagttgttagtacaaggtcatcaagaaagagaggcaggttagtaaaccctgatttgaatatgatcgctgcacatccgagtgggaagtcgccaatgtcagcaccaactggtgctcattcaactccagctactcatgtgctaaagattaccaaaaacttgaaacatgttaggaaaaacctcatggaggcatatagcgatggttcagttggcaataaaaggaagagagatgccacctctgagttaagtgaaacctgggttcaatgcgatgcttgcagaaagtggcggagattattggacggaactgcacttgattccagtacagcatggttttgcagcatgaaccctgattctgcacgtcagaagtgcagcatcccagaggaatcttgggatttaaagcgaaagataacttatttgcccggatttcacaagaaaggtacaccaccaggaaacgagcaaaatgcatctttttttacaaacatattgaaagagcatgctgctttgatcgattcagaaaccatgaaggctttgttgtggttggcgaaactttctcccaagaaacatatcgagatggaagcagttggtttgacacggccagttctagatgcacgtgctaacataggaaagggtgcccgcccgtattacaagatttttcaagcatttggccttgtgaggaaggttgagaaaggcataactcgatggtattatccatctatgcttgatgatttggcatttgattcggctgcacttggaattgcccttgaaaagccgctggatttggtgaggctatatttgtctagggcaaccttgatagtggtacctgctaacttaattgatcactggacaacacagatacagcggcatgtttcctcggacacacttaatgtttatgtatggggagatcacaagaaaccatctgctcacaaccttgcatgggactatgacattgtcataaccacatttagtagattaagtgcagaatggggtccaaagaagagaagtgttttaaagcagatccattggtttagggtaatattagatgaaggacacacattaggttccagtctcgccctcacaaacaaattgcagatggctgtttcattggttgcttctaatagatggattctaactggtacccctacgccaaacacaccaactagtcaagttgctcaccttcatcccatgcttaagtttcttcatgaggaagtttacggtcaaaactaccagtcatgggacactggaattcataggccttttgaggcacaaatggaagacggacgcagtcgtctcctgcagctacttcagaggactatgattagtgcaaggaaacaagacctgaaaaacattcctccttgcataaaaaagataactttcctggacttcagtgaggggcatgcgaaaagttacaatgaactggctgttactatccgcagaaatatattgatggctgattggaatgacccttctcacgtggaatcacttctgaaccccaagcaatggaaattccgtactacaactattaagaatgtgcgcttgtcttgttgtgttgtggggcatatcaaagtagcagaggctggtcaagatatacaggaaacaatggatgcattaatgcagctgggccttgatccttcttcgggggagtatcagtccataagatatgctcttttaaatggtgccagctgtttcaggtgcagagattggtgccgcttgcctgttgtcacgccctgtcggcatctgttgtgccttgattgtgtagctcttgatagtgagaaatgcacgttacctggctgtggcaaccattatgagatgcagactcctgaaactcgtgcacggccagaaaatccaaacccaaaatggccagtgcccaaagacctaattgagttgcagccttcatataagcaggatgactgggatccagactggccagtcgacaacaagcagcaaagttgcttatttggttaataagttgagaagtttgaaggcagaaaacataaaacatgggtactctacgaacatggccaatggtgcttgcctttctagtcaatcttcttgtcaagaccataataatgtggagggcaggttaccacacacaatgcctgacaaagtaataatattctctcagtttctggagcatatccatgtgattgagcagcagctgacgattggggggcataacatatgctggaatgtacagtcccatgccattaggcagtaagagaagttcactgacgaagttcaaagatgatccagcatgcatggccttagtcatggatggaactgcagcgctgggccttgagtgtgagttttgtctcttatgtttttctgatggaaccaatatgggataggagtatggaggagcaagttattagtcgtgcacatcgtatgggtgctactcgtcccatatttgttgagactttggccatgcgtggtaccatcgaagagcaaatgttaaaacttttacaggattccaatgcttgcagacaaatggtgaataaaggaacaagcagcactgataatgaaggtgctcggcctcaccggagcctgcatgattttgcggaaagcagttatctggcgcaactcagctttgtgaaaggatctgacgcggcggaaaaattatagttgctaacactaacaaaaatttctttcttgattacctctgtttccttcaatattgaggcccttcaattcttttgatatagaaatgagtccttttgtttcctgcctttttttgttttatttttatggggagcttatcgtggccgatccgggctgtaatgtagctcgggctcgtttggagttgcctgctgccttgtgggatgacgccacgtcgcccggtccattgccggtcagaactgaagggcaggcaaggctattccaaggctctgattataaaaacagccggtgagaatttagaaaagtcaagtttcttagcttgtttctggtttaatgtttgattgtgaatagggtgggtgaaaatttgaaccgtttgagggagctagtgagaatttaaaaaaagacgagcttcatatcttcttgcttcc

SEQ ID NO: 19354 - DNA, 3194 bp, Oryza sativa
  ref <308>: DATABASE ACCESSION NUMBER: AK069718
  ref <309>: DATABASE ENTRY DATE: 2001-12-06
gagtctagttgcagctagttgtgcgctagtctagtcgtcctcttcacatggcggcctgcgcgtaggaaccgagccttttcttcttcttcttcttcttcttctccactacaatcccgggtaatcttgccattcccctgtctcgtctctgccttttctgcgccaaaagttgtagtaggcttgtgggagtagtagtagcttccctgaattctgcacctgttccttgttcctcgcgctctgctgctcttcttctcgcaattactccttgccgttcttgatgagccattaatggtggaggggagttataagctgcccagttatggaagttttgctgatctgatgcggtggtggtaggcgtttcgatcctttcgcgagccggttgttccttggcttgcaggcaggcagggatggaaactgtagcctacgcctcacgcgttgccgagagagaggcagctcatttgccgtcgaattgatggaaaagagagcgtgagtagtaaagaggacagctttttccttaacgcctctccgtgtgctcctctccgttctggaaatcgatcaagcggccagccatctccatctccatcgtcttcttcttcttccttctcctggagccctttgggttttggtggtgtctgatcgtctgatactctgattgctagttttgggggattgttactagtgcagaaaagctgactgttttgtctcttcttatccattctagtaagtggtactcttgtgccatcggcttgattcttccttggtccctttgatatcttggtttaggtcctaagtcctcttcacctaatcttgtttttcttttgttccttcggttggtgagtcataggctatctcagtgttgcctccggttcttatataaccttccagtcctcttgctctttaacctgttcttgtacacttcacattagtccattttccttctgtttcccaaggtttttgttgcaagtgcacactcttctcatcaacaagaggtgttctgctctgtgttgggaggtcaggagacagtgcttagcttgcaggccggcgttggatgctgcgtggtgagctctgaggtgatcaaggtctcgtttcacgacgagtagtagagttcccattaccagagctaaagatggaacttgtctacttggaaaggagaaatggattcgatgaagatagcacctctccagagttcagtggaaggtcagcaattgaccatcaacagctgtccattgctacacctgaggttgagtctgatttgggacagacaatctacaagcagccattgccatcagatgagaagaaaagcaggagctgccagtcatgtcacaagtcaccatgttcttgcaggagcgaagtattccattcagatttgtacccgacacttcctgcgaagatgatgatactggaattcctcatcagaagcctgaggcacccaagaagaacccacaatgtgagtgatcttgatgacatgatcagcaatggagctagcacagggagtgtagttcttggtccttcggagaaaatgatgttggattctttgcattcacttgttgatgcgaaaacgaggccaaaaagtccttcattcttccactcaggaaccaagatgagaaaagctcggtcaaaatcccacatcataacacagtcagagatactgaagctgatatctcctgagacatgggagatctcctcccctggcgtgtcgccgttgaagaagagcacagctgagttgagcatgcatgagaagatggtgtcctcagatacaccatccatgagttcaaatcaacctgttctgtcctcatgtccatcttctttaagtgcagggcttctacaatgcatatggaaggatgggcttccacactttgaactgtcactggacaatcctatggcagtatacactgccaatcctacaaaggcccatgacaatgacaagccccttgactatgtctatttgttccattcaggagagcaagggagaaaagattggttaggcaactcaagcagtgtatcacggcttgtcggcaagatgaaggtgtcaagttctttggttctgaacccagacaagtctacttctatggagacagagtttgtcctgtatggttctccggatgactacctgaggcaaatgcaaagttcatatggtgttacaaaaggcaaggggctagccaagagagtggcagacattatgaagccatccaatttgaactctagtccgaaacatgtgtggaagtttggcaaatcgtcctcccaacagattgatgagatgactgaaatacctgaaggtgaacagtgcagtgccaaagaatcagtcctcaagaacctcgtcgctgatgatttgcctaccaaccaggagatagcagcaattgtagtacgaaaacagcggcgcgaacgtcggaaatcacctgttcttggtggatgggggctcaagttccttgagaaagctggagctactcatccagggagcactgaagatggtgatgttcagaacaagaaaaataatgcagggagtgtaagtgccatatttccccgaggctaccatggcggcgcggcttccaagaacggcagccctgccagcctcatcggaagatggaggtccggtgggcgctgtgattgtggcggatgggatattggttgcccaatcagagtactgcagaatgatggctgtggtacttcgcctcaggcagagtcccagtcacaggacaggaaatcagtagagctctcagtcaagggtgcgaagaagggaccaatgttcaggcttgtgaacatcacagatgacctgcacatcatatacttcgactccagtctttcgcctttgcaatgcttctcggcaggaatagcgattatccacagccaggcgcctcacctctatccaaaactctgaagacacattgttggtcttgtctaatatatagaagatttgaaacatgtcttgatcttgcatatttcctttcgctttggtttcataaagaaaaggtgcaggttatcctcgtgttaaattgttaatatccattgttaatcttgtttaacgctataatgttttataagctggaaggagtaggatattaggatatatcttactaatgtaaattttgtttcaatgaattggagggggaaagacaggttccctcctgttaaaactgattcggccaaaacgagagaagcgcataaataaatctttacacagctccgttttgctaaatacc

SEQ ID NO: 19355 - DNA, 1811 bp, Oryza sativa
  ref <308>: DATABASE ACCESSION NUMBER: AK069719
  ref <309>: DATABASE ENTRY DATE: 2001-12-06
ggtgtgcgccgcgcggctgctgctgctgctttcgtctctcctcccccctccgctgctgcaaagcttccagaaagaaaggggaggagaaaggaggtggaaaagccaaaggcaaaggcaaaccacgcgtctctctttggtattcgtctctccatggcacgcgtcctccccctcagcatcgaggcgggggagatggccatgcccagacgtgaagaggtagttacagacatgccaagctcttccgcagtggcatcaggcaacggaatcgaacaacctgagcaaaacacaaaggatgatgaatatgaaaggctggtcagaccagctcatagtgtaatagctgatgataacacggtagtcctacctgaagaacctacctcaaggtccatttggtggatgaaagttctgcttggctgcttccttcttatattagtatcttatgtcttcgtgaaatggggagtcccctttgccttcgagaaggttctcttgccaatcatgcaatgggaagcaagtgcctttgggcgtccagttttggctgttgttctcgttgcatctttagccctcttcccagttactttagtcccttctggaccttccatgtggctagctggaatgatctttggctatggttggggtttcttgattattatggttgggactactataggcatggtggttccatattggattggctcattgttccgcgaacgtctgcatgcatggttaaaaagatggcctcagcagatagctctaataaaacttgctggggaaggaaattggttccagcagtttagagttgttgcactattcagaatctcgccatttccatatacaatttttaactacgctgtaactgtgacagaaatcaagttcaacccttatctatgtggttcaattgctgggatgatacccgaggcgttcatctatatttatagcgggcggttgatacgcacattggctgacatgaagtatggcaactacaagatgacaccggtggggataacatacaacgccatctcgttcgtcatcgctgttgtcctcacggtcgccttcacggtgtacgccaagagagctctgaatgacataaaagagtcggaaggtattttaacagaagagtatggcatatctactggccacaagaatccccatcaagagcgctccccatcacggcctgtaccattggatgatgttgtatgacggcgttgttctacagggacaaagtacatacggctgcttcagaaagggagaaactgagaaagtaggatattcatctctcgtctgcttttctccagcggaagaagaggtgtagtgtaggtaggctaattgcataaggtgaatgcacctgtctaactcaaatacacgccctaactaaggttgttgattcattgcgtgcactgttgttggctagaggttttcgtctggcttctgttgggttgggaatgtagaggatagcactggcatgtcaactgactagtgattgctggtgtctgtctgtactaggtgatcttgcagcaagtgtactagcatgtctgcatgcttcaccttcgtgaaaatgtcgattcttttctccctttgttccttttctttggcaaatatacagatatcttcattttgcgacgagaatatactgtgccatgggaaatggtactgccgtagcacttggatttggaattggccgtgaccatttcccatggtttatacaaaaacaggagatctcttctgttattggaattggccgtgatcatttctcacgagatctcttctcatgctttgtatacaaaaaataacataataaaggaccattactgttcttgttt

SEQ ID NO: 19356 - DNA, 1209 bp, Oryza sativa
  ref <308>: DATABASE ACCESSION NUMBER: AK069720
  ref <309>: DATABASE ENTRY DATE: 2001-12-06
gatttcgaagcccaccgaattccattcctcgcgattcctctcccctcgcctcctcgtcctccccctcctaggggatcgccggagaggaatcgcgcggaggaaaaaaaaagaaaagggcttcctcgtcgtctaagttaaaaggaagccatggagcacaaggagactggatgccagcagccagaaggcccgatcctttgcatcaataactgcggcttctttggcagtgcggctaccatgaacatgtgctcaaagtgccacaaggagatgataatgaagcaggagcaggccaagctggcagcctcctctatcgacagcattgtcaatggtggtgattccgggaaggaaccaattattgctggtcacgctgaagtagctgttgctcaagtcgaggtgaagacgcttgttgcgcagcctgctgagattgctggccctagtgagggggtcacggtgaaccccaaggggagggaaggaccaaatcggtgctccacttgtcggaagagggttggtcttaccggattcaactgccgatgtggcaacttgtactgcgcaatgcaccgctattccgataagcatgactgccagtttgactatcggaccgctgctagggatgctattgccaaggctaatccggtggtgaaggcggagaaacttgacaaaatttaggggtttcatatggttggtgaacgaagcgtcacaatctgcggtcttcatcatccatctttgctgcattatccatgccttttcctttcatgttggctgctacaatctagttgttcggcatttgtgatgcatggcacaccacggcagcttcaagaaccctcatctctggtcagtccgaatggtttgcatgttggctatgttgtgtaagctttatttatgatcgtcttgcgctgacggtattgtggcttcgcatttagctagctctgtaatgtactattgtatccgaagtgttacattgcaaccagtaatagtaatcagcaatcgtccgttatatggtactgatgaccattcctgtgtgcagtacatctcaatcttctacatggtaaactctgggtgaggattcacaatatatatactacctggatatctcccacaaagacttgtttagaagtttaggtgacctggtgagaatgtggttctgtggttggtttgtgtaggctttggctttacctggatattatacactggaatatatacttttgcatgtgg

SEQ ID NO: 19357 - DNA, 1472 bp, Oryza sativa; identical to SEQ ID NO: 19300
  ref <308>: DATABASE ACCESSION NUMBER: AK099106
  ref <309>: DATABASE ENTRY DATE: 2002-08-28

SEQ ID NO: 19358 - DNA, 1269 bp, Oryza sativa
  ref <308>: DATABASE ACCESSION NUMBER: AK069721
  ref <309>: DATABASE ENTRY DATE: 2001-12-06
atgtagtacttaattgcacgaagaacaccatggcacaacgtgtccaagaagaagatgagcagatgacgagcaccgatgatttgatccaagctgagatcgagctctaccaccactgcttcgccttcatcaagtccacggcacttagggccgccactgacctgtgcatttccgatgccatccaccgcaatggcggcgctgccaccttgtctgacctcgccctcaatatcgggctgcacccgacgaagctctcccacctccggcggctcatgcgcgtgcccactgtctctggcgtattcgccgtcgaagaccacaatgcattcatgagtggttcaccatcgagcaagcagccgccatgacacccttcgaggtggcgcacggttgcacgcggtgggagattatagcaaatgatgccaaggatggtagcgtgttcaacaccgccatggttgaggacagccgtgtcgccatggatatcatcttgaaggagagctgtggcgttttccagggcatcagctctctggttgatgttggcggtggccatggtgctgcagctgcagctatagcgacggcattcccaaacatcaagtgtacggttttggatctccctcatatcgtcgccgaggctcccaccacccatagcaacatccagttcgtcggtggtgactttttcgagtttattccagcagctgatgttgtgctacttaagtatattttgcatgcttggcaagatgatgattgtgtcaagattctgcggcggtgcaaagaggcaatcctggcaagggatgctgggggaaaggtgataattattgaggtggttgttgggattggacccaaggaaattgttcccaaggagatgcaaattttgtttgatgttttcatgatgtacgttgatggcatcgagcgagaggagcatgaatggaagaagattttcttagaggctggattcagtgactacaaaatcacaccagtgctaggtgcccgatcgatcatcgaggtttacccttgatgcttctgaaggtgtagatgtgcatctctgcgtggaacctattctagttcagtagccttgaggcatgcgcgtgttcacgtcgaggccatcattttttgtttttctgttgtcatatgtgctatagtatattgtgcgttgtgggatggcacaactcatgcatgtcgtggcttaagtctcgggcatattggtagcctcgatttccatttctatattcatcacaataagaggaagagaaaaccaaaagctacaaggcagtttgtagcgcc

SEQ ID NO: 19359 - DNA, 3326 bp, Oryza sativa
  ref <308>: DATABASE ACCESSION NUMBER: AK069722
  ref <309>: DATABASE ENTRY DATE: 2001-12-06
gacctcgcggccccctcggttttattttttcttcttctcttcggcgtggtcgcgtcgtcgcgtttgcgtcttcccgttcccgatcccttcctccctctgcctctcgattcgattcgagtttcttcgtttttttcccctcttaataatcttcgtgttgatttggattgtcgtcgtgttcttcgccttttctgtccgcagatctccgtgcgacgctgcccgggagcctcctctatctggattcgttcgacttgattgattgattgttcggtttgcttgcgacgtgtttgatttttttcctccccggtgattcgattcgatccgatcctatccgaccccttctctggtctcgatttctgttttgtgttgttccccgtgttcgtcctctcggcgtgttcggttgttgcaggagcggatttgatccgggattttggaggttcccgtggcgtcgtgtggcgaagggggaagtcgaggtttcgaggaagaggtcagtttcccgtctacggtcgtttgatttagtcacttgggttcggtgattgatttcagatttgagtggttgattaccttcaatcgatggatggatgatcatcgggttcttatctgtccttacgcgaggtgattcgagaccctgggttgatagttatttgtaaccgctgatctggcttgtggtatgtgtttgtgctgctctagatgatgcaggagggagggaggctgttgagatgaaccgaattggtggaggtttgattattatggtccaggttcatggttgctttgattattatgatgaatcggggaggtggaggtttgattgttatggttcatggctttttgattagttcatggtggttctgaaattattctgacacggaagtttgtggtgtcgtgacaacgttcactggatttcctttggtcagatcctcaagatgtgcagatttctaagtgatttggagatagatttacgggagattgtcagatggaatagcaatgcttcgtttggattctgaaccccccttgatttgatttagttgttgtcagcataatttgattaatgccttgaaaagtctgatttgggccgttggttgttcttcagaattattgggagttgcatctcacggcgagtcctatttgctgcatgaattggaatcaccatacatacaggccgctggcagttctttttctgtgatcgacaatcttccccttaatcaaattttccatgttcttcatcagtaattcttagttcttgcagatagcacacaactaagatggaatttgcaatccaaacctgcctcggtctgcgagctcaagacaggctttatacctatgccactcagtctttagtgcatgttttctatgcttaagctgctttcctccaaaataatactcttgctcactgtaggtctctaaataagagtaattgttatggctcgtctcagtgaagctcactaccctttttctcttcaattcatcgttagaagttaaaaatttacaaagttgaatttcttcccaaataaatgttctcttgcttgctgcaggcctatctcataattttgcaaggccaaccttcaccgagtgaaatctttaaatcaccacccttctcttcaattcatcattagaagttatatacctcacaaagatatatttaagtccaatctattgctcactgcaggtttctgcataatttctatggccaatctgcaggtttctacataatttctatggccaatctgagtgaatcctttaaatcatcacccctttctcttcaatttaccatcagaagttaattgcttgcaaagttgaatttcttctcgaataagtggtctcttgctcactgcaggtcctagttcataattttgcatggccagccttcactgagtgaaatctttaaatccccttattcaattcatcattagaagtactcaccaagggtagaatttaagtgcttggatttatctgcagaaatggaattgcgtaggaattttggagcttcaagatagatgtgactactggagaattctacaaccaaaacatacttttcctagtttgcctaatacttaacttcctgtttagtttctatttcggtcatcagaattgcttcatacatgtagcttagattttggtgtgcctttgtctttctttgttggtcgcagattccttaattttctcccaagttgacaaggttattgattggaggctgttggcttgttcggtttgtgttttatcaccttcaattgttacctatgtttatccgatagtctctgggttggtctgggggttggagctctgaatgcacacaaggtctgattgatttcgcagattattgttacctggattatttcagcatatggatcgtttggcttggcgtttctgtgtggggtcttccctgatggccagccatcagttgcagtatctcgtaattttagtggattctacacttgagacctgagttagtttttttttttgtggtttgtgtgtttgtccttgttttagatgatgcagaagggtggctatcgggagattaaatccaagagtagaggatggatcttttgatattacggtggactggagcaactatcatataactggaaaaagatcattaagccaaattcacccactcattattttagtacttaccatccgggtgagcatcttgtcagcgatgcttatgtggattttcgttttttctccagcaattggaagtactagctttgttggagttgctattttggagctaatcagggcactggtttcttctgtgattaacaatctttctacttctttagttattactcttcagacatggtttttatgtgcctgccatcaattcaaatgcagacatacagattcagtacagatttggagctgcaaaatcaatacagatttggatgttctgacctctctaaacaggcttatccctcctttccaccatgacaatttgtttttgatgtctaagctgcttccgcctatacagattcatagaagatagtcttttgcctgtttcaggtctatttttggtcattttgcaaggcaaatccaattccgattgaaatcttctgaacaaccaggattttcccttcaactccttattaaaaagttaaatgccccacaaggacagaatttgaatactcttaatttcgatcatcagggatggggagggttcgagggtgtgttttggagcttcaagctagatgagaccatgggagatcgtacaacctacaactatatacgatttagtgctctccttgcattcttatgtttctatttctgttttggttgataatgtagcttcttatgcccatatttgatttggcgtcatttgtgccttcctctgc

SEQ ID NO: 19360 - DNA, 1699 bp, Oryza sativa
  ref <308>: DATABASE ACCESSION NUMBER: AK069723
  ref <309>: DATABASE ENTRY DATE: 2001-12-06
ggtgaccgcaccatttgcgtcgcggcctcgcctcggcttctccgtcccgcccgcgcaagcagcgcccgcctcctgttcgacggaatggcacagtgggacgcgctcgtggacgccgcgcttgcaaggctggcgtcgaggaacctcctgcgagccacgcgtcccatcgccctcgcgccacctccagcgccgcctgaaaccttcgccggccctggcccatgggaccgcgccgccgtcgagatccagctcgatcgcgcaaccctccaccaatggctcgccgaaggtggtgaagcgactggccaagaagaggaggtggatgagaaactcattctattctccgggaatgattacatgggcctcagctcccatccggcaatccgcaaggctgcagtgaaggcagctcaagagtacggcatgggacctaggggctctgccttgatatgtggctatactacttatcacaaattggtggaggaatctttggcagagttgaagaaaaaggaggattgccttctttgcccaacaggattttctgccaacatggctgtgatgactgctctgggaagtgtgagctctattttgtctgttgggagaaaacctgcagagggtgagagaattgcagttttctcggatgctctcaaccatgcttctatcattgatggaattcgccttgttgagcgacagcaagaagtagtagcatttgtctacaagcactgtgacatgcatcatcttgatttcctactgtccagttgctcaattgaaaagaaagttgttgtcacagatagcctgtttagcatggatggtgattttgctccattaccagaacttgtcaaattacgcagaaagtatgggtttttgttggtcatcgacgatgcacatggaacacttgtttgtggcgagaatggtggtggtgcacccgagctgtttggatgcgaaaatgacattgacataagcgttggtaccctaagtaaggctgctggctgccagggtggttttatagtttgcagcaaccgatggaagaggctaattcaatcgcgtggccgctcattcatattttcaactgctttgccagttccagtagttgcctctgtgtatgctgctctccatgtctcaaagaaggagagatggcggagatcagtgatctggaggcatgtgcagtattttgcttctttgaccaaactcgacttaactagtcccataatttccatagtagttggaagcgaagaagcagcacttagggctggcaggcatatgctaagatctggatttcatgttacaccaattcgaccacccacagtaccacaaaactcgtgcaggttgcgaataactctaagcgcttctcattccttggatgacatcaaaaggctggtagatgcactatcaccctggcttcctgacaaacatgatgagcagacatatgttatggcgtcaaaactttaagcaagtccatcggagaattcagtttcaatatctgatgccctgctagttgatatgaggaaaaggggataagttgattctagttgacgcgattatttgcatatatccatttatttatgtttgtatgattgtatcaccacgatgtgaaacataatttatatgatctcctgatgccctacaagttgggtaaaggaatttaaaaagtattattttatgacctttgccatctataaagaattaagtcggaaaattgactgataatatt

SEQ ID NO: 19361 - DNA, 964 bp, Oryza sativa
  ref <308>: DATABASE ACCESSION NUMBER: AK069724
  ref <309>: DATABASE ENTRY DATE: 2001-12-06
ttggcgttcgtggcgagaagcagagagaggagagaaatccagagacgcctcgacccctccatcccgatcaaggcgagaattcgtcggcgacgatgctgcgcgcggcggggaagcgtctcctcggcgttgggctgcgcccggcgggcggcggcgctggagaggcggcggcggcggcggcggcttcggcggtggccgttgtgaggaggagggggtaccacgagcgggtggtggaccactacgacaacccgcggaacgtggggacgttcgacaaggacgaccccgacgtgggcacgggactcgtcggcgcgccggcgtgcggcgacgtcatgaagctgcagatccgcgtcgacgaggagtccggtaggatcgtggacgcctgcttcaagaccttcgggtgcggctccgccatcgcctcctcctccgtcgccagtgagtgggtgaagggaaaacaaatggaggatgcagcttcaatcaagaacagtgagatagcgaagcatctatcgcttccgcctgtaaagctccactgcagcatgcttgcagaggatgcaatcaaggccgccgtgaaggattatgaagcgaagaaggcaaagttggataaggggaacgagtagacatcctaaagagagaacaggggatagtccagtagcatagcatgtactagtatcataaaatgtgtgatgatgtttatattgccacggaaataaacgcatgcaacgttatagtttgtattaggcaaagcctgcccctggcagcggttcgtccagctatagtacaccacatgttgtcgaaggtgtacacgaaggtatgcaaaacttgccagtgtcgtttgtacccaagttctgtacatgaaaagtgcttgatactggtgagtctaatgtagaaaaggcgtttaaccaacctgtaaatgatacagtaccctagtattgtagtacttcgtccgtttcacaatgtaaaactttctagc

SEQ ID NO: 19362 - DNA, 1043 bp, Oryza sativa
  ref <308>: DATABASE ACCESSION NUMBER: AK069725
  ref <309>: DATABASE ENTRY DATE: 2001-12-06
gatctcattgttcttcttctttctccgtctctctctctctctctctcgctgtctttccgagcagcaagcagcaatggcggcggcgatgattctctcctgcaggtatctgctcatctgcagcgcgacgcttgcgctgctgctgctgcgactgtgcagcgggctgagcctggacacggtgagggagttcctcacgagggaggaggacaccgtcgtgttcggcctcatcgagcgggccaagcacccgcgcaacacgccggcctacgaccccggctacctcgccggcggcggccatggccacgacgcctctttcgccgagatgttcgtgcgcgagtccgaggcggttcaggccaaggcaggaaggtaccaaagcctgcaggagattcctttcttccctttcagagtgcctttcacattggcacctccatataacttcacaaccgagctgtattctgcagccgcattagttaatgtgaatgatgccatatggagcatgtatttcaatgagttgctccctctcctggccaagaatggcaatgatggcaactatgctgcaactgtttcatcagatcttgtatgtctgcaggcactctcaagaaggatcaactatgggaggtatgtggcagaagtgaagttcataggcgaccagcagaactacacaactttaattcgtaacaaggacacggatgccctgatgaaattgttgacatctgaagcccaggaagatgtggtgaagagaagggttcagaagaaggccatggtgttcggtcaaaatgtgacattggatggaccagttgaaactggcaacagcaacagtagccaaacaagtttcaaagttgatccttcattagtgtataaactgtatgacaaatgggtgattccattgactaaacaagtggaggtcgagtacctgctccatcgtcttgattgaatcaagcatttatctagctaacctatttgttcaaagtgtaactaagttgtcacatgaaagattgaaatgatacaccaataataacatgcagcaaggtctgcagattgttcagtcc

SEQ ID NO: 19363 - DNA, 1894 bp, Oryza sativa
  ref <308>: DATABASE ACCESSION NUMBER: AK069726
  ref <309>: DATABASE ENTRY DATE: 2001-12-06
gaagttgcaacctcccgcctcacccgccgccattgacgaccaccgcgctcgtcccatcccatgcctgcggccgtgaccgcgaggttgtgaggagaagagagtcccaagagaggaggatcgatgcggcagcggcaggccggcgagcaggaggcggagctgttcgtccagtggaggccctgcgacaagaagcggtcctagtcgcccgccgccgctcgcccactcgccggcgtcgtcgatctgagagggacaggggaagaggaagaagcagaggaggaggaggatgagcgtgtcgggcgggaggacgcgggtggggaggtacgagctcgggaggacgctcggcgagggcaccttcgccaaggtcaagttcgcccgcaacgcggactccggcgagaatgtcgccatcaagatcctcgacaaggacaaggtcctcaagcacaagatgatcgcccagataaagcgcgagatctccaccatgaagctcatcaggcaccccaacgtcatccggatgcatgaggtgatggccagcaagaccaaaatatacatagtgatggagcttgtcaccggtggtgaacttttcgacaagattgcttcgcgtgggaggctgaaagaggatgatgcaaggaagtattttccgcagctgatcaacgctgtcgattactgtcatagcagaggagtctatcaccgggatctcaagcccgaaaatcttctgcttgatgctagtggcactctcaaagtatcagattttgggctgagtgcactgtctcaacaagtcagagaggatggtctgttgcacactacctgtggaactcctaattatgttgctcccgaggttatcaacaacaaaggatatgatggagccaaggctgatctgtggtcatgtggagtgattctctttgtcctcatggcaggctaccttccatttgaagactcaaacctcatgtcactttacaagaagatcttcaaagcagacttcagttgcccgtcttggttctctacaagtgcgaagaagctcatcaagaaaatactagatcctaatcctagcaccaggattaccatcgcagagcttatcaacaatgagtggttcaagaagggatatcagcctccaaggtttgagacagcagatgttaacctggatgatatcaactctatttttaatgaatctggggaccaaacacagcttgttgtcgagaggcgagaagagaggccatcagtgatgaatgcttttgagttgatctctacatctcagggtctcaatcttggcacactctttgaaaagcaatcgcagggttctgtgaagcgagaaacaagatttgcatcaaggctgcctgcaaacgagatattgtcgaaaattgaagcagctgctggacccatgggctttaatgtacagaagcgcaactacaagctgaagttgcaaggagagaatccaggaaggaaaggtcagcttgcaattgcaacagaggtttttgaagtcacgccctcgctgtacatggttgagctccgcaaatctaacggcgacactcttgaattccataagttctaccacaacatctccaatggcctgaaagatgtgatgtggaagccggagagtagcataatcgcaggcgatgagatccagcatcggaggtcaccgtgattggcagtttggcaccaaaagttcagtgatagtataaggtagataaccagccaggaaaacctactaaggaatggcctgtggctgttttttttttttttggttctttttaccttttaagttgagttactatctaatctagacatggttgtaaacaaagtttgtatggagatggaatgtgaatgaagaatgtgcatagttttgcttccttgacttattttaaaagcagtaacctgtgaaatccgatgaatgaaattgaaatcg

SEQ ID NO: 19364 - DNA, 1940 bp, Oryza sativa
  ref <308>: DATABASE ACCESSION NUMBER: AK069727
  ref <309>: DATABASE ENTRY DATE: 2001-12-06
gcccaatttaacagagagaggctctccactttggacctttttggagatggagctccatcaccatggaaccagcagcgtctgagctgatggatgtacacaagaaacttctcctggcctccctcagctgtgtacttctgatccaagtagcatcgagtgatggcactgcagagggagttggaacaacaagctggacatgtgtatgcacagctcatccactaggtgaaccaaactcaaatagcagcttgtcgtcgaattgttcttcttcctgccattgtctacaagcagatgatgatggtggcacaggatcatggaactgcacatgtgcttctgacaaagcccttaaaaaagaacacactgcagtacatgataggggctgcttcacttcctgtaactgcacatccggaatttctcaggaaggaaagaagcacgtctctaacaaaacagtgatagttacactgctagtatgtgtgatcctcaccactattgcattccttggcaccacggcgtactacctgcgtcgcaaggatgcgctctctccacattcgcatgcatactcctttgataagtacaccagctggagcagcagatcaaacctcgtcagtcatcgatcttctcctcttccccaaccaaagccaaaaccaaggatcagtgtacttaaagagtttctgtgcagctgcaatccaatatgtggcaatgaaggtggtccgcttcccggtgtcatcgtcaggttctcctactcggaattggagcaagcaaccgggaaattttcagatgaacatctgatcggagttggaggaacaagcaaggtgtaccgtggacagcttagcgacgccaaggtcattgccgtgaagaagctcaggcccctcggaggcgcagacgaagacttcgagttcctatccgaggttgagctgctgtctcggctgaaccactgccatgtcgtgccattgctgggttactgcatggagagccagggccggcagctggagcggctgctggtgttcgagtgcatgggcaatggcaacctgcgcgactgcctcgacctcaagcaggggaggaaggccatggactgggcgacgcgcgtcggcgtggcgctcggcgcggcgaggggggtggagtacctgcacgaggcggcggcgccgcggatcctccaccgcgacatcaagtccaccaacatcctgctcgacgacaagttcagggcgaagatcaccgaccttggcatggccaagtgcctgatgaacgacggcgtgacgagctgctcgagctcgccggcgcggatgctgggcacgttcgggtacttcgcgccggagtacgccatcgtggggaaggcgtcgctcaagtcggacgtgttcagcttcggcgtggtcatcctggagctcatcacggggcggcagccgatccaccaccaccgccgccggcggcggcgggggagagcctggtcctgtgggcggcgccgcggctgcgcgacagccggctggtggtggcggagctgccggacccggcgctgcaggggcggttcccgcaggaggagatgcagatcatggcgcacctggcgcgggagtgcctgcagtgggagcccgagtcgcgtcccaccatgagcgaggtcgtccagatcctcgccaccatcgctccttcctcccgcaagcacgccgccgccgccaccttggtcacccgcatcgggagaagcagcagcgccggcgacacgatgcacagcactaggttagccgtgaagtgcagcgtcggagagagttggcgatcgccggagatggaggaggagacggtggtggacttgacggagccacggctggagccggccatcttcttcaattagctagataggctaccaaattagttgcatgcatgtaatgtaatgctgctgctgctgtacagacagacaaattaacgaaaaaaatcaaatccatactaaacgctattgagaatcc

SEQ ID NO: 19365 - DNA, 1152 bp, Oryza sativa
  ref <308>: DATABASE ACCESSION NUMBER: AK069728
  ref <309>: DATABASE ENTRY DATE: 2001-12-06
ggatcaggtagccaaaccacaccaccataaagctagcttgcaaaggggatagagtagtagagagagagagagaggagaggaggaggaagaagatggggagggggaaggtggagctgaagcggatcgagaacaagatcagccggcaggtgacgttcgccaagcgcaggaacggcctgctcaagaaggcctacgagctctccctcctctgcgacgccgaggtcgccctcatcatcttctccggccgcggccgcctcttcgagttctccagctcatcatgcatgtacaaaaccttggagaggtaccgcagctgcaactacaactcacaggatgcagcagctccagaaaacgaaattaattaccaagaatacctgaagctgaaaacaagagttgaatttcttcaaaccacacagagaaatattcttggtgaggatttgggcccactaagcatgaaggagctggagcagcttgagaaccagatagaagtatccctcaaacaaatcaggtcaagaaagaaccaagcactgcttgatcagctgtttgatctgaagagcaaggagcaacagctgcaagatctcaacaaagacttgaggaaaaagttacaggaaaccagtgcagagaatgtgctccatatgtcctggcaagatggtggtgggcacagcggttctagcactgttcttgctgatcagcctcatcaccatcagggtcttctccaccctcacccagatcagggtgaccattccctgcagattgggtatcatcaccctcatgctcaccatcaccaggcctacatggaccatctgagcaatgaagcagcagacatggttgctcatcaccccaatgaacacatcccatccggctggatatgatgtgtgtgttcagttcaggcttcaggcttcagagaagccaatgcaaacagtgtcctgtaatccagtaattacagggcatatgtaatgtaatgtaatgtaatccctgatctatattttgctaagtacgtgcgtgctctcttacgaccttctcccccaaacagttaatcaggggaataataatttcgtttgatgcacatactgtatgtctgtatctgtcactgtatcgtaggaccgtccatgtataacaatttccgttttggatgtggtaacaagttaattggcactt

SEQ ID NO: 19366 - DNA, 1783 bp, Oryza sativa
  ref <308>: DATABASE ACCESSION NUMBER: AK069729
  ref <309>: DATABASE ENTRY DATE: 2001-12-06
gacaccgtctcctcctcctcgcagatcgccgtctccagaccttgaaaccgcaagcgctcggagacgacgcccctcctcgaccaacgcccgtccacgaagtaaccgcctcatcgcgctgctccacctcaccgacggctacaccgaaggggccgcatctcgctccagcgccatgcatggtggttatttgtggccttcgccattggcggggactggagttctccgggggagcggagcagcggcgaggtggtaggtagagctctgaattcagcgtctctgcatcctctcctcaaggtccttcctttcattctgttgtccagtttcaacatcttcttcgttcattgtttttctgcctgattctgtctgatttggtttggacttgagctatgaacgattacgagcaacatctctatttgggcacgtactctgttttgctttgcccaaagctcatgaggtttttgcctcaatgcaagtggaacaatctgccattcagtacatcaatcaattttcttgtcaatcatagatccattgggcgatacgttgcagatccactttccattttgttttggtaaaattatgggtcttccacattctgtttggccccagctaattttaagtacaaggtcgacctcctgttgttgcttcctgctccaccatgacaggctccgttatgtgtgatgggtaccacctataggggttctgccacagcgatggtttttcttactcaccgtccaatcctctttcaaattgctctctagtggcaagaagacattcaaggaggtggttaactgtctccagattcgtaaggtgtaattgatattagtcattttgccataccctccttgatggcaatctgtccttcgtccatatgaggtttttaagcacaagccaagtgaaaaatcttgctttatattttgaagctcacatcgccccacgtctccccctcttccttccacagtacgcacgcatccctctccccgtctccccgcaaatcacgccgcgagcgcccctctcctcactcagcccgcgcccgcgctcccctaaccctaatccccctccaccctctccgctcctgacccctgcggccccgctgcgcagatcgccatcgcctctcggcagccgcactatccccaaaatcacgtcgttgtgcgctcaccgtcgttcccctcccttcccacgcgctccctcccttccaccgctccgcaccccacgcccgtcgccagcgccgctgccgccatcaggtcgccatcactccctcttgcagacatggatcttcacgccagcgccgccactcccccgtgccctcatcgctgtgccgctccgtcaccctctgccccttctgctcacggctcaccacgccgcctctgtcatctacgggcgcttgccctataggccggcacggtgctagctagctaggtgcgtggaggagggtggggatgacgaaagggtgggaggtgctaaggcgaggcattccgggcagtcgtggacctagcgccatcatctcccctctcagggctgcaacaatgacaaattctgcagtgtgtaaaggtgtgaaaaatgagcttcaagctgccagaatggaaaatgcctgaacattgttctgaagatgagtacatcttttgcaagtcttgatctgtgcacctcttcagctggttgccagcatgaaaaatttatgattctgacatatgtctctgaatatgtttgtaacaatgaattctaaaaacatatatctctgaatacgtttgtaaatttagttggattttatgaagttttcagtgagctttgg

SEQ ID NO: 19367 - DNA, 2162 bp, Oryza sativa
  ref <308>: DATABASE ACCESSION NUMBER: AK069730
  ref <309>: DATABASE ENTRY DATE: 2001-12-06
gagtcgcatatcccgccgcgtactgggaccaaggggaacgtgggccccacctgtcaggtgggccgtatataacgaccgcctcctcaccccggcctctcgccaccccagaagccaatccgcgcgaggcctcgccgtgatctcaattctcccccaaattcgcaaatcctccgcgtttcgtcgtcgccgttgccgtcgccgccgagcagggcggattcaaggggaagctccggtgagatccatccgcgaagcgcgttccctcgcggaaccctcgctcgccgggccggccgatctggtttgtgcgggggtggttgtggttgtggttgtggttgttgtttggtcgccggaatccgacgagttggagatctccgagggataggaatccgtagcgttgcgagcgccaggcgaggttacgatgcctgcggtgctcgccgcgttcgccagcctccgcgcggccgccgccatcgcctccgcggactcctccccctgctcccatctcctgaagcccccctcctccccgtgttttagtagtagtagtaatatttttagtagtagtaattatctttaacgattgcttccccatcgtcgcgcgctcacgcccctcggtcctcacttcgcgccgttcgcgttctcgtgttcgatttggttgtgctcgatccgatctctccctttcctgcttccgatcagaagcagtcggccttgttggaggtggtgattgctggttcttcgaggaaagagaaaatcatctcctgaatttggaattaagcttgtggatgggcggatctttggtggactctagcgccgaaggtgttagcagcagcttatgtctctgccacagcacctctgaaaaggcaggctttgagcatagctcatgtgctagctctggagatggaaattgtgaagctggaatagattttggggcaagatgatttggttgtcaatgaaattggaatggctattgctgaagtgatgcatgtctgcagtgatcatgatgatgatgaagggacagattcgggtgaagactttgatgaaaatgagggtctactttctctggaatcagattccactgatgatgtagtggatattgataatgaattggtcatatcgcctaccttttctagttgcaatgcatctgaatcatcaatcaacaaatcagactctggaaattcttccattaatggcactccaccgttggtttctgcaatgaaaggaagccgtgcaaagttgggaatcgtcacaagtttgagtgtttcatgggcccctgatgtatatgatcctcctgttacttctgggtctcacactgtgaaggggcatcaaagaagttcaaggaagagccactacaaatacaagccggccaagagcagtagcagccgcagcagcagtggaagcaaaaaggacaggaagcattctcgccacagtagcagcagcagcagcagcagtaaccacaaaagagacaggaaaccttcctaccgcaacaccgttggtggtgtaagcgtcggcagcagcagcagcagcagaaatactgatgctagtgctgctcaatatcgtgatctgtacagcagcagtggcggcaacagaatcgacattgctgttcctcaatacagcaagctatctccgttggtgccgtctgagagtgcaacatatcgtaatgtgtacaacagcactagcggcagcagaactgaccctaccgttcctcattgtagcaagctatctccgctggtgacatctgagagtgcatcacttgcagggaccgttcctgtgctgaagacattggagccgatcaaacgcagctccagctgctgcaaggagcagcctttgagctttctgtcacgccagtttgtggctgcaaagtacaaggggatgttctcactatggagtcacaaccagctagcttcttaatcatctgttgatacatccaactcgtaagctgttggttatcaacaaaatgcaaaacttttaccgcttatgcctttattattttgatttgtgaccacgtgtcttgttctttgttacactgtttgctccgtttgttgaacatccgaagagatgttatcgaaagttgtcgctcgaagtatgtatgcatactcgagctcattatcttcccttatttatttgttcaatcggcacggttctgtttgaggctttgaacatcatttcatcggttc

SEQ ID NO: 19368 - DNA, 2370 bp, Oryza sativa
  ref <308>: DATABASE ACCESSION NUMBER: AK069731
  ref <309>: DATABASE ENTRY DATE: 2001-12-06
gattccaccgccatcgcctccggcgaactctccaccgccccctttcctacatcccaccactattttataagccagcccttcatctcatctggagatctggttctactcatccaggaaagccccaatctttatcatagcaaggaggtcatgtcggaatcggccctcgacaaacatatagtggtgaaaattcccgatcattttctgccagatgctttcataggagaaagtgttggtaaaggtaaagaagatggagcaaccgtagataacatggacccgtcccgcccttttctagttatcaagaagtctgatttggataaggctggtgagtgggttaaaataaaatatgcttggatggccaagtccttaacaaatgatataatcatcccagaccctacccctcaggtggtgcgggatgccttctttgatatatctccccgcttggactccgtcttgagaaaggacagtgtccggtgcttcttccgtttgttcgcggaatgtactgcggccatggcatttaagtgtaacatcacctcagaaaccttatcctgcattgtcaggcataatgccttgcgatgtgcgaaaactgtattggagggcaaggcacctcagctcagttgtatgcatgccaatccaaactgcattaacccatatggaatttttccactccatggagctgctgaacggttctctgttgacatgatcaagttgctgttctgccatggtgcttcagccaatttacacacagtcaatgatgctggcattcccggactactcccgctccatgttgcagttggaaatacttgcttgcataaatatctggaggacaatctatctcctgtgcagtatcatgaggattatatctacaagctcattcatctgctgtgtctacctgagatgaaggtttttttggatacagttagactgcttgctgaaaaaacagataatctagctgatgagctctggaattacatgaagaatgacaagcttgtagaatccgcagttttactcctggcagcccgaaaacatatccgtgagggcaaacctgatgggttcgacattatcgcgcaacgtatatatgaggactatgattccctagtgtgtgataaaggtgatactgcagaggggcagaagctgctggaggaaagaagagcacttttgaaatgtaaatgtctgattgtcactataatttcgcaagctggtgaggttttggataactacattcaagcacattcagaggtgcccaatgtggaggtccttgcgcgtgtttcatatattcttaaggaattcgggttttgccctaacgaagaatacattgacaccatgatcctgtactgctctttttgtattcaatataatattttttttctatgcaaatgtttgttgtttattaattatttcttaaacttgttattgaagctgtccatataacaagatttcttacagcgacatagttcacaaagatgtaaccaaggctgttgcacaaatgtctacttctctgcctgctgcagaaaaaaaggctgcgagaaaaaaggcacttaaaggatgggatccaacattcataaagagaaattttttcccctactggagatcagtattaggggcccagctgtctgtatccaatggagcagcagatgagaagtcaatgcttcatcgtccacagttccgtaattcagtagtgagtaacgagtcttcgagtctgaaccataatattagtttcttgggaagaattcagcaactgagtggtactcatgaatcgagaaggtacagtactgctgcattcagaatgctcacgaaggtgctaaagacatgagcaaaaaggtgcctagtggcatgttgctgttgataaccataggtctgcaaagtattatgctgcgcacgtcttttgcggacaccttaagaaggttgcgaatatacatgtgaccaccaaaaccttgttcaaagtgatgctaagtactttaaattatgatgaaatgcaacatgccgtgtgttgtattcggcttgaaccctcgacccgcgagatgtggacatgcgtgccagcatgttgtacttgtaccaggttcaacgttagcttgaacactgaacaagttaaatgtgttgcaaaatgccatttttctttatcagcaatctcttctacctatatcagggtcatgattctagaatgttattgggccacgtggcagcctgaaaaattagctaaacatcaccaaaatttttgccacgtgtcaatcagatataagctcttgtgatgtcccttgcacatcagaatctctagaaaacccattactttacctatctctttgcactaatgcagttgataagtatcgaccaataaaataataaagagagttaataagtgcttcacttttgcct

SEQ ID NO: 19369 - DNA, 1098 bp, Oryza sativa
  ref <308>: DATABASE ACCESSION NUMBER: AK099107
  ref <309>: DATABASE ENTRY DATE: 2002-08-28
accagaaaacccccacgagccgcggccatggcgaccaccaccaccaccccctcctcctctctcaccgcccctctcctccgcccgagctcgaacgcgaaccccgccccgagatctctgccgctcctcaggagccggaggtgcgctcgggccgtggcgaccgccgccgccgccgctggccacggggccgctcatcagaggagcgggatttggtcgatcagggatgatttggtggtgccgaggtcgccctacttccctgtggagtatgcgtcggggcaggaacgcgggccatcgcccatggtgatggagcggttccagagcgtcgtcagccagctcttccagcacaggattatccggtgtggtggacccgtggaggatgatatggcgaacatcatcgttgcccagctgctatatctcgatgccatcgatcctaacaaggatatcattatgtatgtgaattctcctggaggatcagtgacagctgggatggccatattcgacacgatgaagcatatcagacctgatgtttccacagtttgtattggacttgctgcaagtatgggagcttttctgcttagtgctgggacaaaagggaagcgatacagcttacctaactcaagaataatgatccatcaacctctcggaggagcccaaggacaagagactgatcttgagatccaggctaatgagatgctgcatcacaaggctaacctgaatggatacctagcataccacactgggcagcccctagataagatcaacgtagatactgaccgtgattacttcatgagcgcgaaggaggcaaaggagtatggtctaattgatggagttatcacgaatccccttaaagcccttcaaccgcttcctgcttctagttagccatggagtgctcaatctccacggagcattttttggttatcttttagaactgttattgcatccactgtttttattagcttggcaagatagttttgcgattccacaagcaaccacatcctgaggcttcaaagtttgtacaatacagatgtactactaggaggatatcttctgcgatgaatattgcaacttatttgatgtactattaggaggatatcttctgcg

SEQ ID NO: 19370 - DNA, 2470 bp, Oryza sativa
  ref <308>: DATABASE ACCESSION NUMBER: AK069732
  ref <309>: DATABASE ENTRY DATE: 2001-12-06
gtgcggcggagagagagagagagagagagagagagagagaatcgccatggcgtcgcgactcgtggcccggtcgaggagaggcctagcgctcgccctctcccgcgccggcgccggcgccccgtcgcggccctcccctcctggcctcggcaagactctggggtatgagccaacatcacatctccatggtgctcagtttttaccttgttggttttcaactattgcatctaatggatctcacatgcaaaaggcacaggagacatgtaagccagttgctggaatggaacactctgatgcactgaaagtaatggaaggaacctctcctaaagttgtggcattcagcccactagaagcagctatcactaaacctagaagcagtcccttgacaattgaaagttctaaagtaaagcgatcagagattgcaacgctagtcacattttacatgatcccttctctgcttgtttcctcaaaaaatgggcttgctacctctattttggttggcgcagtattccatcaaatatacatgtttcacaaggagatatttctggactatgtgcaccatgatatcaccaggaagtgggctttgatatacttcaagctgcttttgttgatcatggcgaaggaaaccattgtgtatttcaactttatctgagttttatctcttgcagagggacaatctatgtactcatccatacaccagaaaaaatgacggtggtggataaaattctggcgccttgttctcttcatggacattttcaacatttttccttctcaacttcatttgtatatgcacttgaaagaggatgattagtgatcaatgaagcaattagttcgacttcattcttgtttataataatagcaactgatatgaactgtttggtatttgctagcacgatgcagccatatggattttgttttccatgtatgaattatcatcttatgtgcatatatttctccttttggaggcttgagctgccattatttttttgcgaatccttcagactccagtcctacatgaatccagcgctatgctcctttttggaggttttgttactgcagagatgattgtgtgtttaactttattgattggtttgattgtttctgcagatgttacaaagattggccggttgcagtttgtttgaaatgctaggattcagaagtccctccagatgcttgcttcaaatatacttactactcagtaaatgataggagtactgctctgtaaatgcatgaaaaaacagtgatggagaaatctgatgcttgtgtacccaatgatgcaggatcagtcctccttggtgaacacgctggaatttcccaataatttgcagtatcccacaacattcagaaaaccaaattccttggaaattcacgacacaaggtaaagaacaaaaacccatgacgttttgctttgcaatttgcaggtagggctctgctgtccttgctgctgctgctggatttgaaagaaaaaaacctgtgtacgatgtacgtacgccggctgcatccttgtacagccatgttcatgtgagagcggaaaaaactgccttccagctcagctctgcagggctgaattgccgcctggatcctgcggccgccatgtttacccgggacggccggccggacggcggcgaccccatcggctgccacgcgcacatgcccggcgaccgacggccgccggtgctgactgtgaattgacatgaatgctgccactgcctgtgcctgcaatgtcccagcttgctttgcaggaggcagcagcagcagcagctagctgtggtagaatggctgcttctgtgaccgtctctgcattgcagagagatgcagtgagtgtgtgttgagtgactcctccagctgggagctccaggaattcacctccccacacacagtcacagtcacaaacacactcccagtgcattacctgtctgtctgcactgtgcatgcagtgaaacctctgaacattttcaccgtggcattctgaattctgatccggcaatcaatcaaccagcccttgcagttattagtgaagtgcagatgtatcatgtatctgtccagccatcaaatgctgcagtggagaacagggaactgaagggggttcttggatttggcttctttactttttcgctgattttatttttttttctctggcacctgcttttatttcttcagatctcatattatcatcaccatatgggtggttttgcaagagtggacctgaggttcttgcagcaatgcagccgcaggacccatagaaaggaccattgaaaactgtggcacaaaacatgcatagtgaaaatggcgcaggcattacagagaaaagtagtagatatgctagctataatttcaggattgtgcaattttgttgtcttccctggctatggagtacggagtatcatgttacaactcaccatgtctttacatatggttaacttcacttgtgactctctcttttaaataaaaatagaatgaccctttttctctt

SEQ ID NO: 19371 - DNA, 1998 bp, Oryza sativa
  ref <308>: DATABASE ACCESSION NUMBER: AK069733
  ref <309>: DATABASE ENTRY DATE: 2001-12-06
ggctgcgtttcgtttcttccccaaaaaccaagggggaaggcaaactttccccaaatctcaaccccaatcccaatctagggcacatgagccacccctcgtcgtcgtcctcctccgctcccccggcggcggccgaggccacctccctcgcaccgggattccggttccacccgacggatgaggagctggtgtcctactacctgaagcggaaggtccatgggcggccgctcaaggtggacgccatcgcggaggtggacctgtacaaggtggagccatgggacctccccgcccgctcccgcctccgcagccgcgactcccagtggtacttcttcagccgcctcgaccgcaagcacgccaaccgcgcccgcaccaaccgcgccaccgccggcggctactggaagaccaccggcaaggacagggaggtccgcaacggccccaccaccgtcggcatgaagaagaccctcgtcttccacgccggccgcgcccccaagggcgagcgcaccaactgggtcatgcacgagtaccgcctcgacggccaaaccaccatcccaccacaggattcattcgtcgtgtgccgtatcttccagaaagccggcccaggtccacagaacggggctcagtacggagctccttttgttgaggaggagtgggaggaggatgacgaggatgttggtttgctaccggtggaggagaaggacaactctgatgaccaggaaaaggaaatttctggtgctatggagaagggctatctccagatgagtgacctcgttcagaacttggttgatcaaaatgagaatggtaccattgccttgccagtttctgacaattcaaacaacagcaaccattctgaagacgtggatggaaattcaggggacattttaagtgaccaaaaccttgggtctaactttcttcaccatgttgagcctgtggagcaaaatggcctagtgcttaatgaaaatatgttttctagtgccaatgctggagacctttttaatatatctagccccaatgatggattcctagaactgaaggattttgcagatattgcagatttggagaatcctttagccaatgaatccaccatctggccttctgatggttggccctggaaatcaactgattccatggaggctgtgaatggggctagcaatgaattttctcccttagctggtgaacagatattccagccagaagaattggaacagttgttacagtcactgcaagaagactctcatatgggttcaactatctctgatcccccacattcatctataacaaatttagctaagccagaggaagattgtctaatgttctatgatgcaccctttgattcttcaatgtgtgatgatggttttagacagctcaatggatttcttggctccccatcgaccaatctatctggtattgacatggtggacgatggtatgccgtactatgatgcgatggatgataacttgtttaatgatcttctgagctcagtacagccatcagctggtagcagttcccatgcttttagtgggccagtccttactcaagaggtcaacaattcaacctatacatatagtccaactcaaaaggttttagaacctaattttgtagttggtgccccatcatctgctaggttacctgaagcgggtagtcagttaaattatgttgttttaccaggtaatattactatggagaagtaccataggtcaattattatttcctgctctttagtgctgatccatcatggaaaaagagcattctcagcactttttgggccactaataattaatctttttttttttgcaatgaggaattgttcattgttgtatttacttgtcctgattgagcaagatttaagtattactagatcatttttgtggagacactcttatcttgctcaatcagtgcagtgttacacacaattggcatgtgatttctcattgcctggccattaacttgtacctgtaattgaacattattgacaagtgtttgtactatattccacagattccc

SEQ ID NO: 19372 - DNA, 1754 bp, Oryza sativa
  ref <308>: DATABASE ACCESSION NUMBER: AK069734
  ref <309>: DATABASE ENTRY DATE: 2001-12-06
gtgccgctgaagctacctcctgctcttcttcctcttcgtcttcggcgtagctccatccctgctgttgcatgtaggattcgatcgattcgtggtggaggagttgagcttgtcaggtgttcgttcttggggatcgatgacgctgggcagcggcggcatggcggcggaggagggcggcggcaatggcgaggcggcggcgaggggggagaggtgcgtggtggtggcggtggaggagacgtgctgcgcgtgcgcgcagctcgtggtcgggccgccgaacccgatgatggcgaggtacgtgtacgccttcgtgttcctggcgaccaacctgctcgcctggacgctccgcgacttcggccaccccgtcctcgccgagctccggcgactccgcggcagctgccagggcgccggctactgcctcggcgccgagggcgtcctccgcgtcagcctcggctgcttcctgttcttcttcgtgatgttcttgtcgacggtgaggacgaggaagacgcacgatcgccggaattcatggcactccgagtggtggccggcgaagatcgtgctgtggatgggcttcaccgtcgtccccttcttcctcccctcgcctctcatccagctctacgggaagatcgcgcatttcggagcaggggcgtttctggtgatccagctcgtcagtgtcacccggttcatcacctggctgaacgactgctgccggtcagagaccaacctgaagagatgccatatgcaggtgcaggtggtgtcgatcgcggcgtacgtgggctccatcctgggcgtggtgctcatgtacgtgtggtacgcgccgcggccgtcctgcaagctcaacatcctcttcatcaccgtcaccctcgtcctcgtccagatcatgaccggcgtctcgctcagctccaaggtgaaggctggctacctggcgcctgggctgatgggggtctacatcgtgttcctctgctggacagcgatcaggagtgagcctcacacagagatttgcaacaagaaagccgaggttgcaacgagtgcagattgggttaacatcgcgagcttcgtgatcgcggtgatcgtcatcgtcacggcgacattcgctacggggatcgattccaagtgcctccagttcaagaaggccgagagcgagcagcccgaggacgacgacatcccgtacgggttcggcttcttccacttcgtgttcgccatgggcgccatgtacttcgctatgctcttcgtcggctggaacgccaatcaaaccatggagaagtggacgatcgatgtcgggtgggcgagcacctgggtccgggttgtcaacgaatggctcgcggcgatcgtgtatatatggatggtgattgctccaattgtctggaagggagggcaggtcggctcatcgccagagggcacatgacacaaggagaacaaatcagaattcagaaatggagcttcgtcagatgatgcagcgataaatacttggtcagcgacaaacacgtacgtagctgcaggctgcatgatcagggagatgtacaggatgagaagaacagttttgctttcgttgcagctgctgcagagaggcatatgcaattggcatccattgcccatacgagtgtagctagctagctaagctagatatttgtatgttcagtttcctctcctgttactggagagggcaatgcatcgaatcagcaaagcatattgtcaaatgacaaactgctgctgaacatgcaaaaggggcagcaacccttggaatatacgcagacttcccg

SEQ ID NO: 19373 - DNA, 2051 bp, Oryza sativa
  ref <308>: DATABASE ACCESSION NUMBER: AK069735
  ref <309>: DATABASE ENTRY DATE: 2001-12-06
gagccccagtcactgcccaggcgggcccacccccgtccacgtaagcagcagcgccggaaccacacgttaaaacaacaagcgcgcccgcgcgcggcggaggtgagagcgaccggcccgaccgagaccggtccggtcctcgcctcggccggcgcggttcgaactcgaactcgacacggctcgcgacgcgagaagcccccattcccaatccgcaaattcacttctctcctctccccaaatctccacctccaccacctctccaatccaatccaaccaaaccaaccaaccaaccctaacgcggcggcgcggcgagcgatggcgtcgatcccgccggatgacgacgcggcggcggcggcggcggcgggggcggccgagaacgggtacgggaacgggaaggggaacggcaacgggccggcgccgcgcccgccgccggcgaagcggccgaggtcggtgatctcggcggcgcagatccgggcggagttcgagcaccacgaggccggggtggcgcgcgtcaacaacggcagcttcgggtgctgcccgtcctccctcctcgacgcgcaggcgcggtggcagcgcctcttcatcgcccagcccgacgacttctacttccacgccctccagccggggctccgccgctcgcgggctgccgtcgcgggcctcgtcaacgccggggacgtcgccgaggtctccctcgtcgacaacgccaccaccgccgccgccatcgtgctgcagcacgccgcgtggagcttcgccgaggggaggttctcccgcggggacgccgtgctcatgctccactacgcgtacggcgccgtcaagaagtccatccacgcctacgtcgcccgcgccggggccaccgtcgtcgaggtgccgctcccgttccccgtcgcgtccgcggacgccatcatcgccgagttccgcgccgcgctcgatgtggccaaggccggggggcgcaaggtccgcctcgcggtcatcgaccacatcacctccatgcctagcgttgtcatcccggtgaaggagctcgttgccatctgccgagaagagggtgtcgataaggtgtttatagatgccgcgcactccattgggcaggtccctgttgatgtgcgcgatattggggccgatttttacaccagcaatctccacaagtggttcttctgcccgcctgccgtggctttctggcacacccgaaaggatgatccgatagcctcccagctccaccatcctgtggtgtcgcacgagtacggcaatgggcttcccatggagagtggatggattgggacaagggattacagtgcacagcttgtagtgcctgaatctattgattttgttaaccgatttgaaggtggcatcgagggaataaggagccgtaaccatgaaaaagtgatcgagatgggtaagatgcttgctgaggcatgggggacttttcttggcacaccaccagagctgtgcggtagcatggttatggttggtcttcccggttgccttggtgttgaaagtgatgatgatgtgatgagaatgagaacaatgttgaggaaggattttatggtggaggtgccaatatactacaattcgagaagagtagaagctcaagaaatgtcaaaggataagaatggtgatgcagtcacagggtatgttaggatctcacaccaagtttacaatgtaacggaggattatgagaagctgagggatgctgtcaataagcttgttgctgatggattcaccagcagcaagttgcggccttcgcagaagcaggaaacgatggcctgatgaacattgcagccaaccagcactctgttggaagttatgttgtggccgactacttagatgtggatcgccgtgacagccagcgctgcggtgtgatctagatttagcccgccaatggcgttgccagttcatgtagtgtactttcagaaactgacagaagtgttgtatttgcaatccgtccgtcacaataatgcactggcatgtcttcccccttaccctcattttcaagctgtaatgtaagaacaacaataatctgaatccaaggagaattgccgccgctgtagattgaattg

SEQ ID NO: 19374 - DNA, 1224 bp, Oryza sativa
  ref <308>: DATABASE ACCESSION NUMBER: AK069736
  ref <309>: DATABASE ENTRY DATE: 2001-12-06
ggtcttctctccctctctcctcatcctcctccgtgttcctgatctgcgcacgcacggccgccctcctcctcctccccccgcgcttcgcttcctcgcgcgcgcgcgtcatcgaagctggcctagagactcctcggcgagaggacggttctcccccctctcccgccccccgcgcgcgcgcggcaggtttgggagatcgacggtggtcggtggcctcctccctcctgtcctgcccggttcgagtcgaattgaaaggcacagctggttctgtcatttggctgttcagaagcctggaggctgggccatttgatatcctgaagttttgagtaagaatggagaatgggctgtccgatgaagttcttaaagcagttttccctctactggatggtcaagacctagtcttttgcatgcttgtatgtcgtcaatggcgagaaattgcaaaggatgactacttctggaaatgcatatgtgcgaggaagtggccttccatttgcaagcaacctccttcagatgcaaactaccagaagctctatttaaccttctccaaaccacggacgccacagcaccttcctgtaccaaagctcacattcgaggatcttgtgttttacattgacatgtggcttgacggatcactcatcttctctcaagctgtttcaggctgcatccttcgaggaggtctgcagaatacaccttgtggcattccggatgtacttgtagcacatttgactgctcctgactgcattctgatgatggaggttgaacccaagctggaaataactatggggccatccatcactgtgtctgttcttgcccaccgaaaggatacaaagaagatggcttgcgtcattaataagtcaacttttgattacatcgacagcaacgcagcacgggcattggcatatgaatatctccagttttcaccaagatacccttttatatcagacatccgagcatggatgtctttgcttttcctgtacaaaggaacaaacgtcatcgaagtatttggtatagagctagacttttgtgatgcagcaaggtcggagactgaaattctttggctcttagacatgcttgattggaaatagaagctttaatcgttttttctgttgtgatttgacgcatgtaaagaatgttcatggttaattcttgttatccagttgaagcatgtgtactactgaaccatatgtactgttggaaatttggaataaaaatggttcacgccactcc

SEQ ID NO: 19375 - DNA, 1424 bp, Oryza sativa
  ref <308>: DATABASE ACCESSION NUMBER: AK069737
  ref <309>: DATABASE ENTRY DATE: 2001-12-06
gggggcacacgctcggccggctcctcttctcatcctccacctctcccttcccttccgcctctacctccacctccacctcacctgcgcgcgccttccccccattgcctccgcctccgccccctcaaccggaggagctcccccggctgccgctccgtggcccgtgtcccgtggccgctctcctccccagccctgggtgggtcggcgtcggcggcgggggaactaaccggagatccacccggacccggagggaagggagggggatccctttgccctttggagggggggtgggttcaggggtggtggcgcggaggccagcgttgttgagtgcgagcggagctcggggtgagctgagatggtgctggtggtgaagcagtaccgctgcacgcactccgcgagctgcctctgcctcaaggggcacatcagcgaggacgcactgttcctcgtcttccgccacatgaactggaacccgaggatgatcgcgctcttctcctgcgtctccaagtggttcgacgacatcgccaagcgcgtgctgtggaaggagttctgccacgccagggcgcccaggatgatgcaggacctgcactccggcggcagccacatcgtcgacggcaactggaaggcgctcgggaagctccttatccattgcgcggggtgcaccaagggtggcctgtttggtaacatacacgttcctgggcactttgttttcaggacccgcttctcaaggacctgcggaaagagcatcttgcctccgcagtgcaggacagatgtgttgtacgtctcggatccttgcgagcaccttgatcagggtgaggaaggtgatttggggtttttccgcggcatcttcaagtcctttgcttcttcaaaggtcaagaagatgctgattgagaagcaagcaaagttccatccaaaggaggtgtgtccttattgtaaagccaagctatggaacttgctgcaggcaaatatgatacccagaagtgcttccataaggttggatgcttatgacgattctgttgagtattatatatgccttaacggacacatccttggtttatgcactctgatgcctgtctctgattccgaggatgcaaaggagtagttatcaagacttgagtcaggtggccttattcatgactggtctgtgaatcttgtacaatgttggatcttgctttctactaagaatcagtagctcgataagaaaatgttgtttttcttggtgcatgtacaatgtgggatctttctttcaactaatagccagcagcgtaacaagaaacgttgccgttgtattatctgcattgttctttgtaccaatagaacattagaaggctctatgtcaccacttccttttttatgggtacctcattacaggtatcttgtattgtatctacatgttttacattatctgacatggcatgtagcattaaggg

SEQ ID NO: 19376 - DNA, 3072 bp, Oryza sativa
  ref <308>: DATABASE ACCESSION NUMBER: AK069738
  ref <309>: DATABASE ENTRY DATE: 2001-12-06
gatcaggagccgagccctccactttccccgccgctcgggccgctttctccattgccaagccgtaccttcgacgcttcgccttgtcagtcactgtccccttcgtggtcgtcttcgccacttctccccccgtctccacttgccccatatctgcggcagcctccctcctcctcgcggagatttgacccctgcgggctcgccttaaaatagaggcgcatcccattcccaagtggctgcttcctgcaaccacgaggtccgccgctctcgggagctccagcgagccgcgtcgccttctgcgcccgccgcccggtggccggcttaaatttgtgcgcggaggcgaggccgtcgtcggtgccgcggggcttcctaattcctcccgggggagtgtggtcgagtgggggtttctggggttcttcgccacttcgccgcccgccgtttagtaaattcaacattttggacctacatgagttgattaacaagtccattccattgtccttcatggaggcttcatcttggttgtgctaccaagctcgtggttttggttcatccagagtatggttatggcttcttctagctcttgttcttctgaattgcagcctggtactctcagcctcgccgtatctggtcggtatggggagcttcgacataacaggacctgcagcagatgttaacatgatgggatatgcaaatactgagcagattgcatcgggaattcacttcaggctgaagtcacgtgcatttattgtggctgagcctaatggaaagcgtgttgtgtttgttaatatcgatgcttgtatggcatcacagattgtgactataaaggtgcttgaaaggctaaaagcaaggtatggtgatctttataatgagaacaacgtggctatcagtggcatccacactcatgctgggcctggaggttatcttcagtatgtagtttatattgtcacgtctcttgggtttgttcgccaatcctttgatgtaattgttgatggcatcgagcaaagcattgttgaagctcataacaacctccgtcctgggaaaatatttgtgaataaaggtgacctccttgatgctggtgtgaatcgcagcccaagtgcatacctaaataatcctgccgaagagagaagcaagtacgagtataatgttgataaagaaatgaccctcatcaagtttgtagacgatgaactgggtccagttggaagtttcaattggtttgcaactcatggaacatcaatgagccgtacaaattctttgataagtggtgataacaagggagccgctgcacgcttcatggaagactgggctgaacaaatgggcttgcccaaacagtcagctcatgcaaattctgatgatttgagatctttgcacaagacatctgtacttcctcggagagtttctactataattcctgaaccaaatgagataactgatgacttgatacaattggcatcatcctatgaggcctcaggtggcaggcggttggcaggttcaagtatcactaggcgcattagaagtactcaacaaaacaaacctaaatttgtttctgcattttgtcagtccaattgtggagatgttagtccaaatgtccttggaacattttgcatagacaccaatcttccctgtgacttcaatcacagcacatgtaatgggaaaaatgaactttgctatggacgaggcccaggataccctgatgagtttgaaagtacccgtgttattgggaataggcaatttctaaaggctagagatctctttgattcagcttctgaagaaatacaaggcaaaattgactataggcacacttatttagatttctcaaaacttgaagttaaagtttctacaagtgcaggcggtcagcagaccgtgaaaacatgcccagcagcaatgggctttgcttttgctgctggaaccacagatggccctggagcttttgatttcagacaaggagatgtcaagggaaaccctttctggaagttagtaaggaacttgttaaagacaccagggaaggaccaagttgaatgtcattctccaaaaccaatattgctagacactggtgaaatgaaggaaccatatgattgggcgcctgcgatacttccagttcaaatgattacaattggtcagctggttatcttgtgtgttcctggtgaattcacaacaatggctggcaggcgtctacgtgatgctgtgaaaactgttcttacaagtggaaacagtgaatttgataaaaatattcatgttgttcttgcggggctaacaaacagctactctcagtacattacaacttttgaagaataccagatccaaagatatgagggagcatcaacgttgtatggtccccacaccttgagtgcctatatccaagaatttcagaaacttgctatggccatgattgcaaacaaagaggtcccaacaaatttccaacctcctgatatgttggacaagcaaattggactacttcctggtgttgtttttgactcaactcctcttggtgtcaagtttggggatgtcaactcggatgttcctggtaactcaacattcaacaagggtagtactgtgaatgctacattttattcagcatgcccaaggaatgaccttcttacggatggtacctttgcactcgtcgagaagctagatggtaacaataattgggttcctgtctacgatgatgatgattggtcattgcgtttcaagtggtcaaggcccgcaagattgagttcaagaagttttgcaactctagagtggacagttcctgaagacgctgctgctggtgtttacagattgaggcattttggtgcctccaaaccaatgtttggttcggtcaggcattttacaggaacctctcgtgctttcgcggtgcgttagttgatacgccttgagctttttatggcttatgaaggtttacagcaccaacttcatacatggaaaccctgccattatatccatagggcttatctgcttcttatttacttgtatttgagggtaataacactgttcaatcttatggaagtgtgaaactgctgtcccagtgcatgaactaagaatgggaaatatacagaatgtacataggtgctctttttatgt

SEQ ID NO: 19377 - DNA, 2334 bp, Oryza sativa
  ref <308>: DATABASE ACCESSION NUMBER: AK069739
  ref <309>: DATABASE ENTRY DATE: 2001-12-06
tgatggctgccctgtcgtccacgcgaccgaagaagcaaggcaagccctagccgccactcccgatttgcttcccagcccttgcggctcctgcgattcgatttggcgggaaattgctcgcgctctcgctcgcgccatcggttcttgaatcggagggattgggagcgggggggaaggtttcttgctttgcagccgaatcttgactggtccagtttcgtgacttacctagtgcccattcttcccgtttgagatttagaagcaagctttggatgaaaagcatcatctttagcttctttgatttgttgggtgaagggggctctcaattctttcgagccattgctgctcattcgagagctatcctttcaccggttggattggaggagctagtccataaatttgtataggaatctgaggaaagggcgctctttacggtgcccatggctgtgctggaggatttgatcagggcgattgagctctggctgcggattgctaaggagcaggtacccttggtggatccaacccttgacccggttctgcttgtccccggcataggcggctcgattcttgaagccgttgatgaggccgggaagaaggagagggtgtgggtgcgcatcctcgctgcggatcatgagtttcgagcacatctctggtccaagtttgatgcttccactgggaaaactgtctctgtcgatgagaaaacaaatattgttgtccctgaggatagatatggactatacgctattgacactctggaccccgacatgatcattggcgatgatagtgtttgctactatcacgacatgatagtgcaaatgatcaaatggggataccaagaggggaaaacattatttggatttggttatgatttccgccagagtaacaggctttcagaaacacttgatagattttccagaaagttggagtcagtttacatagcttccggagaaaaaaagatcaatctcattactcattcaatgggaggattgcttgtcaaatgcttcatgtccctccatagtgatgtcttcgagaaatacataaagagttggattgcaattgctgcaccatttcaaggtgcacctgggtacataactactagtctgctgaatggtatgtcttttgtcgaaggatgggagtcaagattctttatttccaagtggagtatgcagcaattgttgctcgaatgcccatcaatttacgaattgttggctaactcgaccttccaatgggaagatactccatatctgcagatctggagacagaaattggatactaatggcaagaaaagtgccatgttagagtcatatgagccagatgaagcaataaaaatgattagagaagctctttccaagcatgagatcatttctgatggtatgcacattccattgccccttgatatggatatattgagatgggcaaaagagacacaggatgttttgtgcaatgcaaagcttccaaaatcagtgaagttctacaatatttacggaactgattatgacactgcccataccgttcgctacgggagtgaacaccatccaatttcaaatctcagtgacctcttgtatactcagggcaactacatctgtgttgatggtgatggatctgtccctgtagaatcagcaaaggcagatggcctcgatgcagtggcaagagttggggttgctgcagaccaccgaggaatcgtctgtgatcgtcacgtgttccggataattcagcactggctccatgccggtgagcctgacccattctacgatcccctcaacgactacgtcatactcccaacagccttcgagatcgagaagtaccacgagaaacacggggatatcacatcggttagagaggactgggagatcatctcccatcgcgatgacgaaagcaagaggccagccgagcttcctcctatgttcaacacgctatcggcgtcccgcgagggtgaagacggctcgctggaagaggcgcaggcgacgatctttgttcatccagagagcaaagggaggcagcatgtggaagttagggcagttggagtcacccatgacggctagtcaagccagtcatacgaaaacacacggttgtcaactagctagtctgcacactccaaagcaaagtggacaatgtaaatataagacgtccctagctatgaactacgtgtaattttgctgccttgtaaataccagaactgaaaatatactgccactggatgatgatacgaatagaaaggagaaagaaaaggatgaacttgatatgttaaaattgtatcaggtgcttgaaatgttgttactggaaactgatcatcctgactcggttgatcaagcgatgagacctccgagttatcattgtctt

SEQ ID NO: 19378 - DNA, 2282 bp, Oryza sativa
  ref <308>: DATABASE ACCESSION NUMBER: AK069740
  ref <309>: DATABASE ENTRY DATE: 2001-12-06
ggcagccgcactcgcctcctctcctccactcctcctcccgcatccgcggaaaccctagcctcctctctctctctcctcgttcactcgttcctcgcgccgccgccgcgacccgcgagcgggaggaggagccatggcgccgaccaagggggaggggccagcgatcggcatcgacctcgggacgacctactcgtgcgtgggggtgtggcagcacgaccgcgtcgagatcatcgccaacgaccaggggaaccgcaccaccccctcctacgtcgggttcacggacaccgagcgcctcatcggggatgccgccaagaaccaggtcgccatgaaccccatcaacaccgtcttcgatgccaagcgtcttatcggcagacggttttctgatgcctctgtccagagcgatatcaagatgtggccttacaaggttattcctggcccaggggataagcctatgattgtagtgcagtacaagggtgaggagaagcaattctctgccgaagaaatttcatccatggttcttatcaagatgcgtgagatcgctgaagcttacctagggtcaactgtgaagaatgctgttgtcactgttcctgcatacttcaatgattcccagaggcaggcaactaaagatgcaggtgttattgcgggtcttaatgttatgcgtatcatcaatgagccaacagctgctgcaattgcttatggtcttgacaagaaggcgactagtgttggtgagaagaacgtgctcatttttgaccttggtggtggtacttttgatgtctccctccttaccattgaggagggtatttttgaggtgaaagcaacagctggtgacactcaccttggtggggaggactttgacaaccgcctggtgaaccactttgtccaagagttcaagagaaagcataagaaggatatcagcgggaaccccagggctttgaggaggctcagaacatcatgtgaaagggcaaagaggaccctctcctccactgcccaaactactattgaaattgattccctctttgagggtgttgatttctattccaccatcaccagagccaggtttgaggagcttaacatggacctcttcaggaaatgtatggagcctgtggagaagtgcctgagggatgcaaagatggacaagagcactgtccatgatgttgtccttgttggtggttcaactagaatccctagggttcagcagcttctgcaggatttcttcaatgggaaggaactctgcaagagcattaaccctgatgaagctgtggcatacggtgctgccgtccaggctgctatccttagtggagaggggaacgagaaggtgcaggatcttcttctccttgatgtgactccactgtctcttggtctcgagacagcgggaggtgtgatgacagtgctcatcccaaggaacaccaccattcctaccaagaaggagcaggtcttctccacctactccgataaccagcctggtgtgttgattcaggtctatgagggtgagaggacacggaccagggacaacaatctccttggcaaatttgagctgtctggaatccctcctgcccctaggggagtccctcagatcactgtctgctttgacattgatgccaacggtatcctgaatgtgtctgccgaagacaagacaactggccagaagaacaagataaccatcacaaatgacaagggaaggctgagcaaagaggagatagagaagatggttcaggacgccgagaagtacaagtccgaggatgaagagcacaaaaagaaagttgacgccaagaattccctggagaactatgcttacaacatgaggaacactatccaagacgagaagattgcttccaagctgccagctgacgacaagaaaaagattgaggacgcggtcgagcaggcgatccagtggctggacaacaaccagctcgctgaggttgaagagttcgaagacaagatgaaggagctggagggcctgtgcaacccaattattgccaagatgtaccagggtgctggtgccgacatgggtggtggaatggacgatgatgctccggctgctggtgggagtggtgctggccctaagattgaggaggtcgactaaatcaatacaccttcgtatatgtgatgagaaaaatattgatcatacaccttttgttttcaaatcccagttggcaatcataccacttgggctactcgtactttctgttaactaaagacttattatcacctgatgcttgagtttggacttctagtctcagattcgaacagacattcagtaatgtgatgatgtttcagtttttacc

SEQ ID NO: 19379 - DNA, 1052 bp, Oryza sativa
  ref <308>: DATABASE ACCESSION NUMBER: AK069741
  ref <309>: DATABASE ENTRY DATE: 2001-12-06
gattcaggttgcaggagaagccaggacgagaatccatggccatgggcgacttcctaccggcctccaccgccgctgccttcttcgtcctcttgctcggtgtcaatggtgcagcggccgtcaacttcacgttccatttccataacaactgcccggagaccgtctggccagcggcgctgtcctcggcgggccgcccgccgttcccgacgaccggcttcgcgctgccgccgggcgcctccctctccgtcgccggcgtcacagccacgtggtcgggccgggtgtggggacgccaccggtgcgccacgggcggcggccgcttctcctgcgagtccggcgactgcgggacggggcaggtcgcgtgcaacggcgccggcggggcgccgccggccaccctcgccgagttcaccctcggcggcggcggaggcggcgccggcgccctcagcgacttctacgacgtcagcaacgtcgacggcttcaacctgccggtcgaggtgcgcccggagctgttggagcggcggcaggagggcgccgccgccgcgctgtgccggacgacggcgtgccctgcggacatcaaccgcgtgtgcccgagcgagctggcggtgcgagcggcagatcgcggcggtgcggcggcggcggcggtggtggcgtgcaagagcgcgtgcctggcgttcgggacggacgagcagtgctgccgcgggcggttcgcgtcgccggacaagtgcgctccgagcgagtactcgaggctgttcaaggcgcagtgcccgcaggcgtacagctacgcgttcgacgaccggagcagcaccttcacctgcgccaacgccaccggctaccgcatcaccttttgccccgccgccgccgccaaaaactaactaatttagcagcctgcactgcaggccggcgatcgatcactcaaccgattgattagtactggaaggaacttgaattcttagaaagacggtgtagtcatgacgtatacatgtatgtttcggagcatctctcaagtttcgatcattatttggaaccttccatgggaataaaatgaatacaattttagc

SEQ ID NO: 19380 - DNA, 1764 bp, Oryza sativa
  ref <308>: DATABASE ACCESSION NUMBER: AK069742
  ref <309>: DATABASE ENTRY DATE: 2001-12-06
gtcctcctcctcctccgccccgacctcgctcgcccgcccgcctccgcctccgccaatggcgacctccacgcgggcgttgctcctcctccccctcctcctcctcttcctcctctcccgctccctctccctccgcgccgatcccggcgccgccgtgtccaggatcgccttcggctcctgcgccaaccagagcgcgccccagcccgtgtgggaggccgtcgtggggttcgacccgcaggtgttcatctggctcggggacaacgtgtacggcgacaacaagaggccgttccgggtgttcgggagggagaggacggtggggccgtggaggaacgtgccgcggttctacccgtcgacggaggccgagctgcggaggcgctacgagatggccaaggccaagcccgggtacgccaagctcagggagagggctcaggttattggaacatgggatgatcacgattatggactgaatgatgcaggaaaagagtttggtgggaaggtgacctctcaaaggcttctattagattttctggatgaagctgaagatagttcacggaggcagcaagctggtgtttatgcctcctacatgtttggccctgaaggaaaacgggtaaaggtaattctgttggacaccagatatcacagagaccctctatcaagtgatggagctgtactgggagatcctcagtggcaatggctggagagggaactgcatggtcctcgatcagagatcaccatcattggatcttcaatacaagtaatatcaaatctatctgccaccactggacctttgttctatgtggagtcatgggcacgctttccaagggaaagagaacgactgttcagactgatcgatagcagtaagagaaatggagtgttttttatcagcggtgatgttcattttggagaaatttctcgttatgactgtggagctcaatatccattgtatgatattacctcaagtggtcttacccaatctgttgagaattccgtgccatcagtatttcaaccacttatgagacttgtggctttgttgacaccaactaccttgcgagtctttagccctaactgtcgttacaaatcatgcacatatggtcaaccaaactttggagcaatcgaaatagattggaatgcagtgcctccccagattaaactcgaactaagagatgtagagggaaactctgttggtggtgtggagtttcctatatctgaactggatccatcaaaagcacatgccattacaaaacaagggcattcgtaccaacggcattgcgctctcgaaacagagcttccatggctagtgtggcaccgtcttgctctgttgttgtttggtacaattgctgttcttgtcatagccgtggtgttgctaggaattacctgcttatcagctgctaatattttcaccaagaaatccaagatggaatagccataaggtacagaggacagaagcagacacttcagtctaactacagatggaaaagctgatcacaccgtccatggacgttccagtgcctagaacaaccatgagatttcaataccaatataacccattgcgcagcctgttacgcatcacaagttttatgaatgtaactaacaatctgtatacgtgtatagcatgtttagaaatttctcatgtcaatttcgttgctttatggtgaataggatgactgttgtctattctctgacccctcttacatcattgaagtaggctccgtttgaacatgcatctgtttctgtttgaacattgaagatcattcgctttgtccgttt

SEQ ID NO: 19381 - DNA, 1368 bp, Oryza sativa
  ref <308>: DATABASE ACCESSION NUMBER: AK069743
  ref <309>: DATABASE ENTRY DATE: 2001-12-06
ggtcggagctccatttctttggcttgttcatcctcgagctccggccattccccccccccccccccgtacccatgcccaccttcttcttcatcgatcgcagatcagcggcgtcatcgccgccgattgcgatcgtgatcaacaagggacggcagcgcggcggcggcggcgaacagaggaggtagcgatcggtgacgaccttgccggacgtgtcaatggagtccatggatcatggcggcggcggtgctggcctgctcgcggtggctgcggcgccggcgccggcggcggtgctgacgacgatgcatgggcgcgagctgtcgcactcctcctgctccttctcgtcggcggccgcgtcgctgtcgtcgccgtcgtcgtcgacgtcgtcgaggagctaccacgctgcgatgtccggcaagtcgctgtcgtgcgagagcatcccggagatcatggacaagcagtcgtccttctcctcctcggcgtcgtcctacgagagcttcatccagctcgaggcggccgacctcgaccgcatcaccgcggcggcggcggcgacgcgggcaccggccgtgcagacgatgatggcgtcgcacgagcagcagcagctcgccgtcgccggcggcagcggagggtatgatccgaagaggctcccgtcgtcgattttccggacggggtcgacgagctccggcggcggcggcggcggcggcgactggagcgtcgcctccaacgactcgctgttcagcatcaacctccgccactccggcgacctcagcgcgcgctacaacagcagcaaccacagcagcagcggcgacctcttctacgacgcctccggtggagggttccaccgcatcccctcctctacctcggccgccgccgccgccgccgccgccggcggcggcggcgggggcgggggcctttgcgtgagcggctcctgcgccaggtgcaccaccatcgccgccggcaagaacaggaagtccgtccggttcgcccccgacgccgagatcgtctccggcgagatcaccaacccctccgccgtcttccccacggaggcggcggcgccggcgacggaagggaaggaggcggcgaagagcccggacgcggcggcgcagggagggtggtgcctgttccgatgctgctggccgtcgccgccgtcggtgtggtggcctcgatgcgggtgcggcggcggctgcggcgtgttctgctgcggcggcgagaattgccggtgctaaaatttggcgggagattgggggcattgcgcgccaatgtagggcgatttgaacgcgatcttggttttgaatgtgttgcgatgttgttgaagtgaaccgaccagaatctgcgtgtatgtagacaaggtttttattatagagatatttggtg

SEQ ID NO: 19382 - DNA, 2376 bp, Oryza sativa
  ref <308>: DATABASE ACCESSION NUMBER: AK069744
  ref <309>: DATABASE ENTRY DATE: 2001-12-06
gaatgtggtgcaagcggttagatcaacgatggacgatcccgattagcccgcctcgcggttcatccggagaatcccaatattctgaccgccaccgtgtccctctacccgccgtcacccctgggcttcgccgccggcgagcgaaccccgccgctccccttccgaatcccgggccgacattgcaagccggtgggcatcgccagttcgccaccgccatctggcttctgccctgaccctcccgctcggatcagcgcgtgttaccgcggcgccggatgaaccgcggacgccgcctgcctgctcgacggaatgcctgagtggagtgaggcacgctggcgcatgttccaaataatagatgccaactgtgagttgaggttcaatgcataggtcaccgcaagtccagcaatgcctgcatgtacaatatataagtttgaaaacagccaacatagagtgacttaatgcttccataatcaccaagagcctaagttcttcttagagcttacttggatttataaaaccttcaggaaggctcactagcagggtcaaagagaaagcaaagacaaagttggataacatgtttagcctgaaagaaagccattccattgaagaaatgttatggaaccatggccgggagtgattgtcgacaagtccaaggatgggagccctttggatttgtgataagcgagccaattctcttgctgttggtatgtagtatcgctgcacattacacagagtatatggtttcagtattttgtgaatgaacgctataatttatggagaaaaggtgtacctatagcttcttggaactcatcgtggtgcacagagtgacttttgcacatggtgctatggtagtacaaaaggctagtaataaagtttttttttcttgttgggagttcatacctgacacatgaaacagaccaccgttactggaacgaagatggcaaaaactggccaggcaacctgggacataacaccaatggtccccagaatttgtatgactgaaaatacgcaccaaccaagcttgtttgctatttccagatctagaacactttggtcattggaggcctgttaaagcataaatacacacctattagtttaggggtggagagagtacgtgatgcagtataaaatggtttacaaactaagtcagtcttaaccctgttcagaattcttccagtaggcgtggagtcaaagaaggacattggggctcgcatgatgcagtggagcatgttcttgaagaacttttctgatgttagtagcccaattagtgaaacaagcatggaccgagcaaagacacacaaggcacttccaattgacaatgctatgtatacggcaaacatgagccctaatccgacagttggcctggttgctgatgttggaggagatgcccatgccatccaatagttgcttgctacctgaaatatttggaagaaggactgtgctgcgattgtgactggcactaaggcacctccataaactgccctcaggataggcggagtcccttttgatagatatgtgatatcaaagccgcccgcagccgcatcccgagctgtcgagccccgaaaatccattgtctctgagcaactgtttccacaactttggcactgagaaaagcaacagccagaagaaactgaaccaagatactcatgatgaatatcaggtgtatcagtgcaaaagcgtccatccagaagcaagaggcaggaaaaaagaacaagaagggaaaaaggagaaacaaagataatagcagagaaaacccatgcagtgcaatcaaactcatggatgtttcggcggggaggaatcagacgtatgcatgaaccaatctctgcatgcagatgcagggtatgattaaaccttacttgatgaatcacggagcaatccccagcggagaaacgcctgctgcgccgtctcgggaatcctcgcgagaacatgcaagtgcaggctcgctccttccatggcgcaatgcgaatgagacaggggaggaggagagagggagggagagatgggcagtggccgtgaactggtgacggtgatatagaaggtggggaggcctgagtccgcgctagatggttacgggttttggcgtatcacggtacacggtgacagagatccaaaaatacggttttcaccccggtaaggcctggttcagttaatccctacgagatagggattggaggggatttattccacacctattgtgatgtggaattattctctctcaatcccctctaatcctctttaatccccacaccaccgtagaataggggctcgttcgatgggaaattgaagtgatatgcatcatatagtgcatatttgggtctacattaactatttttctacgattataatgtaacatgaaagtgcatatgcacacattactgatcg

SEQ ID NO: 19383 - DNA, 2042 bp, Oryza sativa
  ref <308>: DATABASE ACCESSION NUMBER: AK069745
  ref <309>: DATABASE ENTRY DATE: 2001-12-06
ggggttggttttctccgcccgcgcgcgggtgctgcctgcggtgcggggcgcgaggatctgatcgggactcgtgccttccgccatcgacgcgccgcagtgacggagccgcctggtcggtcgcgccacccggaggccggatccgcagggcgctggccttgttgattcaattcgctggttctatatcttgtcaacttggatttggtaatccctggaactaaaaaggccattcaaaatggtggttcttgcagcttctattatatcgaagtctggaaaagctcttgtttcgagacaatttgttgacatgtcccggataaggatcgatgggctgcttgcagcatttccgaagctggtcggaagtggaaagcaacatacttatgttgagactgaaaatgttcgttatgtctatcaaccaattgaagcactgtatttgcttctcatcacaaataagcaaagtaacattcttgaagatctggatactttaaggctactctccaagcttatacctgaatatgctccctctttggatgaagagggtgtctgtaaggcagcattcgagcttctgtttgcctttattgaagccatttctcttggaaacaaagagaacgtaactgttgcacaagttaaacaatactgtgaaatggagagccatgaagaaaagctgcacaagctggttatgcaaagcaaaataaatgaaactaaggatgtcatgaggaggaaagtcactgagattgagaaaagcaagactgatagagggaagcctgacaagggaggatttggatccttgagaactccaaacagcttcagtgacatgggcattagaggtggtggtccagggggcgatcctatatttggtgatatggactcgttcacccacaaggccaaaggccgcccatctgctcctgctcctgcatctgcttctactaaagttcctggtggtatgaaattaagcaaagcacagaagacaaaccagttccttgagtctttgaaagctgaaggagaagtcattttggaggacactcaaccaagtgcaactcaatcaaggtcatcatatatcccaccaagcgatcctatcacagtgacaattgaagagaagctcaatgtcactgttaaaagggatgggggagttagcaattttgatattcaaggaaccctggctctccaaattctgaatgacactgatggttttattcagttacagattgagaaccaagatgtacctggccttaacttcaagacacaccccaatatcaacaaagagttattcaacagtcaacaaattgtgggggcaaaagatccaaacaggcctttccccagtggtcaaaatgaaacaccgttggtgaaatggagaatccaggagttgaatgagtcatctcttccattggcagtgaactgttggccttcggtgtccggaaatgaaacctatgtgaacattgaatatgaagcttcagagatgtttgatttgcacaatgttgtcatctctatccctctccccgcacttagggaggctccaggtgttaggcagatagacggagaatggaggtatgactcaagaaattcagtgttggagtggtccattattcttgttgatcaatcaaaccgcagtggttctttggagttcactgtccctgcagctgatccatcaacattcttcccgatatctgttgggttttctgcatcaaatacatttagtgatttgaaggtgaccgccatccgtccgctgagggaaggtagcccaccaaagttttctcagaggaatcgattggttacttataactaccaagtggtttgacgcgcaaattaaagttagtttgttccagtcaagtaattgcgcacatttgcagtacataggagcttctgattttctgccaagcttagatagcttgctcagtgagttgtcccgacgtggataaatatgtggtatacgtaatgcatgctgtttttcctttacactgtaaaatgttaccccaaagttatgctttttactggagtgttacagaattgttttttaagaatggaatataaaaatacgaagagttcatcct

SEQ ID NO: 19384 - DNA, 2478 bp, Oryza sativa
  ref <308>: DATABASE ACCESSION NUMBER: AK069746
  ref <309>: DATABASE ENTRY DATE: 2001-12-06
gggaatccagatctcacccaccccaccccacccacacgacgagagaccaaaacacgcgggaaaacgctcccgcgccgcgccaaacctggcctcgcgtgaaccggcggcgggcccaccgccggcgtgcgcacacgtgccaccgccaccggcgtccagccggaccgacgacgacgagggcgacgacgatgtcacggtgttggtacagtgccagccgacgctgaccagccgggcccacccaccacctgcccccaccaccgtgctgcttgcctgcctctttcttgtctcgctttcttgagctcgtctcctcgtgctctctctctctccttgctgcgacctttgccttcgatccgacgacgacgacggccgccattgccgattgcttcccggcgcgctgaaggaaagaagcctcagggaccaagatctcgccgtcggatcgccggctgccgcctgaagatttgtgctgtcaagttgatagaggacaaggccatgggtgtcgaggcagatcatggtacgccatgtataaggacgatcttgaggtgttcaatcaggatgagctacagatatgcttctgaaaactgggttctcctcttcccggtcctgctgctctacctgctattcagatcttcgccgggtttcttcgctttccttctgtcccactctcctgtaatcatatgtgccgctcttatccttggtgtgctgataagccatggcagcacaaacgttgctgagatcaaggaagaacggaaatctgtcgccgaggtttcggatcccaagtatgcagatttgtccaggaatatccatttggaagcaaacaagggattttcggcaaaagagaacacggcgagcttaaatgacggtgaaatcaaagatggcttgaattcttccagagaagatgctatcgaagttgttgagatggtgggcaagataagtcatgatagaggatcaacagattcacagagtgatgagatgaaagtagattcagaagataaaccggctggtacctgtaaatggggccgtgccttttctgttcgtcgcaggaagaagctttctgatattaaggtagagcctatcaatgctgctgtggacagtccattagactcatctttggattcaccatttggtagagttggctgccatgatggttcaccaggttttgatcatgatcagacagagggtaccactcctggtactcctagaacacgcattgcttctgtcctggacgagattgaccctctttccagtgctgattccccccatcctgatcccatccaaaatgatgactcggacaaccacatgtcccttcaggattctagaactgtgagagataataattatgaatctgacaagagcaaggccaacaaaaacgatgacaagaatgtcagcactgatcctgcatttcttggaaccgtagatgatgataagaatgtcatggatcttgggtactctgaggtggaaaggcatcgtaggttagagatcttgatggttaagagaagatcaaggaagaacatagtatttgatcctgacagtaacttagacatcgataatgataaggtttgcaagagaaacccatctgatattctttcttgttctgatgagacagaatttcctggctcagctccatccgttctgcatacatggaggaatccgtttgatcatccttttgagcaatcagatgaaagtgatctacatgaacatgtcgcaataccccaccaggacatgttcttcacaaggcatgaaagcttcagcattggcagccaggggagacgtccctcaagatttaagccaccttttatcatcgaagcaatggacattgatgagccaagtgcaagtgatttccagagacaattcagtgacaaaagtgcgtctacattgagtacagttactgaatctgatatcatttcttcagttgctgatcaagaggacataagtaacaacataaaaaatgactctagtagagagtatgaatcaccagagctacctacaatacctacaatgggaagtgatattatatgtgttggaggcacatgatcagatgggataaatttcttgaacaatggaactctgaatgctatcactaatggggccacaacagaatcatgtacctctatgcccattttgacgaatccgtgatacctccccgaagcattcgaaaatctctctgatgccattgccaagaatgttgatgttttagcgaagatgaactgcactaaagtgtgcatagcagacgtactgaagcctttgtcagtttgggacagcgaagagtttgtcatgaaagaacagaggagcctcatccgagcttgtatagccttttgcttgtgatgtaaacgttttctttattcttgttttcatgtgatgaaagatttgcattcttcagatcaatttgcatagttcagaacacaaggttttgctatgcattgttgttgtgtatgtaactggatgatatattacactattactgcacatatcattcttttgaac

SEQ ID NO: 19385 - DNA, 3007 bp, Oryza sativa
  ref <308>: DATABASE ACCESSION NUMBER: AK069747
  ref <309>: DATABASE ENTRY DATE: 2001-12-06
ggtgtagcccgtaggcaacttgaagtcgggaagccaagccgccggcgccgctgccccaaccctaaccccgatcccggcaatcgacgcgccgcccggcctaggtgccacgggcggcggccgccctctcgccccgcggaaacgccggcgccgcctagctaccacgggcggccctccggccctcgcctgtggcttcctcgccttcgctgccacgggaggaccggagctttgagtaggtgcgccggcggtgaacgggagcggtggaagcagttacccgcaccgccatggacactgtcctcccctccgctgtgcctgactcagcggctcctgtcgctggagattcagggctctcagagcagcagctgattcaatatatacactcgcttcgggaaaatcaagttgttgacggtttattcgaagatcttaaaaaagaaaaacatatgagccttacaaagcttgctcatatacttaaaatcactgatggattgtctaacattaatatcgtggagagttctgttgaacctaagacaagagcattgttagagggaattcaacagaaagtatatgatggcataggtctatgtccatccattggtggatcattttcggagttattgggtagtctatctctcagtgctactatcactaaagatctagggtctatggaagtgaggcatttgaaaaagccttatccattatgtagctattccattggttttgtgttgccctcctgaattctccaagaaattggcaatcaagtttgtacaacccatgttacgacagtgtaaatttgtacttaattttgcttggttcaatcatttatacaaagggaaagctgaagtaccattcctttctgaatttggtgagacagaaaagctacagcaaaaattactacttgatttcactcgtggagtttcagaatttcttggagtattggcagtaacagaagaaaactatttgcaagatcctgaatctatgtcatcaatctctctctttaggtttattttaactggtgattgttttgactggctggatatgagcctctttgggtactttgtggatgatgaagcaacaagcaaggctattccttttttacgttctctcattcaccttgcaacaactgatgatatgagtctcaggctcttcatcgtggatgatttgcttccatctatagttagacgtctagacaatcagcttacttgtgcaatccagtgccaaagacacaaactgaatccaggtgcagctgatagtgctggcaaggaccttgttgtcctttgtcaacaattgtataattattttcaaatccaggagttttctagagaaggcaaagacaattgtagcgctgaatgcagctttagcgtctggattggaaagctgaagaaagatcttgaattaaaggcgtcttctgctagtaaggaacttcctgagggttgtgagtggaattgggagttcgaagaagaatttcagaggtaccttcatgtttatatggacatcttacaagaagtgaatgcaatggatgattgtatggagcgtgattatttggacaaagaaactctcttccagaaattgaaatttgaattcagatataagcatgccatcaacagctatcaacatccttatatggtgaccattttcttctctccgacaacgacaattttacacaaggacttgcttcagatgcaacatgcagatatgtaaatttcttagcgaacttgtcaaactgaaaccctacattaaggtttctgattgttcttatgatgttattgaaaatctcaaacaaaatcatgagatacttactgagatttcagactgtgaagtggtaccatcagttgatcttttgcttcattctgtgttgtatatttgggagcctagatttcatcctttgatacgtgagagccacttacacatacttttgggaataattagtcgattaaccaagtcaaacgaagtagatcacagtcagcaactagtaccagttgttggtgatttcccttcacacttacagccttatgcgtatgcatttgttgacaattaagtttagagattccatgtattatactgctgtagagcaaatacgcttgcacaaagagtttgacaattatttgtcctctggtgaactggatcattctatggatgagtttatttcttcaaaggatgaatttgtagaagatctcattagagacgagagcacgatggcacagttttcagatttgaatcatgctctcttgaaattgtctttggagaggagagctgatgttctggaaaatcagcaacaaatttgcatatattcagaatgtttacgacacctcttggaggatgagtcgctaaaggattatatcaaaaggttgatgaatgatcacaaaacgggaggttttttcgacacgaatgatgattctattaactgggacaagaaatgcttttcagatcttgtagatgaattcaatgagagagttttttctgggcattcccttcctaagcattacatgatcagaggaatcattgattgttggttaatcttcacgcggaagggtaactcttggcaagatactttcgaagaggtggttgttgaagcatgtgaaaggtggactgaaaatcgtgagaagatactatgagcaccactactatgacattgttagacgacccttgcaagaggttttttcctcgtttcttccatcaatagaatctcgccgttagcagctaaaaagtgaagatcgccctgcagatgagtgtagcctgtcaaggagccctcaccagggcaacaatgccatattttgatatatatccggatgtgactccggctcgggcgcccgatgggaggaggttaaaatcggcgcctgatttacgtgcaaaactattttaaactgatttttctcttaaattacttatccaaataatgatccgattgcaccattaaattcgttgtaattaaatattcgaaacaagatcacacgtggatatattccgacgaaaacaaaatttagcttattattgaattatttttaaatgttgc

SEQ ID NO: 19386 - DNA, 1736 bp, Oryza sativa
  ref <308>: DATABASE ACCESSION NUMBER: AK069748
  ref <309>: DATABASE ENTRY DATE: 2001-12-06
gtgagcttctgtaggtgtgatattctcttttgatcttatctgatcgccggtattgagcaaggattggggtttggggtaaggatagcgaacacaaatgggaattgggaatggatcaccaagtgacagcaggcatgtgtcacacaaggaaatacgagatgagaccacaccgcttctcccaattaaggaagaggaggaggggatccatgagttcaatggagcttctttctccggtgcagtgttcaatctgtcaacgaccatcgtgggggctggaattatggcactgccagcgagcatcaagatgctgggaattatccctggtatcctgatgatcatccttgtggcgttgctcactgaggcatccattgacatgctggtcaggtgcagccacgagggcaagattacgtcctacgggtggctgatgggtgaaactttcggtcagtgggggaggatcgcgctgcaagcatctgttgtaataaacaacattggcatgatgatcgtttacatgattatcgttggtgatgtgctgtccggaacatcaacaagtggtgttcatcaccgtggcatcttcgaggggtggtttggacctcatttgtggaattctcgtccggttgttctccttgctacgactctttttgtgtttggtccattggtgagctttaagcgtttggattcattgagatacacatctgcactgtcagttgctcttgctgtggtttttgttgtcatcactgctggaattgcgattgtcagactcattgaaggaactgtggagattcccaaactctttcccgagttagatggaactaattccatctgggaactctttacagctgtgcctgttgttgtcactgcctacatttgccactacaatgtacatagcatcgacaatgagttggaagatagaactcaaaccaagccaattgtgcaaacttcactggctctctgctcaagtgtgtacattgcgacaagcttctttgcatatctcctctttggcgagggtaccctggctgatgtactcgccaactttgactccaaccttcatattccattcagctctgtcttcaatgatgttgtgagagtgagctatgtagtccacatcatgctcgtctttcccatagtcttcttcgcccttaggctcaatttggatggactgctcttccctactgcaaggcacatttctcgtgacaacagaaggttcgccattatcacgggatcactccttgctgtaatttatcttgctgccatcttcataccgagcatctgggacgcgttccaattcaccggtgccacagctgctgttcttatcggttttatctttcctgccatgatcatactcagagatccttatggaattgcaaccaagcgcgacaagattttggccttaaccatgattgtgcttgcggtgctctcaaattctgtggctctatacagcgatgcactgaacatcatctttcacaggaaagtggaggcctaaaactccatacttcgagcgacaaagtggaatgtacagttagaatgatttggtgagtttaaattagtaatacccagcaaagcaatgtgattttcggtggtagccattgatttttattctggacacctgaaaggatttgatttgctgcatttgtctagtttcctgaacataagctggttcaacatttagaagagccacttgtgaattgtgatatggttgcggttgtttgtatctattccgccaaaaagaatttttctttttgtcc

SEQ ID NO: 19387 - DNA, 887 bp, Oryza sativa
  ref <308>: DATABASE ACCESSION NUMBER: AK069749
  ref <309>: DATABASE ENTRY DATE: 2001-12-06
gacgcgtgagttcgtgacgcgtcacgccccgcggccttcccctcccaaaaagcggcaggacgcaacctgatccccatcccccgagcaagcaaagcggaggaacgcgatggcgtcggcgctgctgaggaaggcgacggtaggcggctccgcggcggcggcggcggcgaggtgggcttccagggggctcgcgtcggtgggctccggctccgacatcgtctcggcggcgcccggcgtgtcgctgcagaaggcccgctcctgggacgagggcgtcgccaccaacttctccaccacccctctcaaggacatcttccatgggaagaaagtggtcatcttcggcctgcctggtgcatacacaggagtctgttcacaggcacacgtccctagttataaaaataacattgacaagttgaaaacaaaaggggttgactctgttatctgtgtctctgtgaatgacccttatgccctgaatggatgggcagaaaagctacaggcaaaagatgctattgaattttatggtgattttgatgggagtttccacaaaagcttggatttggaagtagacctctctgctgctttgcttggccgccgttcccacaggtggtcagcctttgttgacgatgggaagatcaaggctttcaatgttgaggtagctccttctgacttcaaggtttctggtgccgaggtgatcttggaccaaatctgatccgagtaacgaaattctgtcgttgtttgttttctcatgcagcatgcatgcttttgctgtagtaaataaacgaaaactcgactactcgagtatccatgcaaagatgtttgtagtctgccttgctacgcccagaatatttgttttcctgttacaaatcagcttgccggtcaacatgtttgtcagc

SEQ ID NO: 19388 - DNA, 2962 bp, Oryza sativa
  ref <308>: DATABASE ACCESSION NUMBER: AK069750
  ref <309>: DATABASE ENTRY DATE: 2001-12-06
ggccgtctcctctcctcacggagaactgactcgaaaccgctgagaggcaacagagaaaccgcacggactgaacgaggcggcggaaataaaacaactcgaggctggaggctggctggcttccttgccgctgcccggctgaaaaagcccccgaagcagaggcttccggttgaagcaaagcaagagcgcgagggcgccgtcgggcatggggatcgtggagacgtggatgcgggagaagcccatccgcaccttcctcgcccagctctccacccgccgggcggcggcgggggccgcggccctgctcgcttcctcctccgccgccgcggcgtccgccgacggcgagcccggcgaccggagcatcccgcagctctcctccatcgccaactccgtcgtctcccgctgctccaggtctgaaggaggtcaacagaacacaaacaaataaaggcaacaacctgtagcgttgcaggatggttaattaatgcaataatcactgatcaagcactcatgctaacttgttaaggggagtactgagaatcatatgctagccacaattggatcaacttccatagcttactattgtctattgtagttatctttaatttttaaatacactgacatgatcatgtttctgctttgtttgaccactcttatatgatttaagttgtaatttcttgttatgcctgacaaacttctaacaagtttcttctcaaattaacattttcagggttcttgctcttgcaaccgaaaccttgcagcaaaactttgaagttgactatcccgatagttgtaaggagtctaatacatatgcaaaggaatttttagagtactgctgccacaaagctctccatgaagtaactacacgtccagatcatttggctgataagaatcttcgccgtttaatgtttgatatgatgcttgcgtgggaacacccaggtgctgttgttgaggatgaattatcagaaaatcattctgctttgcgtacaactgtggatattgaagatgatgacgagggatcaattttttatgcaaattccacaagattggcggttcaagtcaatgacaagaagacagttggcttaggtgcttttgcacgaatagcaccttcatgccctataatagctgacttggttactgtccacaatctgttcgatgcactcacttgttcatctggtggccgcttgcactttttcgtgtttgacaagtatatcaaaagtttagacaaggtattcagatctgtcaaaggtatattgcagtcaccgcttgcttcaagttttcatcttgatgctggggaatgtatcttagctatggatggagacaggcctattcatcctgtttttcaacacattggaatatcagcatggccaggaagattgattcttacaactcatgctctttactttcagagtatcaaagtgggttatggtgacaagattgttaaatatgatttagcaacagattctgatcaggttatcaagcgtgattttactgggccattgggtgttcgcctgtttgataaggctgtgatgtacaaatcaagcactttaacagagccaatttattttgacttccctgaattaggaggtccctcacgaagagactattggttagcaatcgctcgtgaagtattgcaggtgaataaattcatcaggaagttcaatcttgaaaacgttcagagagcggaagcactctcaaaagctatcctgggcatcttgagatactctgctgtgaaagaagcttttcatatttctccttctcactttaagacaacactcacttttagcttagcagaaaaacttccaaaaggagacatggtcttaaaagccttgtatgctaactactttcaactgttggacacttcgttgagtcatttggtgactgagtcacccgttgacaataggctgcagaaccattcattaccattttcattatatgctctctctagaatgggatttatattactgaagagaaaagatgaagctcaaagtgagataagcttttgtgctgtttgctttggtgtaacaaaatctctagaggctgctttggaagagtcaatttgttactctgagagaatagatgcagcacgtgcaactatagatcaagtaaaggtggaaggtgtggatgcaaatcttgccctcatgcaggagttacttttcccattcactcaagtagtcaaactcacttactcattgaccaagtgggaagatcctctgaaatcatttctgttcttagcttttaccctgtatgttattcaaaggggatttattgcttacatgttgccctcattttttttggcatttgctgttgttatgctctggcataagtacaatggaagggagcaattattgggagtgcttgaagtaagaactcctccaagtaaaaatcctgttgagcaaatcttgaccttgcaggatgctatatccaagttggaagaaactctacagtctgtaaatattgttcttctaaagttcagagctgtcttgtttgcagctgttccaaagacaactgaaatggtcgcagtggcatttcttgctgcatctgcatttcttatctttgtaccttggagacatctgctcctgattgcagtcctggaggtgtacacaagagagatgccgctaaggaaacagaacactgaaaagttccgccggcggattagagagtggtgggcccgcattccagccgctcctgtgcagatgatcaaacccaacgaaagcaagaaaaagagatgacaatgtgctccgtgctgttgcaaagagctcacaattttccctgtttcccattcctatttttcacctgaccagctaacctgtacatatctcaaaccctcttgcctcattgttacagagatattcttactgatcaaagctagccaaactagtaatcaattcaatgcatagtgccattgctatgagtgtacactgtacaaatatatgatcgaaaacaaattaatgctgtattttctttcgtt

SEQ ID NO: 19389 - DNA, 1218 bp, Oryza sativa
  ref <308>: DATABASE ACCESSION NUMBER: AK069751
  ref <309>: DATABASE ENTRY DATE: 2001-12-06
gagaaaaacatattcagcacatcgccggctcgcctctccgccgccgccgccgccgcagtcgccgccgcctgcctctcctcgccgccgtccgatgcgggccctcctgcgcgccgcgtcggtgctccgccgcgcggcggctccggccctcggcggcggccgcgccgcgccgcttccccccaagaacttgcctgctgtctgtttgaatgggtattctactcttttggctccagcaaatgaagtgctgattccacaagaacttctatccagcaagactgtttggactccagatcgtgagcttgggcagtatgaagacctagtagcccgagtaacaaacttccacaatgaggataagggcttcatggttttagatggtgatgtttttgatgttccaatcaggaaggatattgttcatagagtagtaaggtggcaactcgctaaaagacagcagggaacacactcaactaaaactatcagtgaagtgagcggcacaggaagaaaaccttacaatcaaaaaggaactggcagagcacgacatggtacactgcgcggccctcagtttcgcggtggtgcaaccatgcatgggcctaaaccacgaagtcatgcgattaagttgcagaagaaagtacggcgtctgggacttaagatagcattatctgctcgaaccgctgagggaaagctcttggtctttgatgacctcgaagttcctagccacaagacaaaaaacattgtgcagtacattggccagatggaaggcacaaagaaggttttgttggtagatggaggtgacattgataagaagttaaagctggctacccagaatcttcactatgtgaatgttcttccatccattggcctaaatgtatacagcatccttcaacatgacactcttgaaatgacgcggaatgctatcaatagaattgttgagcgtatgcacacccccatcagccgctagcatgttgagattcgacgtgaacaccactgttttgtagcagatgtacttcgaccccctaaagcttcatgcatgccagttttcactttgctggtgtaaggcattagcaacaacacaattttccttttcctttttgaaaatgatctatttgcttctgctagtgatttcagtgaaccatgttgcgtcagatccaatacatcaaagtaggaagtgaattggtcatcatggtgtgcgctcatgactccagatttctaataaagacagttctg

SEQ ID NO: 19390 - DNA, 2486 bp, Oryza sativa
  ref <308>: DATABASE ACCESSION NUMBER: AK069752
  ref <309>: DATABASE ENTRY DATE: 2001-12-06
ggcttgccttaaacgggcggcgtgacggggacacactgccgacgatcgaacgaacgaacgaacgatgcgtccctcctggtgctccgtcgtcgccaccccagatgggtctccttgaggacctcctcctcgccccgcgcgtcgacggcggtggcggcggcgacggcgaggccatggcggcgcccgactacgccatccctcccctctccccaaccgccgcctccgtcgtccaccgatgcgcccggatcgccggcgtggaggtggagcagctgctgcggcggttcgagccggagaagggggaccagccgctggcgtacgccaggagcgtcgtggggtactgctcctacattgccctgcgcgtcgagaccaagcgccatgactacctcagcgacagcgagttccactcgctcacctacgacatgatgatcgcctgggaagcccccgacgacgagacggacgccgcgttgcagaaaatgtcatttagcttcgttgacggcaaggatgacgacgattgtgggtccatgttctgtttgagccccacacaaatggccattcaggttgatgggaggagaacggtcagtcctgaagcatttgccaagattattcctgcgtgtcctgcaatggcacacgcgatcactgttcgcaacttatttgatgcgctcacaaactctacgggaggccgcctgcattttctcatctaccataagtacctcaaatgtttagacaaggtgctgagatttgcgaaacgtatatcaggtggacacaaagctccagctcttcaactttctgatggagaagtgatccttgatatctatggtgccgcgacaaccaagccgattcttcaacacattgggacgtccacttggcctgggaggctcacactgacaacccatgctttgtactttgagccagtcagtgttgatttctcatacaacgaggctgtggtgtatgatctgtcaagggacttgaagcagtctataaaacgtgaatcaactggcccatggggtgctcagctatttgacaaagctgtatgtacaaatctagctctacaagagagccggtgttcttcgaatttcctcaattcaaaggtcacgctcgtcgagactactggtttgcaatcatcaaagaggtgttgcacgctcacaagttcattaggaagtacaggatgatcaatttacataaggccgaggcgctttctgttgcgacactaggaattctcagataccgcacggtgaaggagggattccacatactgcctgcacatttcaagactacccttgccttcaatttggcagagaaattgcacaagggggacaagatactggaagcattgtatggtcagatgaaagattattcctcaaggttcagagtagatgaagattctgttcaaagcagttcagatgatctgacgcttgctgatcctttcccactttctgcatatactttggtgaacatgggtttgttgacactcaaagaggaggacaatcccgaggaatgggatctcactgtccgagatgtgcagacgggaggaactagctcagtgcaaatggctctagagagatctgtaggttactctggcagagtggaggctgcgagggcgacccttgatcaggtcaaagtggaagacatcgacactaatgtggctgtcctgaaggaactgctatttccgttaattgaaataggcaaaaggcttctctttttggctgagtgggaagatccacttaaatcatacgtcttcttgttctgtttcctcttcatagtttacagaggctggatttggtacattttccctgtctttctgcttggttctaccatcttcatgctatggcaaaggcataccgggaacgggcagatgataggcgcatttgaagtcacaactccacctaggagacgaactgtagaacagctactggcgctgcaacaagctatctcgcaattagaggcacaagtgcaagccggaaacatttttcttctcaagctccgatccctcctgcttgcagcgttccctcaaagcacgaacaaagtagcagctacaatgctcgtggcatctgcgatattcgcgtacctgcccttgagaagcatacttgtactgattgtgctggaagcatacacgaggcatatgccggcgaggaagaagagcagcgagaagttggtgaggagactgagagagtggtggctgcgaatcccagctgctcctgtacagctcttgaggcctcaggataccaggagatggacatcgaggttgagatcgagatgacccacatcggaaatgtcggtactttacacatgtattatatgtacctgtaaattcatcatgttgttagaaatgttgatatatacgatcagatttttgtgttgaaatggaaagtacatattgtgcaaaatggaattgtgggtggatcgtattttgtattgtgaatttttgttgaaagctgcactgaaggaatttggctgtctatcctatgcagtagctactatgcatttatttg

SEQ ID NO: 19391 - DNA, 1067 bp, Oryza sativa
  ref <308>: DATABASE ACCESSION NUMBER: AK069753
  ref <309>: DATABASE ENTRY DATE: 2001-12-06
ggtcccaccccccaccgccgcggcggcgatggccgccgccgccgccgccaccgcgcgctcctcggtggcgccgcacgcatcgcccacccttcgccgctcgggctcatcagtggatcgctgcacttcctgagagttcttttaaagatattaccgtctctctcaacgcttaccggaattgcagattcgatctatttgcttcgactgcaaaagcaggctagagctgcggctgggtgcatcccatccactcatttttcagtggccatgctagcctgctagggatcacattgggaagggaaacaatcaaataatccgcggtggtctcagctcagctgcatgtgtggaggacaagcaaatcgccaataacacaccacatggggcaacatcgcgcagacatggcatggaccctgcttgccatctacccctcaccgtttcaatgcaccagagttacagcggcagcaaggaggcccccccattgcaattgaaatggccacatgtggagactgccatatgtttccatcagagatgatctctcagttacagtaagacacatccaatttcgacttgttaccctgatgaaggaacaagaagaagagaaagaagtgagtgtggcagacagagacagcagcaacccgggcagacagctccacgcacatttcacacaaaagtccacactccaaacagctccgtgtgcagcagcagcaagcagcaggccagcagcttccttggtcagatttttccatctcgtccaattccatcgcgttcagtttactgaactttcgactgctacttcggttcaggctttgtttcgacgccctatcggacctttgactgacgtgcttgcttgttaggtcgttcagaacactgcaactactgtatcgtcacgtcgggttttcgcttcgcttgcacctcagctaagaatgatcatagcttcatctgtagttacctaaattaccgaactgtaaatttcatgagattgcaggttcttcgacagtaaaattatcaaatttgtacggttggaaggattttcagttaattaacttataatgttacgcacgaaattttcactg

SEQ ID NO: 19392 - DNA, 1232 bp, Oryza sativa
  ref <308>: DATABASE ACCESSION NUMBER: AK069754
  ref <309>: DATABASE ENTRY DATE: 2001-12-06
gactctctctcagtctctactcctagctcgagctccaatctcttgctcactctctgctcagttgttcagagctgcgtggctagtggggaagtggcagtaatgccacaggttgacctggagagcttggtgtgcggcgtggcgggcgccggagcgggcgacaggaaggtgtcgtgcgagacggtcatcgcggcgggggagagcggggacgcgtcgccgccgcggatgccgccgccgccgccgccgccggaccccgacttcccgccggagtcgataaccatccccatcggcgacgaggtggccttctcggagctgaacccgatatacgaccgggacgactccaccaagggaagcaccaaccccaagtcggcggccggcgcctcctccaaccccatcccggccaagtcgcgctccaactccacgcgcatcgcgggcgcccccgccgccgccaccacgttcttcggcctccccgcgagcatccgcccggcgttcacccggcgccgcccgtcgcagggccggagatggtggcgcgggttggtggccgtgctcctctgcggcggcggctgctcttgccaaggaggaggacgacgacacgccaggaagaaggtggcgttggatgaagaccaccacgacggggacgacgacaagcaggccggcatcgcggcaatgcggaggttcaagtccgggagacgaaccgcctcatgggtagaggaggcaatagcggcggcggaggccgccggcgaggaggagcagcagcaggagaacgacgccgccgccgacgacgacgagaagaagcaggaggtcgagcgctacgagcctacgacactgaacagtgggccccacgacaggtaagtaggttgcagcagaggcgggagaagcagtggtagatgctggttggatttggatacgatggtggggccccgctgtaagtgaccctgcgtaggttcgggcgcgatcgccgataggtgaggtgaagccaaagccgtgtcgagttgtatccatcagattcagcgacgagccgacgagggatgggcgcgggatcatgcatgccgcgatggtgattggtgaatcgcctcgaaatgggagtcttgaaatttaccggtggtgttttttgctgttttggagttttgcacttggggatcgggagtgtttgcgtgctgtggccaatgatcgccgttgtactgtacataacccaggaaatgaataactggaagcgcacaatgcgctgttccatt

SEQ ID NO: 19393 - DNA, 1023 bp, Oryza sativa
  ref <308>: DATABASE ACCESSION NUMBER: AK099108
  ref <309>: DATABASE ENTRY DATE: 2002-08-28
gctgtctgtctgtacccccgccgcggctcacctggaaactgggcagattggacaatcgctcgagcgagctagcgagagagagcgcgagagagcgaggcggcgcgcgcggtggttgcggatttgtagcttagagcgcggggccatggggaggtcgccgtgctgcgagaaggcgcacacgaacaagggggcgtggacgaaggaggaggaccagcggctcatcgcgtacatcagggcgcatggcgaaggctgctggcgctcgctgcccaaggcggcgggcctccttcgctgcggcaagagctgccgcctccggtggatgaactacctccgccccgacctcaagcgcggcaacttcaccgacgacgaggacgagctcatcatccgcctccacagcctcctcggcaacaagtggtctctgatcgccgggcagctgccggggaggacggacaacgagatcaagaactactggaacacgcacatcaagcgcaagctcctcgcccgcggcatcgacccgcagacgcaccgcccgctgctgagcggcggtgacggcatcgcggcgagcaacaaggcggcaccaccgccgccgcatcccatatccgtcccggcgaaggcggcggccgcggcgatcttcgccgtggcgaagccgccgccgccgccgcgcccggtcgactcctcggacgacggctgccgcagcagcagcggcacaacgagcacgggggagccgcggtgccccgacctcaacctcgagctctcggtcgggccgacgccgagctcgccgccggcggagacgcccaccagcgcgcggccggtctgcctctgctaccacctcggcttccgcggcggggaggcgtgcagctgtcaggctgacagcaagggcccacacgagtttagatatttcaggccgttggaacaaggccagtacatatgagatatgaccataagatgtgagatggcttaattagcttcaattcccaacatgtgtaacacagggagtttttctagtggacgacaatactgtttaatttc

SEQ ID NO: 19394 - DNA, 1639 bp, Oryza sativa
  ref <308>: DATABASE ACCESSION NUMBER: AK069755
  ref <309>: DATABASE ENTRY DATE: 2001-12-06
gggggggagcccctcgccgtccagatctcagcctctcggatcggacggagcgtgaggtcgtcgggtcacccaacattttctccacacgcggcgactttctagcaaaaacgcagttcgtttaacgagagtcgctcacttctcgttcaggttcagcaatcgcaatctcgtctcatcgtcgccggccatggcggcgtcgtccttgctccggtcgctctcccgcatctcgcgccgcggctgcgtgggaggcgcggggccgagcccgttccaccacagccgcctcccgtactcgccgttctccaccgcggcggcggatgcggtggagaggagggggttcgcggggctggggccgacggcgaagggggagaaggcgcgggtggtggtgctggggaccgggtgggcggggtcgcggctgatgaaggacatcgacacgaccgggtacgaggtggtgtgcgtctccccgcgcaaccacatggtgttcacgccgctcctcgcctccacctgcgtcggcacgctcgagttccgctccgtcgccgagcctctcgcgcgcatccagcccgccgtgtccaagtcccccggctcctacttcctcctcgcccgctgcaccgccgtcgaccccgacgctcacacgattgattgcgagacagttactgaaggtgagaaagataccttgaaaccttggaaattcaaggtagcgtatgataagctggtctttgcgtgtggagctgaggcctcaacttttgggatacgtggtgttactgaccatgcaatatttctccgggaagttcaccatgctcaagaaattcgcagaaagctccttctgaacctgatgctatctgatgtacctggaatatcggaggaagaaaagcgcagacttttgcattgcgttgttgttggaggtggtccaacaggtgtcgaatttagtggtgaacttagtgattttatcatcagagatgttaaacagcgttattcacatgttaaagattatatccatgttaccttgattgaggcaaatgagatattgtcatcttttgatgttcgcctcaggcaatatgctacaaatcaactaactaagtcaggtgttaggcttgtgagaggcattgtgaaggatgtacaacccaacaaattaatcctggacaatggagaagaggttccttatggtttgctggtatggtctactggagttggtccttcatcattcgttaagtcgttgccatttccaaagtcaccaggtggaaggattggggttgatgagtggttacgtgttccttctgcccgggatgtgttcgctattggggattgcagtggatttcttgaaagcacaggcaaggatgttctcccagctttagctcaggttgcagaacgacaaggcaagtatctagctcacctgcttaaccatgtcatgaaagctggaggagggcatgcgaactgtgagatcgacgttgatctaggtcctgcctttgtgtataagcatctggggagcatggcaactgtcggaagatacaaagctctagtcgatctgaggcaaagcaaggctggttactgtttctgtctgtaaaaaaaacttgcattgttctaaacttctgacgagttaactgaaattgtccctttattgtcaggaatcgaaagggatatctcttgc

SEQ ID NO: 19395 - DNA, 1512 bp, Oryza sativa
  ref <308>: DATABASE ACCESSION NUMBER: AK069756
  ref <309>: DATABASE ENTRY DATE: 2001-12-06
gggcggcaaccccaaatccctcgccaccaggagctagcatcgtcgtcgtcgtccgccccgcaatgcagcccgcgagtccggtctccggtgacgcgggccccgtggcggaggcggtacctccacgcggtgccccccaggtcctcgtgcgccggcgttccgtgcccttctcccccgactctccgctcgcccccggcagccgcgggggcggcgagaggaggtccacgttccgggaggacgtcagccatgccgccgccgagacgtacctcgtcacgcgcctcgccttcatcctcctccgatacctcggggtaggctaccggtggatttctcagctcgctgccctcataatatatgcaattttacttatgcccggtttcataagagttgggtattattatttcttttcaagacaagttttgaggagcgtgatctatggggatcaaccaagaaataggttggatctttacataccaagagaccccaaaaaacccagtccagttgttgcatttgttactggtggtgcatggatcattggttacaaggcgtggggtgctcttcttggaaggaggttagcagagcgaggaattatagttgcatgcattgattacaggaattttcctcaaggaacaataagtgacatggttagcgatgcttctgatgggatttcatttgtttgtgagactgttggtgcctatggaggagatcctaatcagatatacttaatgggtcaatcagcaggagcacatatcgcagcatgcgctcttttggaacaagcggctaaagaatctaggggagagcagatttcatggagtgttactcaaataaaagcatactttggtttgtctggaggatacaacattgaaaatttggttgatcatttccatgaacgtggtctttaccgttcaatatttctcagcataatggagggaaagaaatcattgccacatttctctccagaaactgttgccaagaaattatgtcctgaaacaatagctcttcttcctcagattgtgcttttgcatggaacggatgattattctataccattttctgctagtgaaacttttgcgggtgtccttaaacaagctggtgctaaagccaagttactactctatgaagggaaaacacatactgatgtatttttacaggatccactaaggggtggcagggacaaactggttgaagacgttatttctgttatccatgctgatgatgcagatgcacgtgagaaggatgcattggcacctatcccaggccggctggtttctgagtggcaaataaagctggcacaccgaattagtcccttctgaagagcttgtgcaaagaaaagatgaaagattcctaattatagttttgagctatatgtcattcatgacgagtattgaaagattgctgattaggaacggagcccaatccaattgcagaagccgttgacatcacagggaatgcaaatgtggtgcggtgctgcactcatgtcgtctaagtttgttgggaactaatggccatttccaaagt

SEQ ID NO: 19396 - DNA, 2210 bp, Oryza sativa
  ref <308>: DATABASE ACCESSION NUMBER: AK069757
  ref <309>: DATABASE ENTRY DATE: 2001-12-06
gatccatcacccccaccactacatcacccatccccatccatctctcccccctccctttcctcctaaacttcagcggcgacacccctcgcgagccgctcctcctcatcctcctccgccgccgccgccgcgtcccctcggtgcccccctctccgccggccgccgatccggccccgcgagttgtaggaatccttgataaggctgatggcttcgatggatgagcctctttatcccatcgctatactgatagatgagctcaaaaacgaagatattcaattgcgtctgaactccattaggaggctctccacaattgcacgagcacttggagaagaaagaacccggaaggagttaattccttttctcagtgaaaataatgacgatgaagatgaggtgcttcttgctatggctgaagaattgggcgtgttcattccttacgttgggggtgtagaacatgctcatgttttgctaccaccattggagacattgtgtacagtggaggaaacctgtgtccgagacaaggcagttgaatctctgtgccgtattggagcacagatgaaggaaagtgacattgtagactggttcgttccagtagtaaagaggctagcagctggtgagtggtttacagctcgagtatcgtcttgtggacttttccatatagcatatccaagtgctcctgatcaattgaaggcagaattgaggaccatttatggtcagctatgccaagatgacatgcctatggtccgaagggcagctgcatcaaatcttggaaagtttgcagccacagttgaacagaactatctaaagacagaagtcatgtcgatatttgatgatctaacccaagatgatcaagattccgtacgcttgttggcagttgaaggctgtgctgctcttgggaaattgttggaaccacaagattgtgtagcacatatccttccagttattgtcaatttctcccaggacaaatcatggcgagttcgttatatggttgccaatcaattgtatgagctctgcgaggcagttggtcctgaacattctagggagcagttggtgccggcatatgttcgtctccttcgtgacaatgaggcggaagtgcggatagcggctgcagggaaagttactaagttctgtaggattttaagtcctcagcttgcaattcagcatattcttccttgtgtcaaggaattgtcatcagattcatctcagcatgttcgttcagctttggcttcagttattatgggaatggccccggtcttgggaaaggaggctacaatcgaacaacttcttcctattttcctttctttgctcaaggatgaatttcctgatgttcggctcaatataatcagcaagctcgatcaagttaatcaggttattggaattgatttgctgtcacaatcactgttaccggcgatcgtagaacttgcagaggataggcactggagggttcggcttgcaataattgagtacattcctttattggctagtcaattaggcgttggatttttcgatgacaagctgggggcactttgcatgcaatggttggaagataaggtcttctcaatcagagatgctgctgcaaacaacttgaagcgcctagctgaggagtttggtccagaatgggcgatgcagcatataatccctcaggtgctggagaagataaacaacccgcattatctctaccgcatgaccatcctgcaagctatttcattgctggcccctgtcatgggtgccgaaatcacttgtcaacagctgctccctgttgtgattaattcctcaaaggacagagtgccaaacatcaaattcaatgttgcgaaggttctgcaggcacttataccgatccttgatcaatctgttgtggagaagaacgtgaaaccatgcctcgttgaactcagtgaggaccctgatgtggatgtaagatactatgcaaaccaggcccttcaggcatgcgatcaaatcatgatgtcaagctaactgtcttcctgtccagtatttagaacttgattctcttagtccaaattttggaatatttgtaatttgcactttagtttgaagagttcctttctagccccagtaacagaccaaacacttcccaagatgataatgtatggctccgacccctcgttctctgtgtttgatgttgatgatgttgtaattgagcaagatcggacacattattatgtttgtttacatggtagttttgggccttggtttctgtg

SEQ ID NO: 19397 - DNA, 1556 bp, Oryza sativa
  ref <308>: DATABASE ACCESSION NUMBER: AK069758
  ref <309>: DATABASE ENTRY DATE: 2001-12-06
gatggcgacgaaatgacctgccgccggcagcggcggcggcggcggacatccccggcggcgccggcgccgccgccggtgcttccgccggacaacgacgacctcatccaggagatcctcctccgcctcccctcgcatccctcctccctcccccgcgcctccctcgtctgcaagcagtggggccgcctcgtctccgaccccgccttcctccgccgcttccgcgcccgccaccgggatccccccctcctcggcgtcttcaaggacgagctccaccaccccgtcttcagatccgtcctcgacccgccggatctcatcccgcccgaccgcttcgcgctgcggctcgacgactaccgcgccgcgagcctcctcggctgccgccacggcctcgtcctcatcttcaactacaacacctgcgagttcctcgtgtgggatcccgtttccggcgatcgccgccgcgtggccgttccgcaggagctcgacggtggggagagatccgtcatgaacggcgcggtgctttgtgccgccggcgacgacggccacgtgcacggcggcggcttccggtcctgccacttcaaggtggtcttgatcggcgccagcaagatggatgggcgaatcttcgcctcaatttactcatcggtgaccggcgaatggggtgatgccatcttcacagggcctgtatccaccatctactattttggttcacctgccatacttgttggcaactcactctattggttgctatctgtgtgggggcctcacattcttgagttcaatctcgagacgtcgaccctagctgtgatcgatggcaattggccacagatgaatttttctagcgattgccactattgtatcatgcgtggggaggatggtaatgtcggccttgccattctgtcgtaccgcggattccaaatgtgggagaggaaggtcactcttggaggtgccgcgaaatgggtgctgtggaagactgtcaagctgcatgacattcttgggctgagttctgctgtgcagagagagaaaacagatatcgtgggatattccgaggatcctaatgcgtttattttagtggtggatacggatttctacatgttccgagttgactcaatgcagtccaagaaactttttgattgcaatgtcgtcacccgctgtcatcccttcacaagtttctacactgcagcaatggaagccattggaccagacgagtgagctcaataagctggattgcattgttgaagagctgtgaaaaaaggtgttttcttcttgtttttgcttctagacatatctggtgcccatgggtcatggatgtgaaaaatatgcatcaatagatcttgtgtaaaaacagtagtctactagtctcctttaagagtgtttttcgagtttctatctctttgtatcaatagagctgttagctgagttgggtctgaatacaaattctggttattgcctttagtcgtatatgggcatatggctaaactggtaacagttttatgtacattctgttgttaccaatgtaagcaggatacttatggtctatactttcaaagaattatacttgaacttct

SEQ ID NO: 19398 - DNA, 713 bp, Oryza sativa
  ref <308>: DATABASE ACCESSION NUMBER: AK069759
  ref <309>: DATABASE ENTRY DATE: 2001-12-06
ggcttccacctaccacttctactactcatacacgcagtgccattggtgtccacctcgatcgatctctcccctcacaatcctctctcacgtacgcaagctagctagctatctagccatgtcgatcagtccacgcttcttggccgtcgccgccgtcctcgccggcgcgatgtactccgccgcgacggtggccgcggacacgccgggcggcagctgcccgtacccgtgcctcccgccgccgatcgccggtggcgcggtgaacagctaccctccgccgccgcccgcggggagtagtagcagcagcagctcaggtggaggcgatggcggcgccggcgggttgtttggcgggacctacccgccgccgccgcccggggtgatgcctggggccttcgctccgccgttcggcggcgggttcccgtacgggccagcgccgccgccgcccaacccgatcctgccgtggttcccgtggtactaccagcacaacaaccccatcaccgggtcgacgacgtcggcggcggcggtgggccggacgccggcgagcatggtcacgacggtggtgttgctcccgctgttcttggttgctcttcttcgtgtgctgtagagtgcttaataaattctaatttgtcgctaggagtgttttgctaggtaattagtaagatgttttatgtacaacctggtttttgttaactgagatgatctatggagttacttttacg

SEQ ID NO: 19399 - DNA, 2121 bp, Oryza sativa
  ref <308>: DATABASE ACCESSION NUMBER: AK069760
  ref <309>: DATABASE ENTRY DATE: 2001-12-06
gcttggccgcttccctaggcttggcgtaaaagaaaatctccccgtctcgtcgtctcctccgctccttgcgccatctcgcggctgaacaggggaggggcggcgatctccatccggcgagcggagcaggggaggggaggggatcttgacaatggttggacctgggcataggaacagtcacgggaagcgtcactctgattatgctgaaaatggaggtggcaagagaaggaatcctggtgatgatacatatgctcctggtccagatgatactgtctaccgctatctttgcccttctagaaaaatagggagcatcattgggaggggtggagaaattgctaagcagatgagggccgacactcaagctaagataaggattggtgagagtgtatctggttgtgatgagagagttatcacaatatttagctcaagcagggaaactaataccctagtagatgctgaagataaggtttgccctgcccaagacgctctctttagagttcatgaaaagctatccatagatgatgatattgggaatgaagaaagtgatgaaggtttagctcaagttaccgttcggttgcttgtgccatcagaccagattggatgcattattggaaaaggtgggcatattatacagggaatccgcagtgacactggtgctcatatacgtgttcttagcaatgaaaatctccctgcgtgtgccatcagtggtgatgaacttcttcagatatctggggactcgacagttgtcagaaaagctcttcttcaagtgtcatctcgtctccatgacaacccatctaggtcacagcatcttcttgcatccagcatgacacagccttatccagtgggctcccaccttggtagttcctcaactgcaccagttgtggggattacgcctttaattagttcttatggaggatacaaaggtgatgtggctggagattggccttctatatatcaaccacggagggaggagagctctgcaaaggaatttagcttgcgccttctttgtgctgcatcaaatgtgggaggtgtaattggaaagggtggtggaattatcaaacagattaggcaggagtctggagcctttatcaaagttgatagttcaaatactgaagatgactgcataattactgtttctgcaaaggagttctttgaagatcctgtctccccaacaataaatgctgcagttcatttacaaccaagatgcagtgagaaaactgatccggaatcagcgatcccgtcttacacaacacgcttgttggtgtcgacatcacgtattgggtgcttgattggaaaaggtggttcaatcattactgagataaggagaacatcaagagcaaacatacgtatcctttctaaggataatgtaccaaaagtagcagcagaagacgaagagatggttcagatcagtggagaccttgatgttgtaagacatgctcttctgcaaataactactaggctgaaagccaatttctttgaaagagaaggtgctttatcaggtttcccacctgtaatcccttaccatcctcttccagttggtgtttctgaagggccaaagtatctaggcagagatactaagcctcttgggcatgattatccatattcaagtggatatcgtggctcagatgatattggccctattgacagctatgcaagttatggcagctcccaggtctctggaggaggttatggggcttatggtggatatagtggtcgttctggcagcagtgggttatctggccctagttcattttcctatggaaagcgacatggttattaggacttagattgacaaatgcaacagccaagacaaaagaatgccaagaccaatgaagtatggagcctgcttattggagccccttcccaaaccagatgaccaagagtatggccccaacctggaagctttgcctaagagggacctgcctggatgccatagaccatcttatttccctagtatacagcatttacttatattttcctctgggactatgttgattccccgtcttacatgttctaaacctatgtattgaaagttcacagttgagacttcctgtatgtgttctcgtgcaacctgcttcatcttagtagttcgtgtggaagaacttggttccctgtttgccaacc

SEQ ID NO: 19400 - DNA, 1345 bp, Oryza sativa
  ref <308>: DATABASE ACCESSION NUMBER: AK069761
  ref <309>: DATABASE ENTRY DATE: 2001-12-06
ggttgcgtcgtcttcgattcctcctgtgctgtgcgcaccatggcggccaccgcgctccacctcccgccactcctcctcgcgcgccgcctccgcttctcctccgccgccgcttccacgtctacctcgcgcaggaccacgcgcctctccgcgcagctcgacgacaccgccgctgcttccacctccacctccacctctgataagcccgccgccgcctcctccttcgcgccgcctcccgacttcaagcctccggagcccaagaccttcgaggtgaagcccggccagtccgacgacatcgtcaccgcctccctcgccattcccttccgcctcggcaccggcgtcttcgcccttggatattcggtatcgctggtttctcctgacgaggtggcaccagatgaatatgctttggatttccaaggtcggaaggttaaggagtcatcaaagatagggcagtgtcctcgaccagaaaagcctatcgagatttacgagtttgaaggctgcccattctgccgaaaggtcagagagatggtggccgtcttggaccttgatgttttgttttacccctgccctaaaaatggccccactttccgtccaaaggttttagagatgggcggaaagcaacaatttccttacatggtggatccaaacacaggggttgccatgtatgaatctgatgccatcataaaatacctggccgacaaatatggtgatggaacagttccaattatgctatcacttggtatattaacaactataacagcagggctcgcaatgagtggacgtagtgggaagggttctaagtatactcctgcaaagcttccacccgagccaatagaactatgggcatatgagggatctcctttctgtaaaatagtacgagagacccttgttgaattagagttgccacacttgctacacagctgtgcacgcggcagccccaggagacaggaatttttgaagaaatacggcattttccaggctccttatatcgaagatcctaacacaggggtcaagatgttcgagagcgctgatatcatagactacctgagggccacatatgcggcttgagaatcccttctacttctcatatctcaagtgtcaatatgcagtatatactacactgataacctgacatatctcaagtgttaatatgcattctctctattcttatgttgtagattctctctattctttacaaggaatcggcgaattcataatgcagtacatgcacatacacataacactgctcattttattgtacacgaatttttattgaaacgattattgtaaaagaatttatactccctgtttacttgttttatagtgaatgacactgaaatgaggctgt

SEQ ID NO: 19401 - DNA, 1272 bp, Oryza sativa
  ref <308>: DATABASE ACCESSION NUMBER: AK069762
  ref <309>: DATABASE ENTRY DATE: 2001-12-06
ggcaaaattattcccagccgcaccctcgaggccgatggccgaggcggtcgcaagcggcgcagcggggagatggaccctccgcggcaagacggccctcgtcaccggcggcacccgcggcatcgggtactcaccccaacacccttctctggttctcccctatcgctacccagtgaggagtgagacctccaccgcagagcctttgctgctcttccacgatcaacgcggggaattcatgcgcaggcatgcggtggtggacgagctggcggcgctgggggcggccgtgcacacctgctccaggaaggaggccgagctgggcgagcgcctcagggagtgggagggcaagggcttccgcgtcaccggctcagtctgcgacgtctccgtgcgggggcagcgggaacgcatgctccgcgaggtcgccggcctctacggtggcaagctcgacatcctcgtgaacaacgtgggaacaaacttttcaaaacaaaccactgaatactctgcagatgattactcgttcataatggccaccaatcttgaatctgcgtatcatctgtgccaacttgctcatcctcttctcaaatcatctgggtcaggaagcgttgtcttcatatcgtcagtctctggagtggtggctgtaagttctggctctgtctatgcgatgacaaaaggtgccatgaaccagctggccaagaacctggcatgtgagtgggcgaaagacaatataagaaccaattctgttgcaccatggtacatgaagacttcacttgtggaagatgaattggcaaggaaggacttcgctgacagcgtcgtgcgtcgaacagcgctgaagcgcgtgggagaaccagaagaggtgtcatcgctggtcgcgttcctgtgcatgcccggcgcttcctacatcaccggccagacgatctcggtcgacggcggcatgaccataaacggactgtatccaactcaggactagaccgaataggcaaaccgtatggccgtatggggatcgaagaactgtgtttggagaggtcagaggtgaggctcgaacgtcagtaaaactcaactatcccaaacaaacaggagatcgcaaatagatgcttgtgaacttgattggtttgcacttgggtatgcaccgcatgctactgtactaaattaaaaaaaaacgtttgttgcgagcaacaaaacgaaatactgcgtggatagggggcctactgcatagtgttgtgtcgttcgtatgcgccatagacaaacggaatgcccttgaaaaaaagtttaattggatgc

SEQ ID NO: 19402 - DNA, 1926 bp, Oryza sativa
  ref <308>: DATABASE ACCESSION NUMBER: AK069763
  ref <309>: DATABASE ENTRY DATE: 2001-12-06
gacgctggctgtggctgggctgactgctcctcgtttctcctacctttggcctgcccattaatggcccctggtatattaaccttctcttctcttcctccctcctagactcctcctgctctgctttgcttcccttccctgtgcgccccgcccccacgaaaatccacttcttttcctcaccttgccactgtcggttcttgcctctttctttgaggactcgcccgcccaacagaaggaggcaaaggatgatccagtcttgaatgaccagttccggaggatctgcgcaagaaagatagctgcgcctagcatgtaagaagcacgaccattccattaccatggagttcctgtaatccaatcattcgagcaaactccatgcattggatcagtaactcaacaatggtggttaccattttgcccaactgcatctagttcctatatttgaccagttgcccaagaaacaacatttccatggaagctcctaagcttcgtttcgtcagatgcccaggatgcctccagcttcttgtggagtacccaaccattgctgtctaccagtgtggtggctgtggtactgttcttagagcgaaaaatcgagtcgcgccagcaactaatactaatgcagaatctggtgagcacaatgaattttcaaatatttcaacaggggattctcagaacaacaaattgatctgtacagatgggcagaaaatttcaccatcctccaatgcacaacctggtgtggtgcaggagaagattacctttgctagcgaggaaaaaactgtgtccactagcaatagtatcgactccaatgagcatgttaacatcgagtgttccttatttgatggggatgccagcaatcatgatgtgaggactgaaggcataaatgatgaagataaagtcactgtgtctaattcaactcttgatttagtgaggaaagtagagaatgttgaaaccgatggaaatgaaaaaggttcctttacggatgatgggagcatcagcaatgaagttgctaccacccaaagcatggtccacatggatggagctggttttgataataattttacagaagtacagagtgcagctgaggggaagtgtacacttagcgatgctaatctggactcacaagagatagttgcgatttgccaacctgataacatttctgttggcacaaaagaaagggttcagctatatgaaggttttcatgttgaatcacatgaagatctgattgaagaattggtgagatctctttcactcagtgacgacgaagaagagtttgtcgatatagcagaaaacagtgaacttaatgatgctttacgttctcaaatgggcagctgcagattttcattggggagcaaaatgaatgatggccctcgaactgatcctcatggccggttaatcgaagaattagagatgtctttcagtgatgctgaagaaccactagaccaaaatattatggtctccctcaatgacatagaaaagcctattttggatgaggtcagtaaagaaaatcacattttggaggaggatggtaaagaaagtcacattttggacgtggatggtaaagaaagtcacattttggacgtggatggtaaacaaaaccacattttggacgaggatggtaaagaaaaccacattttgaatgaggatgataaggaaaacctcattttggataagggcggcgaggacactttggatgcaggtggtgctaattcatatgaagaaagagtattgccatcagatgatgggcttctcaaatctggacaaagtttccaacaatgtgagctggctgctgttaacatggcagaaaaggatgaggggcatctagaagaaaccaacatggctaaccatgctgaagcaaacagtggaactgctgctgttctttcaaatttgtcaaacgataaattttgtgccatattaccacctagctgtgatggg

SEQ ID NO: 19403 - DNA, 1799 bp, Oryza sativa
  ref <308>: DATABASE ACCESSION NUMBER: AK069764
  ref <309>: DATABASE ENTRY DATE: 2001-12-06
gacaagctgcaaaaccctcctcgtctacccttccctctctgctcgccgccgccgccgccgccgcacgccttcgaagatgctcgacatcaacctcttccgcacggagaagggcggcgacccggagctgatccgcaggtcgcagcgcaaccgctccgcctccgtcgagctcgtcgacgaggtcatcgccctcgacgaccagtggcgccagaggcaattcgagctcgacaaaatccggcaggagctcaacaaaaccagcaaggaaatcggcaagctcaaggctaaaaaggaggacgcgtcggctctgattcagagcacggaagagattaagaagaggttggctgccaaggagacggaggtgcaggaggccaagggcacgctcgatgccaagctcgtgacgattggaaacattgtgcatgaatccgtccctgtcagcgatgacgaggctaacaatttaattgtacggacatggggagagaggaggctggagggtaatttgaagaatcacgtggatctttgtaagatgcttgacatagtagctttggagaaaggtgctgatgtagcaggtggaaggggttactatttaaaggatgaaggtgtcctactgaacttggcattgataaattttggactcgcttttctgaggaagcgaggcttcaagccaatgcaaactccttttttcatgagaaaggaaaccatgggaaaatgtgcccagttggcccaatttgacgaagagctttacaagctaacaggcgatggagaggaaaagtatctcatcgctacatccgagcaaccgctgtgtgcgtatcatctaggtgatcgaatttatcctgctgaattgccaattagatatgctggatattccacctgcttccggaaagaagctggttcacatggaagggacacggctggtatcttcagagtccaccaattcgaaaagattgagcaattctgtgttacaagtccaaatgacaatgaatcctgggagatgcatgaagaaatgataaaaaattcagaagatttctacaaggagattggcctaccgtaccaacttgtctccattgtgtctggtgctcttaatgatgctgcagctaagaagtatgatttagaagcatggttccctgcatcaaaaacctatagggaattagtgtcctgctcaaattgcacagattttcaagcaaggagacttggtataggttatggccagaaaaaggtatcttttcacttggatgctggtagatcaaattatcttaaaagtcatctgttattgccactgatttgatgttcaaattgcagaatgatgagcaatccaagcaattcgttcatatgttgaactcaacattgactgccactgagaggaccctttgctgtattttggagaacttccagaaggagaatggtgtcgaagttccaaaagcattgcagccttacatgggtggaatcgatttccttcctttcaagctggatagcaaacaagttgctcgactccaaatcaaataatccaaattcaaagggagatgctatctgagctagatgaggaatcaacaaagattttcttgctttcagacactactggatgttattcatacttcaaaaaaatgcgtttgttcagaacttgtatcaatgatcatgatgttacagttttggctctcatttgagtgtattgattagcacaatgtctgaccatgtacttgcacagtgatattccgtagaatgtctggctatcttggacatgtgcgcttaatttgccgtaaaagatgtattcattttcatggcctttagtgcctatactaatttgttgc

SEQ ID NO: 19404 - DNA, 1442 bp, Oryza sativa
  ref <308>: DATABASE ACCESSION NUMBER: AK069765
  ref <309>: DATABASE ENTRY DATE: 2001-12-06
gtgagaaagtgagaagtccattcggactgctgcgtgagaacaacgcgcgtacgggcggcgccgacttcgacgtcgacgcggactccctcctccacgctcgccggcggccggaagctcctccgggtgaaggcgtcagattaccttgcagccaccaactaattcatggagtcggcagaggtggctgcttcttccacattcgggcctaccccagagatggagaagttcctgtgcgatctgctgcttgacacggcacagcccatcgctgaacgcttccgtgcgctcttctccctccgcaacctccatggtgatggcccccgctgcgccctcctccaagctgcaagggattcttctaacttgcttgcccatgaggctgcttttgcacttggacaaatgcaagatgctgaggctatccctgcgttagaggcagttctcaaagatctttcacttcatccaattgtccgccatgaggctgcggaagcccttggtgctattggcctggagaagagcattcccctgcttgaggagagtttagctgctgatcctgccgtggaggttcaggaaacatgtgagctggctcttaggcggatagaacaacaaaagaatgctggtgtttctgaaagcacaaccatttcaccatttctctcagttgatccagcattacctgcaaagcaaggactttcggtacaccaactaagggagattcttctcaacgaacaagaaagcatgtatgaacgttatgcggctctttttgcactaaggaatgatagcagagatgctgctgtttctgctatagttgcagctctaggtgccaaaagtgcccttctaaagcatgaggttgcttatgtgttaggtcagctgcaaaataaagctgcttcggatgcgctttccaccgtcctgaagaatgttgatgagcatccaatggtcaggcatgaagctgctgaggcccttggttcaattgcagatcaagaaagcattgcacttctggaggaattcgcgaaggatcctgagcctatggtctcccaaagctgtgaagtcgcgctcagcatgctcgaatacgagagatccggaaaatccttcgagtttttgtttctgcagactcctggggtgcagcaggagtcctgagtaagatagatatatctactccaggcttctatatcgatctactgccaagctgaccgacaaattttgtcatcaattttgtcaagacgcttcactcctatcaatagttataccataagagtgtttgttgcttatgtttttcaccactattgtttctcctggtctcctgctgcttatgtcttggaccatgagagtcaaaacagctagtaagaatttacctgagaattttcggtttcatggtaactagaaataccatgtaaaactttacacaggtagtcaatgatgtatcgacatagcaacattaaatattgaaggacttcatg

SEQ ID NO: 19405 - DNA, 3260 bp, Oryza sativa
  ref <308>: DATABASE ACCESSION NUMBER: AK069766
  ref <309>: DATABASE ENTRY DATE: 2001-12-06
gatcgaagccatagctctctcccgtctcctctcctctcctctcctcccctcctccgccgatggggaggattccttccattccatccgcgcatccgctgcctccgcggaatccgagttccgcgtactgcgctgatctccggcatcggatttcggagagggtggggtgttctctccgctcggggttgttccactcggttctgaactgggagtgtgagtgtgcagggcaaggttgttgggatttcacgtcgggtagagactaccgcgactgtcctagttatgtcagtgccgttgtatttttatacaaagcggtagatctggtggaaggatatgaactgttgcagataattgttgattctgatttgtactggtgtgacatgtgcccccatgtgttcaacttgtgtagtacatgttttctgatgcttggattgtttattcagtctggaattctacttatgtttttctgatttgtacttgctgagtatctgtgcttctagaattacctcccatacaaaaattagatttggagctctggtttattttggtactagtagcttgttgatggacctcttatttatatctaaactaattgaccgcatcttgtattgaactagtagtttctgatgcttcagatcggattgtactctacatgataagaaagtatggcaccagcaaacaaagcagagagaaaagcagtgctggatgctggagcatggatgttcaacgttgtgacatcagttggtatcatcatggtcaacaaggcattaatggccacacatggttttagttttggtaagacatgctataattcctcactcgtggttgaattgtcaagaatgccttgtccgcacgtcttatggatagttggactaaaccgaactatcgttgtgcagcaaaccagtcagattttttgtgctaatgatgtgttccattgtgtgtttgtgcagctacaacattgactggattgcattttgcaaccacaaccttgatgacattagtaatgaaatggttgggacatattcagccatcctatttaccattgccagaactcgttaaattcgtcttttttgcaaacttatcaagttgttgggatgaatgttagtttgatgtggaactctgttggattctatcaggtgggaagagtaattttaaatccttctatattcaatgttagaatggagggcacatactaattttcgtttcatgcctcttcagattgccaagttgtgtattattccagtcttgtgcattctggaaatcctgtttgacaaagtccgttactcaaggaatacaaaactcagtatagtgcttgttttagtaggagttgctgtatgtactgtgactgatgttagtgtgaattcaaaagggctgctagcagctgtaattgcagtttggagcacagcactacagcagcatgtgagtatttgattgtgcacattttgacgtattccatgccctagtgataactgctctgtttggctcctttttaaataccttggcttctgaatgagcagtttcagttcaaattacgtcgcatatggtacattacatttacatattttccaaactgttcgtgtgaattcagtctgatttatctcattctgtaatctggatttctgtcgatatttgcttgcttctaactgctgtactgattactcatgttcaaaggaaatgttcaatagtaacttgtatctaaaagagttgcaaatatttagtcttactcatttatctgctaacagaaattttgtccctcgctgctgttttcacttttaatggtgaggttttggataattagcacttgttttattccaattatttttctttcatgctgcagtacgttcatcaccttcaaaagaagtactcgcttggctcattcaacctattgggtcatactgctccagctcaggcagcatccctgttaatactggggccttttgtggacttctggctgaccagtagaagagttgatactttcaattacacaacaatagttacggtatgtgattcttgttttgaatcagttctctgcttattctcttgtgaacttgttgcattacagtcccatttggctctatgcagctatttcggcattataaactgtacatagctgtagatgaatccgttttgagttagatactgatgaccatgaagagtttaccatatcctgtaaccaccagatttatctcctggatttggtccatgaattacgatttaggctggaaaggaatattttaagttctgttttgatataagtttacagcagctttaaagatattttttttgaacattgtattatccaagtgttattagatattagagtactggcagtgattcttttcaatcccttttgtgcatgttcattacctctctataatggatcaaccacctaactgctagtagttagtaagctaccttgcacattacagttgaaacttgaaatgtgtttttacagtatggtccctccttcaaatagtacagaagtatatgaatagttctttgttgcacaatagcaattttgcttcttatatatacttcatggagattaagagatacctagttgcctacactgtttcttctatctatgaataaaattttatggaatgagcatgacatgtatggttttttatcatagcagtgcagacctgatgttcccttgacttttacatattccttacatgagcaaactgggactaatgctttcttcttcactcacttaatttccagttcttcattgtattgtcgtgcacaattgctgttgggaccaatctaagccagttcatatgcattggaagattcacagctgtctcatttcaagttctaggccatatgaagacgattcttgtattgaccttgggttttcttttctttggaaaagagggccttaattttcacgtagtccttggcatgatgcttgctgtgattggcatgatttggtacgggaatgcttcgtcaaaaccgggaggcaaagagaggcagatttactcggtgcccagcgagaaaactcagaagtcatcacaatcagagcttgaccagaaggtctgaaacaaagttgtttcactatttttacagctccattgcttagcgagcattgagaagaccacgatctgatttattctttttttttctggtaagtttaaagatgtttctgtacaactgaaattcataccagacaaacagaatatggcaggaactaagcgcgacgataatttaatttgtaatattccattgagtaactgcatatatgatggaaagatattttcagc

SEQ ID NO: 19406 - DNA, 2178 bp, Oryza sativa
  ref <308>: DATABASE ACCESSION NUMBER: AK069767
  ref <309>: DATABASE ENTRY DATE: 2001-12-06
gtactgttcccccatcccttctcttcctttcccttgcccttgcgccgccgccgctttgccttctcctcgccggcgacgacggcttgcccctcgagcttttttgccgtccatcacgcgagggtggacgggggagttaacttttggctgccctctactgccatccaaaaaccctagccgcaccgaagtcgccgcctcctcacaaactcctctgcgcgttctccttcgtccaggcgctgctgtggtcgttggtgaatcgtcgacgccgtggtgaacctgcggagggaccagaccacgtggggctcggggcgaggtttggccgtgacgcctgtcgtcgcttcgtcgccctccccctgcccaatctctccatctctcttcccagttaagcagggagagtggtcatgatgcagaacgagggcgagagggtcgatctgctggccctgccactcgatccggtgggtagacgccggcctccccctcctgcgcttttcctcgccgccaacgccctcccttcccccaacacacacacacacacaccataataatactactcctctctcttcccagttcaagtaggggtggtggtgatggagatcaaccagggctgctggtgatggagaacgacaacgaggtgatcgatctgctggcctatcgctagatccggtgggtacatgcactcaagttcgccatgaagccgatgcaatccttctccatctccacagtgggttggcgcccttctgctcaagtttgaagctccgctgccgtgcggcgccgacactgtttcgcaattgcagatctggctagcaacaggtaatctgggaaccatctgtcgtcgcctagccaagggccatttgcaattgccttgccattgttatttatggtgtaatttacttaggggcaatggatgtatgcaacttcatcattaattgagaatccatatgtataggtattttgggaacctttttttttttgccttttcctacttccacttcaattttactaggtgatattttagttccacaatggttcaccttgaactctttttctaaatgacgatcatatttaacgaaaccttcactgcatgttctgatatgattgctcgccatcatctcagccactatctcaaattgcttattacagtggtcggaggtatgatattttgcatgcctcttacaagtaatgctatggcctatgtaaatgtctgcaagactacaaggaatctatgaatctatcctgctctgctgagggattctttattttagtacagtagagaactgagatcagtgcaaatcgaggtaattgatgtttactctcacttactacacattttatttgttgattcacattacatatatgcttctttcaaagaaatgaatgtccccgtttattagagattgtttaggggggagttgttttctaaatgcctttgtgcttcatttacataagcaaatgtttattagtgttgatgcttctagctacatggttgacaacatataaagattaccttgcacataatgaaactgaattggctcttttttttttcctaaagaaactgaatgggctagacctattttcgtatacattgatatattccattaattgcattttcaagtatacacttatattggtttctagacttgatacttgcttactaaaggtttctggacttgatacttgctcactaaaggattttatattgcagaattcaggctctatttctgctccttaacatcagaattgaagttatgtggcagattgtgttagaacaaaaaccttcagagaagctcaacatttactaatagaagtacgtttttggacttgtgatgcttctggtgaggtttttggactagaccaaccaatagcatttaggttgttgggctcggtgagatcattacaagcacttgaaggtgtggctaagtaattggatgattcactgtggtgctgatgcaagtcagcattggtagtctttgaagatgcagaatgaactctactaatttagggctaagccatgctgatttaaactgatatatatttagtgctcctatagcaattggtgaagaaattgtgtggaagtttctgttaaaatgatgaaattaagaacatgtttggtaatatataaatactatagattggatctgaaacgtgttgtggtgagctatggcacaaaatcctctttccatg

SEQ ID NO: 19407 - DNA, 2045 bp, Oryza sativa
  ref <308>: DATABASE ACCESSION NUMBER: AK069768
  ref <309>: DATABASE ENTRY DATE: 2001-12-06
ttgaagtaatcggcgctttcgcgagagagagcgatacgaacaagagaaaatcttctccagacaccgcggcgggcttccccaccccatcggaaggaagaagacgaccagctcgcgcgctcggatctcagccatggagaaggcgatcgatcgccagcgcgtcctcctcgcccacctcctcccctcctcctcctccgaccaatcgctcctctccgcgtcggcgtgcgccgccggggacagcgccgcctaccagaggacttccgcctacggggacgacgtcgtcgtcgtcgctgcctacaggacacccatatgcaaggccaagcgaggaggtttcaaggatacatacccagaggaccttcttactgttgttctaaaggctgttctggacaacactaagatcaaccctggtgaaattggtgacattgtagttggcacggtgctaggtccaggctcgcagcgtgcaatcgagtgcagggctgcggctttctatgctggagttcccgaaaacgttcctgttagaactgtcaaccggcaatgttcctctggattacaggcagtggctgatgttgccgcggccattaaagctgggttctacgacatagggattggtgcaggcctggaatccatgtcagtaaatgctatgggttgggaaggacaagtaaaccctaaagtaaatgaagtccagaaagcacaggattgtcttttgcccatggggataacgtccgaaaatgttgcgcaccgatatggtgtaacaagacaagagcaggatcaggctgctgctgagtctcataggagggctgctgcagccacagctgctgggaaattcaaagatgagattgttccggtgcctacaaagattgttgaccccaagactggagaggaaaagaaagttgtgatatcagttgatgatggaattaggccagggaccacagcatctggattggcaaagcttaaaccagttttccggaaggatggtaccacaactgcaggcaactctagtcaagtgagcgatggtgctggagctgttcttctcatgaggagggacgtagcgatgaagaagggacttcctattcttggtgttttcaggagctttgctgctgttggagtagatcctgctgttatgggtgttggtcctgcagtagcaataccagctgcagtgaagtctgctggactccagattgaagacattgatctgtttgaattgaatgaggccttcgcttcgcagttcgtgtattgctgcaacaagctgggactggacaggtcaaaagtaaacgtgaatggaggcgcaatcgccctaggacatcctcttggtgcaacaggtgcccggtgcgtcgcaactcttctgaatgaaatgaagcgccggggcagggactgcagattcggtgttgtcaccatgtgcattggatctggcatgggggcagcagctgtttgagcggggtgactcggtcgaccaattctcaaacgtgcgccaccattagcggcagttttctaagagaaatgcaaagcaaagcagtggtgcaaaatcatcatggtggtcagtccaatggagcatactctggcagtaagatctataccgaaaactaaatgcaggaaacacgtaatcttctccggtgaaaggtgtaacagtatattgaagatcttttcatgtaacattttgcactaataataatttatgcgaataaggggcatgcatgctcaatgtttgttttgtcaagtgttccacacgaaacactgagaggagcacagtggttgcaaatgttgaagggcctgataagggtaggcctgatcatggataatttggcccaaatcaaatctggcctggcctgatcgttgtccaaaatacttagtactactttctctgtaaaaaaataatacagtataaaacaatttattttgcttgttaggacaatgctttaatcaccaactgctttattaatatattatatttatgtgacacagaagtataattacaggaaagcatttgtgaatataaatctaatagcactcattacttttgaatgtaaatctaatgacattaattttgtctc

SEQ ID NO: 19408 - DNA, 1232 bp, Oryza sativa
  ref <308>: DATABASE ACCESSION NUMBER: AK069769
  ref <309>: DATABASE ENTRY DATE: 2001-12-06
gctggaaaattccccgcgaaaatatttatacgggggccgcgcccgcggcgcgagtcgtcgctgctcccactcatccgccaaccggttgcccccgaatcccgacgaaccttcgctgctcccgggtggtgctgttagcaacaacaggcatcaaataatgtcgatgagctatgacggggatcaaagcgaggaccggcaaagcgaagaggttcaatcagcatataaaagtcacggtgggggtgtgttaagggggtattttaatttggataggtctgaagagcaaaatgaagaaaatgagtggagttggattcctcaagatggtgatcctctagctgaatcaatgtcttcgcttcagacgacacaagaagctcttgagaatgagatgcaaaaactgtcagatcttagcaaggagttaggggctgacaacttcagcagtgataacagagcaaacaacgcattcgtttcgcctgatgaggacgatgttcttgaaacgaatcaaaagatgagccatctagaacagaaactggaagaggcgtcaaacactatcagagagaagaactcggtattatcacaacttcaagaactcatcgacggcatgcacatagcaacaccggcggagagggccttcgacatcgatcagctggagacggacctcgaccgccagctccaggagaagatcgaagccgagatccaatccctcgtcatgctgaaagcgaggcagagctggcaggtccggaccgaggaccagctcgccctcaaggagcacaagctgtcctcctccggtggcgacaatggcgatggcgattgcgacagcgacaacgcgaggatgatgatgatggtgaagctgcgggagacggagagcaagatcgtcaagctgaaggagcaggtggagaagctggaggtccacgagagggagctgttcgggacgacgcaggtgctgaggatgcagagccggacgctcaagatatgcctcttcggcctcctccagctcgtcctgctcttcctctccctcaaggcgttcttcgcccaggtctccgaccccttcgatgacgttgtgccgacgtgatcgatttggtatttcaaaggcctgatgattgtgttctcctagcttgtaaatatggtcactaattatgtgtgtttgttaggtctaatttcgatacggttgactagctgattgcaggttgtgatgtacagctgaattacgaaaactcatgtaaaaaaatgtcagtttgtgc

SEQ ID NO: 19409 - DNA, 2158 bp, Oryza sativa
  ref <308>: DATABASE ACCESSION NUMBER: AK069770
  ref <309>: DATABASE ENTRY DATE: 2001-12-06
gagtacacctcacctcctcctcctcctcctcctgcgtcgccgcctcgcactcgcaggttttcgctgcggcgaagcaaccaaccaatccccaaagagagcgagagaagaagcgaagaggaaagtctcaggaccgagagagataggcgaaatcccgctgatcgagttcgcgttcttgggaaatttttctgggagttcttcgaagaatccgccactgaccacgacgacggattggaggcgtggagtgccaaagattcgctagatcggggggcctcttcctagtaggttttggttcaagatcgagaggaagcagtttgtgagggtttccggtgcccgatacttttttttttttccggaagcttcggcggcggcggcggtggtgttgatgcgctgcgtctccggcgccactgctgcggtcggcggcgccggtggagattgcagcgactcagatcgcggcggtgccgtgccggggtttcagtttcatctgctgtggctgtggttggggatcggtggtggggagtgagcagatggaagaggattgcacgtactgttcatgccaccacttggattctcctcaaattagagagtaatcaagagcaatctggtgtttctgagagctggatcgctccaagcagtcacagaatcgggagatttttttgtttaggtctagatgtagtattttgtgttttgaggattgatttgtgcatctgagtgtttggaaatcggggttacggcgcaccggcctcgcgcagttgccggcgctggggatgatatgctagagaggggatatgttgcatgagaaagaattcaagcatttgttgggagaatctgttgagctgctttgctggggattcagttttgtgattgatcttccaggaggggcacaatgtccaggtgtttcccattcccgccgcctgggtatgaggcgaagcctaggagtgagcataatgatctgctaaagaaggtgcatatgattttgtgcctttcaaatcacttgcagaaatggccctgttcttgcccaaactaaatgctgctagtacatggtagagtaactaggcagtgtatgagttccctttaaacaagaaaatagggaatatagggcctatttggttctctaccctaccaattaattggtagtaccaaaatctaggcaaattttggcactaccaattttttgtagggcaaagttagctaatctatgtttggtttagggccgttttggtttgataccaaaatgttgccataccaatgttttggtagtttaaatagtaaatgtgatgatttggtttaaagccaaatatttggtaatgcctatactcaatttggcacaattctagaatgttcttcaccataatttgaaatttggctctcaattggcatcaatccaaagacactcatttacaattctaccctaccaaaatattggtagtgccaaagcttgcctagagtttggcactaccaatatattggtagggtactaaaccaaacaagcccttaataccaatataaagccaaaatttagtatgagagtgaagaagattctaaaatgtagccaaattgagcgtgggcactaccaattgtttggcttcaatctaaactagcatgtttactattaaagttaccaaaattttggtagggtcacgttttggcttcaatccaaaacgacccatattctccatctgttggagccatagattacctgttaaatagatttgccatttttatgaacattgctttgacaaatgtttgcatctatgagtagttagcatttctagatttagtcaatttttattctttgctcatatgaaaaggttccgctgtaaagccacttactgggtacttagggcctatttggttctctaccctaccaattaattggtaccaaaatctaggcaaattttggcactaccaattttttggtagggcaaagttagctaatctatgtttggtttaataccaatataaagccaaaatttagtatgagagtgaaggagattctagaatgtagccaaattgagcgtgggcgctaccaattgtttggcttcaatccaaactagcatgtttactgttaaagttaccaaaattttggtagggtcacgttttggcttcaatccaaaacgacccattattaacttgttactaagcattagaactgtttttc

SEQ ID NO: 19410 - DNA, 1848 bp, Oryza sativa
  ref <308>: DATABASE ACCESSION NUMBER: AK069771
  ref <309>: DATABASE ENTRY DATE: 2001-12-06
gagaagaggagaggcctctgcttcctctccaatctcaggatgtaggttcagaatacacaagggatggttcagttgacatcaacaaggagccagccctgaagcacagcacagggaactggagggcgtgcttcttgattttaggtgttgaattttgtgaaaacatgacctactttgtaatctcgaggaatctagtcacattcctcaccactgtgctccacgaaagcaaggtcgatgctgccagaaatgtctctgcctgggttggagcttgcttcctcacaccggttgttggtgcctttctggcagacacttattggggcagatactggacaattgttgttttcctcccggtgtacatcactggaatgctcatcgtgacagtttcagcatcacttccaatgttcttgacatcttctgaacatggcaatgttcatcgttccgtagtgtatctagggctctatcttgctgcccttgggagtggtgcaatgaaaccatgcacttcatcctttggggccgaccagtttgatagcactgatctggaggagttaccgaagaaggcctccttcttcagttggtccttctacatgactactgtcagcaccttgctgtcaagcacagtgcttgtttggttgcaagacaatgttggatggggggtgggttgcgcaatcccgactgtgttcatgatcatcagtttccctgtattcattgccggctcaagagtttacaggtttaggaacctgggatttagccccctcaagagcctctgtcaggtgattgttgcagctgttaggaagtgccatctgcaattgccagaaaataagtcacttttatatgagccatccaattcatcttcaacaactgaagcaagtcataaaattcagcccaccaatcaattcaggttccttgacaaggcagccattgtactgcccccatcagacgaaacgtgcatcaagcccatgagctcatggtcgctctgcacagtgacacaagttgaggagctgaagatgctgctgcggatgttccccacctgggcatctttcgtgatctttttcgcggtcaatgggcagatgtcctcaacgttcattgagcagggaatggccatggacaaccatgttggttcatttgcaatcccacctgcatccctcaccatcatcgccgtgctcagcgtccttgtcttggttcctgtgtatgagatcgtatcagtgccactggtgaagcatttcaccggacaggacaaaggcttctcacatgcgcagcgcatcggaatcggcctttcactgtccatgatcatgatggtgtacgcagcattgctcgagatgaagcggctggcaatcgtgcaatcaagtggcttagcagaccacaatgtagctgctccaatgagtatcctgtggcagacaccagcatactttctgcaaggggtttcagagattttcagctgcatcggtatgtcacagttcttctatgaccaggcgccagacagcatgaagagcgtttgcgcagcgcttgggcagctcgcaatcgcttcaggagcttacttcaacacgttcgtgcttggcgctgtcgcagtgatcacgacgagcagtggagcacctgggtggattccggataatctgaatgagggccatctggactatttcttctggatgatggccacccttagcttacttaatcttgccatgtttgtgtattcttccacgaggcacagagagaacacagcttcatgaccagatttatacataagacatgaagcaccaacgaaatctagagggttatcataacatcaacgagttatacaagagagatacaattatcattttaatgaattggcctataaaatctagagggaatctc

SEQ ID NO: 19411 - DNA, 1287 bp, Oryza sativa
  ref <308>: DATABASE ACCESSION NUMBER: AK069772
  ref <309>: DATABASE ENTRY DATE: 2001-12-06
gttttcctctcctccgccacctcttctcctcgccgccgccgccgccgcctcctcgccggatcacgcaaaaccctagctaaaaccctacgcttccgccgccgcgagcgcgtcccccctccggcgagatgaacttcaagggcgcgaagatgccgagcccgccgccggcggctgccgcggggcggctggtgaaggtggggctgctgggcggcgccgccatctacgccgccttcaacagcctctacaacgtcgagggaggccaccgcgccatcgtcttcaaccgcctcgagggcatcaaggacaaggtgtaccctgaggggactcacttcatgatcccgtggttcgagaggccgatcatctacgatgtccgagcccgccccaacctcgtcgagagcacttctggaagccgtgatctccagatggtgagaattggtcttcgtgtccttacaagaccgttaccagagaagctaccaaccatctacaggtccctgggggagaatttcaatgagagagttttgccttcaatcattcatgaaacactcaaagcggtggttgcacagtacaatgccagtcaactaatcacacagagagaggctgtgagcagggagattaggaagatcctgacagagagggctagcaacttcaacattgctctggatgatgtgtccatcacaagtctcagctttggaaaagagttcactcatgcaattgaagccaagcaggttgctgcacaagaagctgagcgtgcaaagttcattgttgagaaggctgaacaagacaagaggagtgcgatcatcagagcacagggtgaggctaagagtgcacagctgattggtgaggcgattaacaacaaccctgccttcctcgctctccgacagattgaagctgccagggagatctctcacaccatggcaagctcaaacaacaaggtgtacctggattccaaggacctcttgcttgggctccagcagctgaatgtggacaacaaaaacaagaagtgaaacagtttcttgtcatcagatgatcattacagtttctgatcatcagttgatcattgttggtttctccatgggagagtacttctaagaaaatcgcatagtctttagcttatgtcagaaaaggttctggtttaggaagtgagatcaacaggtggcatcctttttcatcattgcatttgaaggagtactcgcaagtgaagtggaggttatcatttttgctgctgtaaaaaaatataacttgaatactctcttcgatatcttagttgccatggccactttgccagttcgtcct

SEQ ID NO: 19412 - DNA, 1307 bp, Oryza sativa
  ref <308>: DATABASE ACCESSION NUMBER: AK069773
  ref <309>: DATABASE ENTRY DATE: 2001-12-06
ttgggagtcgtcgaggagaattttggaggtttggacgaagacggaggaggagatcctcgccgagacgaccgccgcttccagcatccgtggcggaggtttcgcccgagctcccaccaccgctggcccagcgccgactccgagttcatctcctacccggcttcagtcgattgataggctagttaggtatgctgagtggccgcgcggtgacgttgcatcatagaagtgattcgggcgaacgtttggtaggaaatgtggtacccgatgaagcagagagcggcgaggaggccgaagcttcctccaaggtgctgtaccgagcctcgtttcaggagctgatgcccaactatctgcagtatgacacgatcatatgggccgtgatatcactgctgcttgttctggcatggggggttggcctgctcatgcttctctacctgccgtacaaaagatatgtgctgaagaaggatatcttttcccgcaaactctatgttactgagaataagatagtgtacaaggctagtaggccttcatatataccgttcatgggcattgtcaagaaagagatagaagtacctcttcaattggtagttgatgttataatagagcaaggttgtctgcaatctgtttatagcttatatacatttaaagtagaaagcatagcctcggggaaacctgctccattggatgaactacaatttcatggtgttcacaatccagatcttctaaagacggttataatcagagaagcttccaagagaatccaagaacaccaaagttggaagtacagaatatactctggagaaggcccttctgatgttacaccaatcgatagacttgactctcctaatgcgaaggtgacagcctcctccaggcataatttccaggaatccaagggcagaattcctaaaagtgacagtatcttgctccataagcttgaagaagtttgtcaatcagttaagaatcttgaatctctcctcttgggatcacattcaagggcatgatgagcagctgaaatgtatgttttctttcatcttccatcatacaaatgtgtattgtatgacctttgttactgtctgtagcattgcatgcaatgtaccaatgcgggtaattaggaaacaattgttgatacttaggaaaaacttgtcagcgcttgcaagttctctcattggcaatgtacataggtcatcctgatacctctagtttcgtaaatcctagtacagaaacaaacctgtgaatccaaaagtagatcagtcacacgtgtaagttgatacttaagcatgtttgctatccgaaacatttttttttctttgccc

SEQ ID NO: 19413 - DNA, 1387 bp, Oryza sativa
  ref <308>: DATABASE ACCESSION NUMBER: AK069774
  ref <309>: DATABASE ENTRY DATE: 2001-12-06
gacggcttcggcgagaggaaggggaggggaagaggagaggaggaagggactggaaggttcgatggcgtcggaggtggaggacgatgcggcggcggtgctcaccaacggcggtgccggcgccgcggaagtccggcggaggagggaccaagcgaaggagattctgtccaagcaggccgtcaagatcgccaccaaggccgaggagcacgagcgcttcatcttcaaggtcacacacttgctgggtgttcttggatttgggacattttgctacctcctgggtgccagaccacaggatgtgccgtatgtgtactgcctgttctatgtcatctttgttccgctccggtggatctactaccgctataagaaatggcattactatctcctggacttctgttactatgccaacacttttctccttgttatgattctcttctatccaaaggatgaaaagcttttcatggtttgcttctcatttgcagaggggccgcttgcttgggcattaattgtgtggcgctgcagcttggtttttagctcatttgataaacttgttagtgtcctgattcaccttttgcctggcatagttatattcactatccggtggtggaatccacaaacttttgctgcgatgcatccagaaggaagagcagccagagtcacatggccttatgtggaggacaaatcatacctgtggacatggctgtttgctgttcctctagctgcttacaccctgtggcaacttatgtattttctcatagttaatgtgctgcgtcggcaaaggctgttaaaggatcctgaagtcatgacatcatacagggagctctcaaagaaagcacagaaagcaaacaacatctggtggagactcagcgggcttcttggcgacaggaaccggccactcatgtacatactactccaagcgctgttcacggtggcgacaatggcgcttaccgttcccatattcctgtccttccagatgcatgtggtcttccagatactcaaggtgtgcgcgtcgacatggaacggtggaagcttcatcctggaggtgatgcctaggcaagtcgtccagaaggagaagaagaagctagagatgaagcccatggaagaggctaattcgagccagaatgctgaagaatcacaaggggacctgtcagcaaacggccagcactcatccgagcatagctaagtcactgaaaaaccaaaccatcgcaaacggtagcatttttcagtttttcaccagttaatacactgtggatagcttctctgtgtgttgtgtgctcgaaacaaattatccatgttctgttgggttgagaattttgatgcgtgtgtgaggtttgatctattcagactccaggcagggagcatttctcaggtagaaaattatttttcttttccc

SEQ ID NO: 19414 - DNA, 703 bp, Oryza sativa
  ref <308>: DATABASE ACCESSION NUMBER: AK069775
  ref <309>: DATABASE ENTRY DATE: 2001-12-06
ggatgatcaggccatggctctcctcgatggccttccccagcttgccgtcgagctccatcatcatcctcacagccgacggctcgccgaacgtcgccatgagatcctcaagcgtgaccctgatgtgcgggaactccggcaccgcgagcgtcgctgggtatccgtcgtcgtcgacgtcgccgggctccataacggcgcacaggccatggcggtttctcagctcacgcatcacctgcgcgaacgccgagatgccgaagaaggacatcttggggacgccgagcacggccgccgactcgttgacccagtacaggaacgcgtcggcgacgatgaagctcgccagaggccacatggcggcgacggccgcctcgaactgcggccgcagcagcgacacggcgtcggtgaaggtgacgaacgccgccatggacgcgagcccctcggcgctctcgacgcccggcgggattgttggaaataaaccttacacgatgtatctagtagtagctagttttacgttcctttctgttgctgcatgcatgttagtttttctgttgttgcatgcgcgagctccgggttgtggatgccgtgcacgtagtggctgtcaacgagattaactcgcgactggcctggacaacgggacgtgaacgcgtctctcggatcgcggggatggacgcgaaagaaccgggacgtgggatcgaatcctaagtctgtt

SEQ ID NO: 19415 - DNA, 2166 bp, Oryza sativa
  ref <308>: DATABASE ACCESSION NUMBER: AK069776
  ref <309>: DATABASE ENTRY DATE: 2001-12-06
gggaggaatcgtcccgtcgtccggcgtccccccctgtatccccctcccctcgcacggcgatcggatccagcgcacgggtggggaagcaggcggcgccgctctcccccacgcacccgaagtgcggcggcggagcaggaacctcacttcttggtggcggttgaatctgaaatttccaaactcggaaggctagtaggcaatggccgtggcactagaggcagggaggaggaagcgagcggcggtggtagttctgggagacattgggcgcagcccgcgcatgcagtaccactccctctccctcgccaaccaggctggtatggaagtggacattgttgcaaatggaggaagtgacccgcatctattattgagagaaaatccatcaattcacatccatgaaatgaaatcagtgcagttaacaggaatattaaagatatccggtgccctgacactgctacttaaagctgccatccagtttatcatattgatttggtacctttgtttcaagattcctcgccctgatgtcttcattgttcagaatccaccctctgttccaacattggctgctgtaaaactggctagctggctaagaggtgctaagtttattgtggactggcataactttggatatacactgcttgggttgtctcatggcagaagccatatcattgttaaaatctacttctggttcgagaagcattttggacggatggctgatggtgccttctgtgttacaaaagcaatgaaacacgagcttgatcaaaaatggggaatcaacgcaacagttctttacgatcaatctcctgaatttttccatcctgcttcattgacagagaaacatgagttgtttagcaggttggggaattccatttgtagtgctatgggcaatgacgattgcatttctgttgagaaagaagtggaagacaggaacactactgtatttacaagctgggtcgatggtgaaattttcttgaagcctaatagaccagctcttgttgtcagcagcacaagctggacaccagatgaagatttcagcatacttctggaagcagcacttatgtacgatagacgtgttgctgcaactttaggagaagatgattcaatggacgagggaaagctttggattgatatcaagaacgggaagcaatttgtctacccaagactgctattcattatcactggcaaaggacctgataggatgaagtatgaggagcaaataaagaggttgaaactgaggcgtgttgccttccggactatgtggcttgcatcagaggactaccctcttttgcttggatcggctgatctaggtgtatcattgcatacttcctcttcagggctagacctacctatgaaggtggttgatatgttcggttgtggattaccagtttgtgctgcttcattctcctgcattgatgagcttgtaaaaataaataataatggacttcttttttcaacatcttctgagcttgccgatgaacttatgatgctctttaaggggtttccggaagaatgcgatgacttgaaatccctcaaggttggtgccttgaatactgggtcatcttccaaatggtcgacagaatgggaacgttatgcactccccttggtgaaccaggtcataggttgaaatgcatgataacattcgacaggtaggcaaatcatgtatttgttacagcttgcttgaacatctgttcattccagagattataggcgcactgtgcacttgagtgagcatatggcatatgtacatttgaaggttggggagagaccatatcatatttttgtttgcttacaccaaggcaggatgtatgacaactagaactgaccctttagtttgatataggacctgactcgaatctcctttgatattttatttggtaagcaaaagggaaacccttttttgtaatagaagttgacaacacgttttgtaaacagacatgtacatgtactgaagtacggtcgtacaaaaaagaaacgctagtctcctctctcaagaaaagaaaaaaaaatccaggaaattgttcttgttgcctctttactgccaccgggggtgtctatatctccagatccaacacaatgtctggggaatgaattcaaggatgtaaaacatcagattctatatatgttagcctgcaagaaccgctacaatatactattctcattttctgtcagacg

SEQ ID NO: 19416 - DNA, 795 bp, Oryza sativa
  ref <308>: DATABASE ACCESSION NUMBER: AK069777
  ref <309>: DATABASE ENTRY DATE: 2001-12-06
gagggagatacttccatctcctatcttcttcccttccaaaacccccatctcatcccactccggcgtctcctccgccgacgtcgccatggggcaagcctgggcgtctctccaggataaactccaagggaggcaatggaaggagaagcaggtgaggaagatcacggacaaggtgttcgaccgcctcaccgaggacaccaagaagcgcgagcaggaggccctcaccttcgaggaggtctacatcgccgtcctctgcgtctacaacgacatcaacaagtacttaccagggccgcactatgatccgccctccaaggagaagctcaaggccatgatgaatgagtacgacatcaacctggacgggctcctggaccgggaggagttcgcggagttcatccggaagctgacggcggagtcgctgtgcgcgatcagcttcaagctgctggtgacgctggtggcggcgccggcgctggcgctggcgaccaagagggcgacggagggcgtgcccggcgtcggcagggtggtgcgcaaggtgcccaactccatctacgcctccgtcatcaccctcggcgtcgtcatggcccagaaatccaccgagggcgtcgagtagacggccatccgattcgagcctgcgagattcagagctcgcgagctcgatcgaaccgacgacgtcgtatgatcgtaacgtgtaaatgctgcactaggcagcagggatagatgctgctgctgctgctttgatttgttactattttgtttgacgctttaatgggagttgttttaaaattgttttaaaattttcgc

SEQ ID NO: 19417 - DNA, 1062 bp, Oryza sativa
  ref <308>: DATABASE ACCESSION NUMBER: AK069778
  ref <309>: DATABASE ENTRY DATE: 2001-12-06
ggctcacactaggactctgtccacaggttccacgttcctgatatggttcggcccgacgccgcggctggccatcgccgacccggagctgatccgggaggtgctcctggcgcgcgccgaccgcttcgaccgctacgagtcgcaccccatggtacggcagctcgacgtctgcggcgctgacggcgtcccctctcgcgagcagcttgccaagctcaaaacgctcgggatgatcctgaacgagacgctgcggctgtacccgccggcggtggcgacggtgcggcgcgccaaggcggacgtggagctcggcggttacctgcggatcccacgcgacacggagctgctgatcccaatcatggccgtgcaccacgacgcgcggctgtgggggcccgacgcggcgcagttcaacccggcgcggttcgccggaggcgtggcccgggcggcgaggcacccggcggcgttcataccgttcggccttggggcacggatgtgcatcgggcagaacctcgccatcctggaggcgaagctgaccgtcgccgtcatcctgcatcggttcgagttccggttgtcggccagatacgtccacgcgccgacggtgctgatgctcctccacccgcagtacggggcgcccatcgtcttccggccccgctcatcatcccaaccaacctgtgaaaagatgaacccgctaaccagcagctagccgtgtcagtgtcaggatgtcgttgctctcacactctctctatccatccgaagagggaagcagagagatcgtaggaccaagttgtagcgagagaatgactcacaattaaagaaacgaagaagaagaagcatcttttactgtactaacaataattaacctgcctgcagacgatgaggatccatgcatcagcagcagcagcagcagcagcagcttagattaggataggagtttagaggccttgagctggctgtatgactgtatctcccaatttttttttgtctgcattctagtttgatgatttcttccttggattggagggagggttttggtgatcagtttggtgtatgaaatgaaagattgcaaagtgt

SEQ ID NO: 19418 - DNA, 932 bp, Oryza sativa
  ref <308>: DATABASE ACCESSION NUMBER: AK099109
  ref <309>: DATABASE ENTRY DATE: 2002-08-28
gttccattttttttggccgggagagagagcatctagctagggagagaaaggaagagacgagaggagagagatggccactgcttatgctcccatggcgagccagctgatgaagagcagcttggtgtgctccaagccgagggggctgtctggtgcttcgctgacaaggaggccccgcttcacagtcaaggccatccagtctgagaagccaacgtaccaggtggtgcagcccatcaatggcgaccccttcatcggcagcctggagacgccggtgacctccagcccgctggtcgcctggtacctctccaacctcccggcgtaccgcaccgccgtcagcccgctgctccgcggcatcgaggtcggcctcgcccacggctacctcctcgtcgggcccttcgcgctcaccggcccgctccgcaacacgccggtgcacggccaggccggcgccctcggcgccgcaggcctcgtcgccatcctcagcgtctgcctcaccatgtacggcgtcgcctccttcggcgagggcgagccgtccacggcgccgacgctgacgctcaccggccgcaagaaggaggccgacaagctgcagaccgccgacggctgggccaagttcaccggcggcttcttcttcggcggcatctccggcgtcctctgggcctacttcctcctctacgtgctcgacctcccgtacttcttcaagtagatcttttgtttgtaagtgcatgaccgggtgatgcatgtgtagatcgatcgatgatggaacatgtgtgtgttcatgtggtggctgatttgagtgccttctacttgtataaatgaaatgcatctgcacaagggcacaaacaggctgcctgcatggatatatggatggtgtgctgttgtaacttgggagtgttactttcttactttgcagataatttaaaatggaaagaaaaagtttt

SEQ ID NO: 19419 - DNA, 1157 bp, Oryza sativa
  ref <308>: DATABASE ACCESSION NUMBER: AK069779
  ref <309>: DATABASE ENTRY DATE: 2001-12-06
cctgagcctaccagggacagacaaccaccgcaaattggagggaacggagcagaaggtagcgaagcgaaccaagaagtcttcagtattccttccttgcaagcatcgttaatggaggggtcaacgagtcaagaccatgtgattgggatcccggtgagcaacaccgcctatggcatagaggagccggacttcgcagcggaggagacgaccacccctgatcatgccggtttcgttgttggttccttccaattcaacaacgatgcgaatagcccgacgacgacgacgacgacaaccgatcgggcgagcaaatatggcaggaagggggacaagattgcacagggcatcaaagaacatgtgaccctcgggccgaagctatcggaaacggtcaaggggaagctcacgctgggcgcccggatcctccaggccggcggcgtggagaaggtgttccggcagtggttctccgtggacaagaacgagaagctgctcagggcgtcgcagtgctacctgtcgacgacggccgggccgatcgccggcatgctgttcgtgtcgacggagcgggtcgcattccgcagcgaccggccgctggcggtgtccgccccgggcggcgacaaggtgcgcgtcccgtacaaggtgaccatcccgctgcggaaggtgaaggccgccaagccgagcgagaacaagcacaagcccgagcagaagtacatcgaggtcgtcaccaacgacggcttcgagttctggttcatgggcttcgtcagctaccaccgctcgctgcaccacctggagcaggccgtcgcgcaggcgcggcgatgacacgcacgaagcgcgcaagcgcgcgcacccatgtcgtggcggagctcgctctcgatcggatcggtctcttcgtgtcgtacgcttgtgtatgtgcgtgcgtgcatctgtgtcactctagcttggtgatgcttagatgggttaggatttgtgtatgcgtagggttgatcgatcacaacatgtcgttgtgtgttgggtcgccatggctggcctgctggtggattgatcgatcggcatgcagttttgcaattgcatccagcaggttagatataggcggcttgattagggcatgcgatggcatgtgatgttttgtggggcgtgtgcggaattgaaattcatgaagaagttggatg

SEQ ID NO: 19420 - DNA, 3290 bp, Oryza sativa
  ref <308>: DATABASE ACCESSION NUMBER: AK069780
  ref <309>: DATABASE ENTRY DATE: 2001-12-06
gattccccttctccccgaaactctcccaaaccccaagtccccaaccatggcgaccgccgccgaccaaaaccctaacgacgcggagcaccgggaggccgcggcgggagccaatgcggcggcggaggagtacgaggaggaggatgaggaggaggaggaggtggagctggacgggccggcagccgtggcggcggagcgggagaaggtgcaggccgtgttcaagcggctgtcgtcggaccccgtgggcatccgcgtccacgacgtgatcatcaagggcaacgccaagacgaaggaggagctcatcgaggcggaggtcgccgagctcctccgcgccgcccccaccgtgcaggacctgctgcgcaacgccagcatcgccagcgcgcgcctgcgccagctcgacgtgttcgactccgtcaacatcacgctcgacgccggcccaccagagctgcccggcaccaccaacgtcgtcgtcgaggtcgtcgaggccgccaaccctatcacggggagtgcgggagtatactccaagcctgaggcaagatcttggtcacttgaaggctcggttaagttgaagaacctgtttggctatggtgacatctgggatgcttcaggtgcatacagttgggatcagacatctgaggttggcattggagtgtccctgccaagatttaaatcaatatcaacacccttgatggctcgggcgtcattgtcgtcccaagattggctgaaattttcttcttacaaggagcgcctgcttggcctttcatttggtttgatttcaaccatgcaacatgatttgtcttataatcttacatggcgtaccttaactgatccatcacaagtctcatcgaagtccataaggaggcaattagggcacaatcttctctctgcgttgaaatatacatacaagattgatcaaaggaattcacatctcaggccaacaaaaggatacgcgtttctctcaacttctcaagttggaggtctatgggatagcaaagggttgagatttttccgccaggagtttgatgttcgtggtgctgtacctttgggattctataatagtgctctcaatgttggccttggagtgggtgccattcttccactggggagaggatttatgaatctatcttcatctgtgcctgatagattttacctcggaggtcattcttctccagtttgcagcttgagtggactgtcatccttgttgggtttcagaacaagagggattggtccaacagaaccacggaggcttgtccctagtgaatctgaggatggatctgctgcctcaccagggcgggattacttgggtggtgatcttgctgtctctgcctttgctgacctttcgtttgatttgcctctgaagatatttagagatgctggaatacatggtcatgcatttctaactgctgggaaccttgcgaaactgtcggagggtgagtataagaagttctcactttctgaatttgggcgtacatttaagagctctgcaggtgttggcattattttgcctactaagcttttccgagtggaggtgaactactgttacattttgaagcaggctgagcatgactctgggagaacgggaatacagttcagcttttcgtcacccctgtagtgaccagaaataccttttagccaaagttagcttctcccgtagaatgctattgctgccccttatattctttcctgcttaatcaaacttcccaacaaacatatttgcatttcattgacttcacctgtgctatgacgctcttttatcggcacgaggagcctagagtatctaatactgttcggcattttgcacttctgagaagttttcccttctttttgcaccaagtgatgtcaagaacaacgtttgtacaactggaatacaaatgctgcaattggtggaggcaataaaatttttgggaaactgtttagaccgaagatgctttggttcgtgcactcatatgttggtatgtttgccagtcctgcatggtaattataccagggattgtcttcatcattcatagggaaccgtttcgattctgatgaaatgtctggtatgatgcttgcttgtacactagtcgaaatctttctaactacacattttccacatgccataaactactggagtggtacactagtttctggacgcagcggagttgagggcggctcgacgctgccggagtttctggacggtggcaaacagccattggttgcacccggagactgctatgagcggtcacgcgcttacgagtaacagggacaccgtgtaggcgttctaccaaggctggacgagtggatggattatggatatcgacgttatgctgcaaagttctactcgaacttgccaagaaaattctgattacccagcaaaatccaaagccatctccgccagccgaaccccaacgaaaacagacacaagaccggtgctacacccagaggccatcacttcagagtacaacaattcagcagaggaaaccaaagctttcctgccaggaacatacgacacgctagtactctaaccgcagtcaacagccttttacagctgagacggcacagagcaatattgtgggtagttcggcaccggcaagaccgtcagtaaagtttggtggcgctgcctgcctgacggcctccggccggtggcgcggcgccccccatgatctcttgtcgaagcaacaggtgaaggcaaaagcatgcagctcgcaacagaaaggcgacgggtgacagatcgcggacgatctgtctgggcaacaggtgggacggttggtggccatttcatgtcacgcttctcgcgatcatactatgatttctgcacagaaatggactgaaataggagttgatacatgtcccatgactagatcactagacttcaggggagaagaatgagggagccggatgcgactcaaacatcatactcctgatcagatatacggaaagtgagcacaagccacacaggatctatcaaagtcccaaaagactaacctttgaaagaaggttcattgtatgacttggactcacccaatgacagacattttgctccctttcatgggtacctcgccgactatttaacagagcagaacgttcaacttcaccagggtatcagccttgaatattatgtgcccaagaatagcaagttactggttttgtccagcagtagtttttcagtctcaactacttgaagaaaatgtcaatgaccgatgttatatcatctgtaattctgcaaacgtacccaattcttgctaattcagagttgtaaagactgatcgaccgtgcgtaaccatttaaggcaacaatggaacataacaaatgtg

SEQ ID NO: 19421 - DNA, 1416 bp, Oryza sativa
  ref <308>: DATABASE ACCESSION NUMBER: AK069781
  ref <309>: DATABASE ENTRY DATE: 2001-12-06
ggctattgggctccctcgtcctcgtcttcccctccatccgccaccgccgccgccgccgccgccggcgatcttctcaagtgccgccgccggtggttcgattctttctttctttctttctttcttttttccccaatccgttcgtccgccctccacctccgacgcggcggcggcggcatgaagcggcaccagatggagtcggtgccgaggacggtctcgacggtggtgcccaacacggcggaggccacccacgtgttcgacatcgtggggtacagccagatgaaggggaggggccgcgaggagcacgtcacgtcggggaccttcgtcgtcggcggcctccactgggccatcctcctcttcccggacacccacgtcatcctcctcgacgacgaggaagacaacgtcaccgccttcctcgagctccagagccaggggggaagcaaggtgcgggcgtgctgcgacgtcaggctggtcgaccagaccaccggcctcgcctcctctgctgcgccggcgcagccggatgccaagacattcaaggtgttcaatgccgatgaatccaacagggtcagctgtctcaagatgaagaggaccgaattcgaggcgccgccgtatctcgtcgacgatcggattaccctggagtgtgtggtcactgtcaagaaggagccgagggtgtcgagagctagaccagtcccgaggatcaaggtgccgccgagcaacatgatgcagcaactcggcgatctgctggagtccaaggagggggcagatgtggtgttcgatgtcgcgggggagaccttcccggcgcacaagcttgtgctggcgatgcggtctcctgtcttcaaagcggagctatgcgggccgatgagggagagcgggacagagcctatcagcattgtggatatgcaaccggttgtgttcaaggccctgctccagttcatctatactgattggttgccgtcaattcgtgatcttgagggagacgataacagcgagatgatccggcacttgcttgtcgccgcggacagatatgctgtggacaggctgaagctgttgtgtcaaagcatcctttgcaagaatcttcgtgttggtaacgttgcaactacactggctctggctgatcaacatcattgtggcatgcttaaggatgcttgcattgaatttatgtcatgtccaaacatgttggatgatgtagtggcatcccaagggtttgtggatcttgaaaacacagctccttctctcgtcgcttaggcaaaggaaaaaatgggcaggttcaagaaaatgtcgaggatgacaaagagcaatgcaccggaagatgaacctaacagtaattcgtttagtttataagtaatatggatatctgtctacttttactggatcaggtccttgtggttactttactctctatataaatagaaataactt

SEQ ID NO: 19422 - DNA, 2709 bp, Oryza sativa
  ref <308>: DATABASE ACCESSION NUMBER: AK069782
  ref <309>: DATABASE ENTRY DATE: 2001-12-06
gagtttccattcccgttccgttataataagaggagagagagagagattttgggtttgtctccggctccgctcgccgcctccaaatcccgctcctccgctgctgctcctctctgccgcggcgaggcgagagatccgaatccaccgccacccgcgcccaccccgcccgcacaaaccctagtttttccggggttttgcttcccctccgcagctccgctccgctccgtccgtcgtctcctcccggcggctcggcttgctgtccatgctgtagccgccccccgcaggtggctgatgggctcccagaaccgccccccaccaccgcgcaagaggcagccgccgccgccggaggaccacctcgtcacctacaagcgccgccgctccaaagaaacacagcctttgccactcatggccaacggcgccaattctaagaaagacgccaaggcccaacattggattagctggagggacactctccacggcttcctccaatcccctgctattagccagggtggaggaattcagacctgcatccgtcatgctctccaacacaatccttgcttgctcaccaatggtgttgttgttcacactgaattcaaaggtaacccagctcattcccaaggagaggaagcaaaagtgcagcaccctaatggtgctgctggaggcaaggtggtttctgcagatgctgctatacaagatgcggctgccgcagcttcttccgaagctaacaaggcaatgtgtaataatgccctcttcgtcattttggtctcccagaaatttgccttgttgtgccatttgctacttgggaccttccatgtcaataaacctggtgatgtcatcgacttggaaaaaatcgacgccaagatgagaaatggagactatgcccacaaccctgcactatttgacgatgatatccagcagatgtgggagaagtttgagcaagttggccaagagatgacaggtctagcgagcaacctttcaaccatttcacgagtttcataccaaaagcaggcttctggattttctgaagctgaggtggctgagcacagaatagaggaaataagtttgccgggtgctgtccacgttgtcacaaaggagtcgactaccaccgtgcagttggccccatgtgattctagtcattctacaataccgaaacgaactgtgccacctggacgtgatctgtgcccttgcgatggttgtggcaccaaggtagatgttgaagaaggcctaatctgtgatgaatgtgacaccatgtaccactttgcatgtgtcaagctactcaatcctgatattaagcaagtcccagcaatctggcattgttcaacctgcagcttcaagaaaaaagaattggctgcagataccacgaataatgttgcccatgactgcttgcatggtggtaactgtgttttgtgtgaccagctcgagctggtgaagacagaagaagaagatcccaagcttcccataaaaattgaattagctgaagaaagagaggggagctccgtctcaagcatgggggaagacaatgaaccagacctgtcaacaactgccctgtcaaacttgtgcaaacactgtggcacatgcgaagacgatgacaagagattcatggtatgcggacatccttactgcgtttacaagttctatcatatccgatgcctgaaaacaagccagcttgcaattgagcaacaaaagaagcttggttgctggtactgcccctcttgcctctgcagagggtgcttccaagacaaggatgatgaccagatagtcatgtgtgatggctgtgatgaaggttatcacatatattgcatgagaccagcacgcaacactatccccaaaggtaagtggtactgtacattttgcaagatccgcagggcagcggaaggaatgcataagtatgaggattctgtgctgaaaatacatgggaatagtaagcatgcttgtaatgtgaatcagtcgaaggattctgaaggtgatggtactggaaagtgatcatcacaatagctttgtggattagcttctgagctcgcttggacaagctcaggaaaagagattctttggccccttaggagggctatacacagactttgatactgaatcagttgtgtagtttatttaattaactgccgttgacatctacaggaagaactcttacctggtgaagatggtgtatgtagtcttttagctgggcggaatgatgtgttgtttacttgttcaccttccttctttaccccctttcagtgaccattgtgaatgttgtcctgtacttgccctgtgatggtattcttaaacgtttttttgggggaaatatgattttgtttttttaatctcctttttattgcttgattcgtcattgtttatagcctgtgatcgatgattgtgaaggtttatagtctgtatgttgtgtatgtaatggtttggttgatcctgaagctttttggaggtcttatttcagtcgaggacaagcatgagagtcaaggaagaaagtggatcttcattttgtcagacaattgtgacagtcatggagcatgtaagtagtactagtatatagtttgagtgtatgactaaccctgaatattcattcctatagtaaatagtactcctatatcatattagagattctgtggttggattaataagtagtgtagctatatctccagatgatgaatttatatgtgtccttgatatgaattaatgatatttgtggtgagtgttgacctc

SEQ ID NO: 19423 - DNA, 999 bp, Oryza sativa
  ref <308>: DATABASE ACCESSION NUMBER: AK069783
  ref <309>: DATABASE ENTRY DATE: 2001-12-06
gagcagcatcacaatcagcgagatgcaggcggcgctcctactcccagcgcggccgtcggcggcggcgccgcctacgctcttgcggcggggggcggcttctgcgtcctccgcgcgcgctcccactcccctccctgcggggcgcctcagcggcggcgtgctgagcgctgtgcggcgccttaccgtggcggcggcggggtcgtcgtcgtcgtcgtcgggccctctctacccgacgcctccccccaccgagcaggacatcgagcgggccaagttcgagcaggttgtcaagagactggggaaaacagcgaggtatttcaagaatttgggtactcttgggttctggtcccagttggtgtccacagttgtttccgctggaattttgtcattttctacagttattactgggaaggtgacagcaccttttacattctatgcaactgctgctggtattgccgcgggttttatttcagtcttctggtcatttggttacatccgcctttctgaaagacttagaaaaacagcaagtgaacctgctaaggctcctccacgtgctgatgtaattagaagtctgaaaaatggcattgtgctcaatatgctcgggatgggtgctgcagttctcggcatgcaagcaactgttggggctttggtagcgaaggctcttactacctctgcagtaccttactatcaagcaacttcccctggtcaaagtcctgttttggctctagatgttttcctagttcaggcttcagcgaacatcatcctgtcgcatttccttggcctggcgagctccctggagttgctgcgctccgtggccatccctccagcagaagctgctgcggcgtgagcatatcagcgcatatgccaaaggcaagggctcccgttgatcatcttgctcttcatttgctgcttcgggctttggtattcgctaggagtagcaccgctcgtccgcctgtatgtttcttgtccagacaaaatttaaaaaaaatctagctttcactgcgt

SEQ ID NO: 19424 - DNA, 2399 bp, Oryza sativa
  ref <308>: DATABASE ACCESSION NUMBER: AK069784
  ref <309>: DATABASE ENTRY DATE: 2001-12-06
ggccgcccctgccccgtccacaggcacagcccatacgatttcccttctgaatccgcctgatcgcctcctccgccaccgccgtgttcgattcgtcttcccgcggcggcggcggcggcggcggcggcgaggaagatgggggtggaggtgccgccggaggagtccaaccggtgcgtgcgcgggtgctgccggagcgccgccatcccgctccacctcccgccctcctccttctccctcctctcccccatcgccaaagggtcggagagcacggtgtacgaggcgcggctgggcggcgagcgcgtcgcggccaagaagcccgtgctgtccacctccgacgacctcgacaagttccactaccagctgcagctgctctggtgggtactccccattgaactggatcacccagggttggcgagactggtcgcagcacatgcacgtcctccgaattacttgatgttctttgatttctttgaacctccaaaccttgcggacaagatacatgttgaggagtggaacccttctgtgcagcaagtggtcaccattgccactgatctagcaaaggctctccaatacctaaacatccttggcatagtacacagagatataaagcctgcaaacattttgatagataaggacttccatccacatttagcagattttggcttagccatgtaccagaaggacatcaagcatgtttcagttgaaaactggagatcatctggcaagcctactggtggtttccataaaaagaacatggttgggacattaatatacatggcaccagaaattttgagaaaggacatacatacagagaaatcagatgtatatagctttgcaatatctatcaatgagctacttacgggtgtggtgccttatacagacctacgagcagaagcacaggcacacaccgttcttgaaatgacttacaccgaacaacaacttacagcagcaattgtttctcaaggattgcgcccagctcttgcccttcctgagtctggtgctccacctagcctcttgtcacttatccagcgatgctgggactctgatcctcaacagagaccatcatttaaagatataactgaagagttaaaaataattgaaaagcatatagctgtaaattcttgctcactagcatctcctgcaaacaagagtcaaaatggcaacacagaagttcaccactatcaagaagcattgagctggttgaaccaaggggagttgtttgcaaaaggaaacaaattggacagtacagttgaccattggtctgatattttcgatcagtcctctaagtactgtccaacattaagttggggatcttttgcaacatgtggtcgaagagaaacaatggaagatacccattttatgcttccccacatgagcgaagaaaaggatctgcatgcatttggcatttttgatggtcacagaggttcagcagctgctgagttctcagttcgagcagtccatggttttctcaaacagtttaattccaatacaagcccaactgatgcccttacagaagcatttgtaaggactgacatagcatttcgagaggaattaattcttcaccagaagtcaaaaaggataacccagaaaaattggcatcctggttgcacggcagtgacagcactgatagtgagaaacaagctttttgtagcgaatgctggtgattgccgggcaattctgaaccgtgctggtgaaccatttcctatgaccagggatcatgttgctagttgtccaaaggaaagagaacggattgtaaaggaaggaactgaagtcaaatggcaaatagatacatggcgtgttggtgcagctgctcttcaggtcacacggtccattggcgatgatgatcttaagccagcagtcacagcacaacctgaggttatagaaaccattttatcacctgatgatgagttcctggtgatggcaagtgatggattgtgggacgtgatgagcaacgaggatgtcctgtccatcatcaaggacacagtaaaagagcctggaatgtgctccaagcggctggccacggaggcggcagcgcgtggcagcaaggacaacatcactgtcatcgttgtgttccttcgccccgtctccactgctgagcgaatatactaaccacaaagccttgttggtaacttcatcatttgtcagaatttttagatactattatcaccactgtaaaggaaagaagccaccgattcgttcttgtacacaaattggatttgctgattaccctgtctagggcagaaagatgattaatctttctgataggagatatagcattctttcattggtcaatgtttatgcaactctgattcatctcatttgtgcaccttccaggccaaaagaacaaaacatatttattcaatacttatctcaataaaattttgtggaattgtcgatggtcc

SEQ ID NO: 19425 - DNA, 1705 bp, Oryza sativa
  ref <308>: DATABASE ACCESSION NUMBER: AK069785
  ref <309>: DATABASE ENTRY DATE: 2001-12-06
gattttcaacgccacaaaccacagactgacaagctcatcctgttcccatctcaactgcggtcactcaccaatggctccgccgcttctcctcgtctcgctcctgctcatcggcttcgtcagcgccagagccatcacaccctcagctgaagcggcggcggtgttcccgaaggaagccctgccgaccaactccggctacctccccatcacgacaaccaacgcctcgctcttcttcgcctactacgaggccacgcacccgctcacgccgccggcctccacgccgctcctcctctggctccagggcggccccggctgctccggcctcgccggcaatttcttcgagctcggcccctacttcgtcaaccgcgacgcgctctccctctcgcccaaccccttctcgtggaatcgccggtttggtctcctcttcatcgacaacccgctcggcacgggcttcagcgccgcgccgtcccccgccgccatccccaccaaccagtccgtcgtcgccgcgcacctcttcgccgcgctgcagtcgttcttcgcgctccagccgggctcccgctcccgccccttcttcctcaccggcgagagctacgccggcaagtatatcccggcggctgggtcgtacatcctggccgtgaaccccacgctgccgacgcggctgcgggttaacctccacggcgtggccatcggcaacgggctgacgcaccccgtcgcgcaggtggcgacgcacgcggacaccgcctacttcatgggcctgatcaacgccaagcagaagcgggagctggaggcgctgcaggcgagggcggtggagctgacgaacgcggcgaggtggagcgaggcggccgacgcgagggggctcgtgctgtcgtggctggagaacgcgacgggcctggcgacgctgttcgacgcggcgaagaagagcccctacgagacgggccccgtggggaagttcgtgaaccgggcggaggtgaagacggcgctgggcgcgcgcggcgacgtggagtgggaggagtgcagcgacgcggtgggcgcggcgatgcacggggacgtgatgaagagcgtgaagccggaggtggaggcgctgctgcggggaacgcgcgtgctgctgtaccagggcatccgcgacctcagggacggcgtggtatcgacggaggcgtggatgcgggagctggagtgggacggcctgcccgccttcctcgacgccgaccgcgccgtgtggcgcatcggcgaggagctcgccgggtacgtgcagcgctccggcccgctctcccacgtcgtcgtctacggcgccgggcacctcatgccggcggacaacggccgcgcggcgcaggagatgatcgaggattgggtgttgcaggcggggctattcgggcgccacggcgggatgaagcgcgcggcctgactccgcactccgggcgccggcggaggccaacctgtggcctcatctcttgcggtgtcaaactctaatctgattttagaatcgagcagagtacatcgaggaatacaagcatttgagtctataattttttcttctggtgtggttgaattcatcgtgataaactatcctgatttcattgggattatctcctctagaaggcagcttattcaggtttgttttttgttcagtccaagatcagagggcaataccgaaggatcactttgtaccaaactaccaatgcagtatattcaataacaaggacttagaagc

SEQ ID NO: 19426 - DNA, 1362 bp, Oryza sativa
  ref <308>: DATABASE ACCESSION NUMBER: AK069786
  ref <309>: DATABASE ENTRY DATE: 2001-12-06
ggcatatggccttggcctccctcgccgccgccgcatcgctcctccccgccgccgcggcgaggtcacgcgtgtcgctcgcccgctgccgcgggatggcctcctcgtcgtcaccatctgcggccgcgggggcatcggcggcggcgagggtgggcgtggtgcagatgacctccgtgggggacctcgacgccaactacgccacctgctcccgcctcgccaaggaagcagcatcctctggtgtcaaatttctttgctttcctgaggtattctcattcataggctccaaggatggcgagtctattaagattgctgaaccattagatggcccaataatgcagagatattgctcacttgcaaaggaatcaagtatgtggttgtctcttggagggtttcaagaaaagggtcctgatgattcacaccagtacaatactcatgtactaattgatgattctggagaaattaggagctcatatcggaaaatacatctgtttgatgtagatgtaccaggcaatatggtgtacaaggaaagtcgttttacgacagcaggtgatactgtcgttgcagtggatagtccttttggacgacttgggcttactgtttgctatgatttgagatttccagagctttaccaatgtttgcgctttaagcatcaagctcaggtcttactagtaccatccgcgttcacaaaagtaactggggaggcgcactgggaaattcttctccgagctcgtgccattgagacacaatgctatgttattgcagcagctcaagctggaaaacacaatgagaaaagagagagctatggtggttctataattattgacccatggggaacagttatagctcgacttccagaccggctgtccactgggtttgctgtcgcagatgtagacttgtcaaaagttgaggctgtgcgaactaaaatgccaatctctgagcaccggaagtttgacagcgtctggaaaacctcatcactgtaatagtatagaggtcttgcacgcctcctttctctttcttttttctttagagaacagtcgacctattattttgtgtatcaaatatcaattgcaaggcacacatgatgatccaatggtttgatcggcggtaaacttcaattgcgaagccatggttgctgtgaggtttcttggtttgaagaattcctggttcagtggaacttcaagatcccaaatccccaattaggctaggaatgatttgtcagaccaaatagtccataaataatagtgttggcttgaacgcgacgccaccaacctaggacatttcaaataagtgattgccattgaatctaatgtaaatttgttatggtacatttgttgataaatcaaagcttggattttttttttggtt

SEQ ID NO: 19427 - DNA, 2362 bp, Oryza sativa
  ref <308>: DATABASE ACCESSION NUMBER: AK069787
  ref <309>: DATABASE ENTRY DATE: 2001-12-06
gatcccgcgaggggtttaagagcgaagccctcgccgccaccccgcctagggtttttccggatctcgccgccgcctcctcctcctcctctccacctccgccgccaccaccgccgccgccatggccatcggatctctcatcgcgtcgaggctggccaggtccaccggccacgccctcgcctccgccgcctctcaggctccgatggcccgtcacgcggcggcgtctcctctgttgtccaggcttggatcagtggctcgtgcgttcagctcaaagcctgccgccgcggatgttattgggatcgatttgggaacgaccaactcgtgtgtctccgttatggaagggaagacaccacgagtgattgagaatgcggaaggcgcaaggacgacaccctccattgttgccaagaaccagaatggtgatcttttgttggcataaccgcgagtcggcaggcagtgaccaatgcccagaacacggtccgtgggtctaagcgcttgattggtagaacttttgatgacccacagactcagaaggaaatgaagatggtgccttacaagattgtcaggggacctaatggtgatgcttgggtggagatgggtgggcagcagtactccccaagccagattggtgcatttgttctcaccaagatgaaggaaactgcagaggctttccttggcaaaactgtctccaaggctgttatcactgtcccagcttatttcaatgatgctcagcgccaggctaccaaggatgctggtaggattgccgggctagaggtgatgaggattatcaatgaacccactgccgcagctctgtcatatgggatgaacaacaaggagggtctgattgctgtatttgacttgggtggtggcacatttgatgtatcaatccttgagatctccaatggagtttttgaggtcaaggcaaccaatggagatactttccttggtggtgaggactttgatggtgcattgcttgactacctggttagtgagtttaagaagtctgacaacattgatctgagcaaggataagttggccttgcaaaggctcagggaagctgcagagaaggccaaggtcgagctttcctcaaccatgcagactgaaatcaacctcccctttattactgctgatgccactggtgcaaaacacttcaatattaccttgaccagatcaaagttcgagtctcttgtgcagtctctcattgagagaactcgcatcccctgtgtgaactgcctgaaggatgcaggcgtatctgcaaaagacattgatgaggttctactggttggtggtatgacgagggtgccaaaggttcaggatattgtttctcagatattcaacaagacaccaagcaagggtgtcaatcctgatgaggctgttgccatgggagctgccattcagggtggcatcttgaggggtgatgtgaaggagctccttttgctggatgtcactcccctctcccttggtattgagactcttggaggcatcttcacaaggctaattaatcggaacacaaccattccaaccaagaagagtcaggtcttctccactgctgcagacaaccagacccaggttggaatcaaggtgctccagggtgagagagagatggccacagacaacaagcttcttggtgagttccagcttgaaggtattccaccagccccaagaggtatgcctcagattgaggtcacattcgacatcgatgccaatggtattgtcaaggtgtcagccagggacaagtccactggcaaagagcaagaaatcactataaagtcttcaggcggtttgtctgaaagtgatatcgagaagatggtgagggaggctgagctacattctcagaaggatcaggaaaggaaatcattgattgatctgaagaactctgcagacaccacgatctacagcattgagaagagtgtcagtgagtacaaggacaaggttcctgctgaagtcaccaatgagattcagtctgctgtatctgatctaagagcagcaatggctgaggatgatttggagaagatcaagcagaagcttgaggctgcaaacaaggcagtttcaaagattggagagcacatgcaacaaggtggcggtggcggcagtggcggcggcagcagcagcagcagtggtggtgaccagactcctgaggctgaataccaggatgctgctaaggaagctaagatgtagatttgatctacatctagtttctacctttttttgttcatgtaataggaagttgacatcttacccacccctggtttcttaggtttctaagagggttgctatacctgtagcttttttgggcggagaatcgctgataaattgtgagcgggaacaaactcattggttaattgagccatccacgaaatatttcatt

SEQ ID NO: 19428 - DNA, 1089 bp, Oryza sativa
  ref <308>: DATABASE ACCESSION NUMBER: AK069788
  ref <309>: DATABASE ENTRY DATE: 2001-12-06
gctagccagctaattacacgatccatccatttgcatcatcgtcgtcgtcttcttcgatcgatcggctgatccagtaattcctcgatcggtggacgtacgccacgctactatcatcatatcaatccccgatcgacaggttaacatcgatcgatcatccaagccagccatcgatccatcagaataagcagctagcttggagaccgatcgatcgatcgatcatatgtcgattcgattcgatccgatggagagcagaagcagcagcagcagcagaagcgtggtgatgatgtgctgcgtgctgatgttgatgattgcggcggcggcgcatgcgggcgagcaggaggcggaggagtgcgctagcccgatgagcatcgaggaggcgtgccggggggcatcggagacgcaccacgcggtggcctacgaccactgcgtggcgtcgctgacggcggacccgcgcagcagcagcagcgaggcccgcagcctgcacgggctcgccatgctcgccacccgtatggccatcgaccacgccaccagcaccgtctgcaagatggacgacctcgcggagctggagcccgaggattcttcgtcgccgtcggacgcgcgcgcacggttcgagcactgccttgagcagtacggcggcgccgccgacctcctccgcgacgccctggacaacctcaaggtccgcatctacgggacggccatggagcagctgtccgccgcgctgggcgccgccgagagctgcgaggacgcgtggaagggcgacgagggcaacatccccatcgccgcccacgacagggagtacggcaggatggcccacatcgccatcggcttcacccacgccgccgcctaatcttcctcaatttcttccttacttccatctatcgcctgcctgcctctgcctaattttatttctactactccttattaatttgcattctcatcgatcgatcatccgctggaatttcttcttcttttacttaaattattattattattattattaattgctgattgaattgaatatgtactgtaggatttaattgttcatcagatgaaagacgaatgaataataacacgattaatttactgtgc

SEQ ID NO: 19429 - DNA, 938 bp, Oryza sativa
  ref <308>: DATABASE ACCESSION NUMBER: AK069789
  ref <309>: DATABASE ENTRY DATE: 2001-12-06
gtgggactagctagacatggcgatggggaagaatgggttgctggggtggctgtgcgtcgtcgtgccggggcggcggcggcggcggcgaggggcgcggctggtgctgtggggaggggagaggcgggcggcggcggccgggaggatggccggggaggtgatgatggagcacgcggggcgcctcgtggtgtgccgcgccgacgggttctgcctcggccgcgcggcccccgtgctcgccatcgaggaccgcctcgacgcttgcgccacctacctcgtcctccccgtcgaccgcctcccccagggccgcgacgtcgtcaccgccgcctcgctcgccgcgctcacctacgacagggccgccggcgccccgctgctggccggtggcgcgaagagcccgttcgagtacgtcaaggacgacggcggacggacggtgatcaaggtcacggaggagttcatcgtcaaggccgtcacggggaggcggccaccggctggcggcggcggcgagggggaggacgcgcatggggcggcggcgctgtgcagcacgccggagctgaggaagcactacgagcagctggtgggcgcggcgagggggcggccgtggtcgccgcggctggagacgatcaaggagcggaatgggcggcggagggtggtcgacgtcgtcgtcagccccaccggcaggctgtctccggtgaggttgctcgggttggacaagggaatcaagtagacatgcatgaaaattttcgtctaatcctctcttctaattggctgctgctagttttgctttgaagattgaagcgatttttggttggaaatttggattagatgtacatatgttttggatgggtatctcttgtttgtttctacaagaattttgtacatccagaccgatctctgtttgtaagtaaggtaaatgatttaccgtcaaatggcaaacagattgcatg

SEQ ID NO: 19430 - DNA, 1643 bp, Oryza sativa
  ref <308>: DATABASE ACCESSION NUMBER: AK069790
  ref <309>: DATABASE ENTRY DATE: 2001-12-06
gaaacccacctcgcgtgctctgtgcacggcggggacgctaaggggaggcgaggcgaccacgcgccctccgcgtcaccatggatccgcgcagcagccaggcgcaagaggacggcttcttccacccacgcgacggcgcgtgccccgccgactccagcggaaagacagaatgtaaaacccagggttcaattgccacgcgcaaggttcaaaaggctgatcgtgagaaaatgcgaagagatagattgaatgagcagttccaggaacttggaagcacacttgatccagatcgacccaggaatgataaggcaactatccttagtgatgcaattcaaatgctgaaagatttgacgtcccaggtgaacaagcttaaagctgaatatacttcactctcagaagaagcacgtgagttgactcaggaaaagaatgagctcagagatgagaaagtttcactgaagtttgaggttgataatctgaatacccagtatcagcaacgaatgcgtgtgctgtacccttggactggaatggagccttctgttgtcattgggccacccctgccatatcctttttcagtcccagtcccagtcccagtccctataccttcaggtgctgttcctatgcacccacagctccaggcatacccttacttccgaaatcaaacttctggaaccgtctccaatccatgcacaccttacatggcatacactcaacccatccatcctcctactgatcaactatctaaccaattcagtgctccagttcagcattcaagtagtaatcgatctcactctatggcccaagactctagaagcaagtcctctgcactgcagcaagtaagttgtagagggaaacatgatgactttgatgacgttgcaactgatctggaactaaaaactcctggttcctcagcccctctacaatcagagattgccaacaaggattcctcttctgacttgaaaaaaaagcagcagttcatacaggaaactaaaggtagttctcttacagaaggcagtagtagttcaagcagatgctcgtccagtggtcctccagatgtctctaacagtattgaaggtggatcagttgctgatgatcaacgatcgacagtacagacatagactaatatatgacgtatagctatcttttccgacattcctaggcctgcatgtgtggtgtaatctgctggcacatcaacctttgctgcttagctgtgcccacttgatatcggaattgacaaattaggaggcctataggcaaagtagaactggttagtcgaagccaaagccatattccatggctatgattatgaatggtcggtagttacccacactcttctatggcagtttgaaatgctttcggcgactaggtatgcttgcgactaacttctgcggtttgtcatctaagatatgcgtcaagtgccaaccagatctgttgagatagttctatcctggagtagcattttctacgaatatatggtaaattaactagtgattaaccatagaatttatcatggttcaatagttacctggtagatcagctacaagttgtacatcatacactatattaccattaattggaatatgttcttaagtatattatttgacatgattgtcagtatccacattttactatatataggcggcatgttattg

SEQ ID NO: 19431 - DNA, 967 bp, Oryza sativa
  ref <308>: DATABASE ACCESSION NUMBER: AK069791
  ref <309>: DATABASE ENTRY DATE: 2001-12-06
gttacaaacccgcaaacccactccgatcgcaaatactctctctcgccgatagcagcagcagcagcaatggccgccctcgccgccgcatccaccgccttcgccgccaagccgcgcctggcgcgcgcgccgtcgtccccggccgcgcggttctccgtgtcgtgctccgcgtcgggcaacaacggcggcgccggcgagatggcgcagtcgctggcggcgtcggccaagacgttctccgcggcgctggcgctgtcctcggtgctgctctcctcggcggcgacgtcgccgccccccgccgccgccgacatcgccgggctgacgccgtgcaaggagtccaaggcgttcgcgaagcgggagaagcagtccatcaagaagctccagtcgtcgctcgccatcaacgccaccatcgagaagacgaagcgccgcttcgagaactacggcaagttcggcctgctctgcggcgccgacggcctcccgcacctcatcgtcagcggcgaccagcggcactggggcgagttcatcaccccgggcttgctcttcctctacatcgccggctggatcggctgggtcggcaggagctacctcatcgccatcagcggcgagaagaagccggccatgagggagatcatcatcgacgtcgagctcgccgtcaagctcctcccgagggggttcatctggcccgtcgccgcctaccgtgagctcatcaccggcaacctcgtcgtcgacgacgctgacatcggctactgatcaccacatggatgcttggctactcaagccccaggtgagttgatttggcagtggaggaagagggctcgtgcatggtgatttgtgtggtttgggtgtagaagctgataggatcatggaggaatggaagatctgttgtacttaagaaaaactaagtcttgtataccgtacctctctcttgtgtgtatttaccatcttaagattcttgagaacaattccttcgtgc

SEQ ID NO: 19432 - DNA, 1903 bp, Oryza sativa
  ref <308>: DATABASE ACCESSION NUMBER: AK069792
  ref <309>: DATABASE ENTRY DATE: 2001-12-06
gacgagccgcttctcgcggcggcgccgccaacgcccggcaaggccgccgacggcgacggtccggaggaggggcgccggctcgcctccgcggaggcgaagcggctgctgcggctggccgggccgatcgtggccagctgcatcctgcagtgcgtggtgaacatggtgtccgtcatgttcgtcggccacctcggtgagctccccctcgccggcgcctccctcgccacctccctcgccaacgtcaccggctacagcctcctcacgggcatggcgacggcgatggacacgctgtgcgggcaggcgtacggggcgaggcagtaccacctgctgggcgtgtacaagcagcgcgccatggtggtgctcgcggcggcgtgcgtccccatcgcgctggtctgggcgtccgcggggcggatcctgctgctcctcggccaggacgcgggcatcgccgccgaggccggcgcgtacgcgcggtggatgctcccgtcgctcgccgcctacgtgccgctccagtgccacatccggttcctgcagacgcagaccgtcgtgctccccgtcacggcgagctccgccgccaccgcgctcctccacccgctcgtgtgctggctgctcgtgttcagggccggcatggggagcaagggagccgcgctcgccaacgccatctcctacgccgtcaacctcgccatactcgccgtctacgtcagggcgtccaacacctgcaagggcaggtggagcggcttctccggcgaggccttcaaggagctccgccagttcgccgcgctcgccatgccctccgccatgatgatctgcttggagtggtggtcatttgaaatccttgtgctgctctctggacttctgcctaatcctcagcttgagacatcagtgctgtcaatatgcttgaacactggggctctgctgtacatggtaccattgggtctatgctcttctataagcacgcgtgtttcgaacgaaattggagccgggcagcctcaagcagcgaagcgagcaacgcgagtggtgatgtatatggctttgtccgaaggattggtgataagctttaccatgttcttgcttcgcaatgtctgggggtacatgtacagcaacgagcaggaagttgtgacatacattgctaggatgctgccgattctcgacatatctttcttcatagatgggcttcacagttctctgtcaggcgtgctcacgggttgtggcaagcagaaaattggtgcagccgtgaacctcggggcattctaccttgtaggcattccggtggctgttctgcttgcattctacctccatctgaatggaatgggcctgtggcttggcatcgtctgcggcagcatcatcaaactactggtgcttataattgtctcgtgttgcatagactgggaaaaggaggcgatcttggcaaaggacagggtcttcagctcatctcttccagtagcatgaaaatgtagtgtgccacatctcacatgcagtgcaccaggcaattaataggatgcaaaattggtctatagcacatcagcatcaatcatcattctaaaaagcatacgaattgatcatcgttcggaaaagcatacgaattgatctgcaagaggagaataggagccgtcttgtaacttctattgggatttcgaagaagtcgaaggaaaaacgtagttgaggactgcatcaatcacaatatgatcgaggccatgtcagcaattttggacttcgcgtgttgtgtatgactattgtttttgccaacagtgtacaactgagctctagttaggataggtataggtacagtgagagtatgtacctagtatgaattttgatgatttttgatgtctctgtcagtgacattgtaatgagcagcgcacaacatctcggaatgaacaaatgaaaactttgaccctttttgtctctg

SEQ ID NO: 19433 - DNA, 841 bp, Oryza sativa
  ref <308>: DATABASE ACCESSION NUMBER: AK069793
  ref <309>: DATABASE ENTRY DATE: 2001-12-06
gaacctctccaacgatccattcagcttttccatgtcttggtcgctcgcgaagagcgccttcatggcgctgtgcatccgccgtgccatgccagagagagcactccatgtgaagaacacggcaagggatgcgccggtggccacgccggctctgctgctgccgccgccgctgctttgctgctcatcatcggaagccgcgaagcgcccgataaccctcctcgacggcttctctgagcttctggcgccactggagcagcgagctgctctcgatggcgctccggatcctgagcagcagcacctccagccgctgcagcttctcgtgtgcggtagctggcgcctgcagcctccgcccaacggtggatatcgtccggttagtgatctggccgaccaccgcggaagtgactgcttgttctgccatctctcggtaatgttaatgttaatactcgtcgagtgatcaatctcgccagagatcgatatatatacaacaagtacgttatattctggagagaaaaacgtgagcttgatcttactagtttcatatatacacaacaagtacgtaatattctggagagaaacgtgagcttgatcttactagtttccatcgccttacggtgatgctcttgggacagaggcagacaacaactgcagattggctgggcacatagtttgtatcgggctaaggcctgcaagaaataaaatggtcgtaacgacgtgttgagtttatcagtatgacagtatctggctgtcctatttaaaaaacgccagcactgtctcatctcggcttcttggatgtactacaatgcacaagcttcttggatacagaggagcacagcctcacgccctc

SEQ ID NO: 19434 - DNA, 2820 bp, Oryza sativa
  ref <308>: DATABASE ACCESSION NUMBER: AK069794
  ref <309>: DATABASE ENTRY DATE: 2001-12-06
gggtcgacggcccagctccgtttcattcggtggagtcttcgccgtttggcgatagacggctgggccctctccggctctccgccaacctcgcttctccccgcgatgcgaccccgaatcccgccgccggccggggctcttgctccgctcccccctcgaccaggggcctcctcttaccttccgaggccgtctgcatcccatcagatcccgacctcccgtgctccgcctgccgacgccggccagagtgctccaggagcaaaccaaccagaggccagagccactggcctgccagggaatggtaatacgccggctccggcctgagaagcgcatcctgttgatgaagaagaagaagaataggaagaatacaaggcaggccttccaggaatttgaagatgcagatatagttgaccttcacacggacgaccttgcaaccgcttctacctacctgaaatatgattgatgatagtagtttcttcctcagctgcacttcttccacctcctccaatctgcacttgtgcagcctgtgacgcctgagaatacatcaagtgaggctccatttcgtaactgctcgtcgctcgtccgtgcaggagcctattaacctacaggcacaatataactatatcttctgttcactcttatgggagattggtatgaacaattttcacaatcttttaaggatgctgctaaggaaatgttggcaaaaacagatattgatccaaacgttaagtgcttcacaagaaagcagatgaagcgcatttcaaacaactacagaactatccttggggaagggggcttttctgtggtgtacaagggtaggctcaatgatggccgtgcagtggcagtcaaaaaatataattggaaaacacagaaaaaggagttcacaaaagaggtaatcatacagtctcagtttagccataagaacattgttaggctattggggtgttgtgttgaggcagatgctccaatgttggtcactgagtttgtccccaatggtaacctttccaaccttctgcacagcaacagtagccagtttcctgtttcattagggacacgcttacagattgcactggatgtagcagaagcacttgtatatatgcattcctcccaaaatcatccaatccttcatggagatgtcaagccttcaaacattcttctgggtgacaaggatgtggcaaaactctgtgactttggaatatcaaggctgttatgtatggatagtgacgaatacacgggatttgttataggaagtagaggctatgtagatcctgtgttctgccagactgggcggttaagtctaaaaagcgatgtctacagttttggggttgttcttttagaactcatcaccaaaaagaaaggaattgatgacaagaaagtgtgccttgcagaaacttttgctcgcatcagtagaaaaggtaatggacacgaactatttgacatggacgttgtaacaaatgagaatatggagtttcttcaaggaattggcaggcttgcacttgaatgtataaagtttgaagtagaggagcggccagaaatgaaagaagttttagagcgcctttggagtctcaaaagatcccgagataggagaatccgtgagatgcaggttatggtacggagcgagattgaagtactttggagaagatgtggctttggtaggtttatgatctcgaaagagagaatggacgatatgacatactacttcaaaactgttctcaaggaatgtgcatcaggcaaggcttacatagggagattttgcaacgcacaactgctggtaataaagatgtcgatttcagttttagatcaatggaaaaacatagtctggaacgaattgaatgtccaatctagaattaagcactggaatgacgccaagcttctcggttactgcttagatctttgggaaggtctagtgcttgtatacgagtatggtgcgatgagcttgtatgatgttctttttcatgatgcaaggaaggtatctcccttcatttgtggcctgcgcctgaagattgcggttggcgctgcagagggccttgctcacttgcactcacttggcattgtgcatggcaatgtcagcactgtcaatatattgctggatgatctttcggtactcaaagtgattagccgcaattacccagtaaagattgcaggctatggaacatcagggctccctgacattgacaaggcacagcacacaggattcttcatggaggattcgcttgtaaccagtcatgggaaggagcatgacgtatactgtttcggtcttgttctcctaacgctcttcacatggaagaaggtgtcactgcaagaggcggataccgtgtttgagcagctctgggacattggaccgccacatgatgtgaattccgagcctgagaaacctgggcaacagctcaaggaagccatccttagatgccgtcatcttgaggaggttaagagcctggtttcacggtgtctgacgtccgaggtgacgaagagaccatccatggtggaagtagcaaaacatctcaagaacataaatgatttacatgatagcacagcttgccatgagctggcgatttatcaatctcgaatgctttcgggctaggctaggctgcaagtagcagtcgtacatggttcttctttgagtaaattaaggtgccgtagtagatgctataatgcaagcgccaagcaacatattacatatgtgtattttatatcccgacaaagaaaaaaagacgtgtgtattgcatatattttgtaacagcaacggatgtttgtcatgttgattctcgtggcgctgctgccatataatgttgattgacagatccttggggaaccaacggatgaact

SEQ ID NO: 19435 - DNA, 1984 bp, Oryza sativa
  ref <308>: DATABASE ACCESSION NUMBER: AK069795
  ref <309>: DATABASE ENTRY DATE: 2001-12-06
gttacagcctacctagggcaacgccgccaccgacacagtcacattcacctgcgtgttccggactctgcgctccccttggatatggacgcgaccgatccgccgccgccgccgccgccgctcaccaggaagaggggaagggaggcgaggaagagcaaggaagcagcgccaccacgcgagccgagaagggctcgcagtcgcagccatgttccaccgccgcctggagccggagacggacggggaggagacggcgaggaggacgtcggcttcgatctcatcagccgcctccccgacgccgtcctcggcgacatcatctcgcgccttcccaccaaggacggcgggaagaccagagccctgtccaaacggtggcgccccgtctggcgcaccgcgccgctcaacctcgacgccggtgatctcgcccccgacgccaacggggcggcgctggccgtcctcgtcacccagatactcctcgttcacgcggggcccgtacgccgcttctgcatccccgcgcagcagatccacgagcgccccgccatggtcgaaggctggctcgggtcgcggagattcaaaaacctggaggagctcgagttcaccgtcccggaagaccccttctacgggagatcattcttgctgctcccgcccccgccgtccaccttccgcttctcggccaccctccgtgtcgccgccattagccaatgcagcctcccagactgcacagccaccctcgcgcttcggttcccgcagctcaggctgctctccctccaggaagtcatcgtctccgagcattctctccatagcatcatcgccggctgccctgcactggaggggttgctgctcaaacgttccttcggattccgatgcctccgcatcaattcccctaccattagaagcgtcgccttccattccccatgctgtggagatcactgtgtatggaaggtgggtttccacttggaagaggtggtcatcgaggatgctccatgtcttgaaaggttgatccatattgaacgtgcaatgggattgggcgttaatgtaaccgtgatcgcggcgcccaaactggaggcctgcgtcctagacgaccttgatgacggctattaccgactcgatttcggcaaggtggtttttaagggatttgcggttattaactacacaacaccagtgtcgagcatcaagattttagccctcatcagggataatctcaggttggacagggttatcgagttaatgagatgctttcagtgcttggagaaattgtacatcacggtgaaatattttttctgttgatgcatcccattatggggcaacttattgctggcgccgcaaacattggagaaaactcaaaagccttgacatatgtctgaagacattagtgctggataattatcgtggcttgaaatcacaaattaactttgccacattcttcataaggaatgcgactaagcttgagaatatgatatttacaggtggtcgtagcaatggtaacgcatattttattgcacgacagcaaaagctgctggagtttgagaaaagggcttcaaaaactgctcactttcattttacaaccaagaaatgctattatgattgggtgcatatcaaggatgtccatgatttgtctattgctgatccttttgaatgtacctgttgagactgatgagtagaattattgtaagatggttcaactgggaaagaggactttggagagttgctcgttttgaatttaagactgatggatactgtcactgagctgaaaatctatattgatcatgttgtagatttgccttaattgctgtacatacctttggatgttgttgaaacaaggtttgatgtattgagctgttgtttcattcagatacctttgaatattgttgaaaaagattgatgtattgagcagttgtttcgctcagatactactttttttatttttttaccaatttctgttgtaataatacttgttaaaaaattgttgtcaatggcagtttagctgtcatgc

SEQ ID NO: 19436 - DNA, 2581 bp, Oryza sativa
  ref <308>: DATABASE ACCESSION NUMBER: AK069796
  ref <309>: DATABASE ENTRY DATE: 2001-12-06
gtttccgtccattcccctcctgcgtacttccgccgcgcggctcgccgacgcactcatcccgctgccgcgcgtcgccgcatcccgtccacggccgcccgcctcctcgactacccacagtcgtcttgctcgcacctccgccgctgcggtggccgccggtcccggaggcggcctccgatttaatggagaagtcctacgcgtcggcgagctccggcgagctcggcgtcgtggcgggtggtgggggcaggtcggtgcgggttataccactgcggcatccacaggaggcggtcgctgggtcctcgccgtcgtggtggtccgtggtgatggtgaaggcgcggggaatggggccgcgggattgggcggaggcggctctgccctgcttgtcgtggatgcggacgtacaggttgaaggaggatctgcaggccgacctcgccgctggcatcaccgtcggcgtcatgctcgtgccccaagcaatgtcatatgcaaagttggctgggcttcacccaatatatgggttatacacaggctttgtcccgctatttgtctatgcaatttttggctcatcgagacagttggcagtgggtccagtggctcttgtctctcttctagtttctaatgtcctcggtggtattgttgattcatctagtgagctgtacacagaattagccatattattggcattcatggttggtgtattagaatgcttgatgggattgctaaggctcggttggcttattcgatttattagccattctgtcatatctggcttcactactgcttcagctattgtaattggtctgtcacagatcaagtatttcttgggctacagcgttacgagaagcagcaaaattataccacttattgagagtataattggaggaatagatcagttctcctggccaccatttgtaatgggatcaagtttttttgttattcttctcataatgaaaaatctaggaaaatcgaataaaagactgcgtttcctaagagcttctggtccccttacagcagttgtgtttggaacaatttttgtgaaaattttccatccatcttccatatcagtggtaggtgaaataccgcaaggtcttcccaaattctccattcctcgaggatttgagcatctgatgtccctaatgccaactgcagtacttatcactggcgtcgccattttggaatctgttggtattgctaaagctttggctgcgaagaatggctatgagttggaccccaataaggagttatttgggcttggtatagcaaacatatgcggttcatttttctcttcatatcctgctacaggttccttttctaggtcagctgtgaatcatgaaagtggagcaaaaactggtctatctggaatcataatgggcataataattggtggtgctctcttgtttatgacacccttgtttacggatatacctcagtgtgccttggctgcaattgttatttctgcagtcactagcctggtagactacgaggaggctatcttcttgtggagtattgataagaaggatttctttctatgggcaatcacattcattacaacattaatttttggtattgagattggtgttcttgttggggtcggattctcattggcctttgtaatccatgagtcagcaaatcctcatatcgccgtattgggccgcttacctggcaccacagtgtaccgaaatagattgcaataccctgaggcttatacctacaacgggatagttgttgttcgaattgatgcacctatctactttgccaacataagttacataaaagacaggttgcgtgaatatgagcttaatctcccaaattcaaaccgtggacctgatgtcggaagagtgtactttgtgatcctcgagatgtcccctgttacatacatcgattcaagtgctgttcaggctctcaaggacttgtatcaagaatacagggatcgccatatccagattgcaatagcgaacccaaaccggcaggtacacctgctgctttcgagatcgggcatcatagacatgattggtactgggtggtgcttcgtgcgagtgcacgacgctgtgcaagtatgcctccagaaggtgcagagctcatcatcaagttccataaagctgtcgccacaggcatcaggggacctagctgactccgttaccactccaaaggttcaacagcggtatagttttctaaagaacctctggaaatcacaggttggggacgggtgtacaggtagtgaggttcaaccgttgctacgccaaaaccttgtttaacattatggccgactacctttctattagtatctgtctgcctgtttatatttgatgtacatgtatgcatacagtgtaaaggaaaaaaaaggaatatgttattactctcttgcaattttatatagaggaattgagatggggttgtaagtggacagtatatgtgctgccaacacattggttatctacacataaggacgtagaatatgctgtgtactgtacggtgccgcggcttgcctatcgtgaggagttgaaatgttcgcaaaattcttgtttaacttgtaagtttatgtatatacattttcctaggcatgtaataacagccgctttccatctgt

SEQ ID NO: 19437 - DNA, 2127 bp, Oryza sativa
  ref <308>: DATABASE ACCESSION NUMBER: AK069797
  ref <309>: DATABASE ENTRY DATE: 2001-12-06
ggaaggagaacgaagcagaggccaaccggagagggcggagacgaatcgccggcccctcctctcgccggcgggcggccgccaggccgggaggtcggccggcgacgcgccacggcgaccaacctggttactactggagattactacttcatatttgctcattggcatattattagtagatggggactgtttacttcacattgattttgcttgctccatacagaggcagagaatcattatggaggttagtgtattgatgttgtgtttttgtttttgtttttgttttttttttctgctgtgttacgctgaccttgaggtttctagtataggttttagatagtgactcttttatggtccttagaaagtatggagaggtatacatatatcttactgtttaactattttttaaagaagggcaaaagttatgtcatgtacatgtctagattcattaacatctatatgaatgtgggcaatcctaaaaaatctttgtgtttaatcattaagtatgataacaaatcaaagtattttgaagtatgaatctaattgtacaagttttatacactaaatgtacttttatgttaactaattattagtcaaaatctttcacatttgactttctgaaatcaaaatactacttataaaagcagggagtacgttttaaaggctgaggaaaaggcataagggcatcagccccagttccatttttattaaattaagccaacaattcttgtacagtttgagttcgatcagcaccatatctacatttcattaggccatcttaaatagagatcatgtgatctttgtttttttaatcctttggagtatatccctaataaagaacctccatacttagttttggtgcttgatttgaaactactaacgtgtttatgatactttaatttgcacaaaaaggtcttcaatatacggataggcagaatccaaagtactagcataatgcattaaattagaccggcacattatcatcaaacaagcagtaaatgacatttgccatattctggctcgagtggtgctcaagaaagccaggacaggaaagcaagagctgctgaaacatcactgccatgtagtaagcacacagcgacccaactatgtatatatactcctagttgatttagcttatatatatatccatccgtaaggaccctgctacaaaccactaggcgcgcatgcagctccatggctaaaaacactaagcaaacgttcctaacacccagagctaaaactcttgacggctacaaactacatagatcatgagttcatgacagccacgaagctgcattacttggcggccgtcttcttggacttgggcacggccttgtcatggccgtgcgccggcggagccgagttgaggtcggggagggacgcgcggccgccgccggcgggcatgttgccgttgccgttagccttggtcgcggccgccgccgccgccgccgccttcgtcttggcgagccgctgcttgagctcggtacagcttcgcgttcagcctgtccatcttgtgccctgctaccaacaacaacaggataacgaagtttagcagccatgtggcgtcactgtgtggacccctgttttggacttatgttgcgagaggggggaagaaagacgacatcgaagctgaaacagtggactattgtgctcgagatccgataaatattatcctgcatactcagggtgtccctgctttggctacatcctcagagggagctgagagctgtgatgaagatgctgctcgctgctggggagttggagacgagaggcgagagaggtcgagcggcgacaccagaggaggcagggtgggcagcgagtgtgaagtgatgcgagaggctgggctactactacctaagctacgagaccggtcgctgtggggcaaggcagcgagaggcaaaagagcacacaggagattggcacatcttttgaataatcaagaacagagattggagcaggcacacggtgaaccagagctggtgaccggtacaacgacagtacaatctggtatgtacagtttttaaatacctgaaaaattttaatgcagggatacgggaacgatcttgttgctcttgtggcctttaaaacacttcctgtctaaagcctgagaaaatttcattgcacgtatgg

SEQ ID NO: 19438 - DNA, 1172 bp, Oryza sativa
  ref <308>: DATABASE ACCESSION NUMBER: AK069798
  ref <309>: DATABASE ENTRY DATE: 2001-12-06
gatactccggtcacgcgcgtagcccaaaccaccacaagggccgcgtcggtggcggcgtccaggccgcccggaacatctcgccgtcggaacgacgaggcggcgcggcggctcgcggtgtccgggcggatccacgagggaacggcccctccgaggtcgcagcgatgccggtgaggcggcggcagccgcggcggagggagacgggtgcggcggagaggtacagggagatggggatatcggccgcgctgtcgcggccgtgggactacccgacggcgtgcggcgagatcgccgcgctcctccgaatcgggtacggcgacctccccaaggccgcccaggctctcgtcgccggcgacgtgctgctcgcgttccggctcctccctgatgtacagacaggatatgcgttaagcgcagctaatggtcttctccaagctgtagacggttccctaccaaagcaaaagaaggcacaggctgtttcagagttcaagcgttctgttgttgcacataagcggcgtgctagggttcaacaagatccaggtgtaccacatataccatacgatgtgcttgttcatattttcagttttcttgacatgcgctccttggtagctgctggtcttgtctgctgaaggccttggaattctgctgcaaatgacaaccacctgtgggaaatgaattactcccttttcttcggcatctgccatataaactgcaatagcacacctacagctggtaatgtacagaacactgattatcatgtacagaatagcatttatcaagtatctccggatcctggttttaactggaaagaggctttccacaaaaagtatgcagaacaagaaacatggagttccgcatcaaatagagcattatgtggatattgccgatctgtcatttggttgtgcgacttgacgtgtgctactccacactattgccttaataatggaaaagatggagtaaaactaggacctctattacctcatacagttgctgactacatattggacatcgctgatctagcagcttcatcgacagaaagtgatgatacagatagcgattctgaaaattatccccaggcacgcttttggtcgttgtcatagtaaaaggaaaacaatgtatacatcgacttgagatgtggattgtgaacttgttataactctttaatttctggtagttttctg

SEQ ID NO: 19439 - DNA, 2320 bp, Oryza sativa
  ref <308>: DATABASE ACCESSION NUMBER: AK069799
  ref <309>: DATABASE ENTRY DATE: 2001-12-06
ggcctttcccccctctctctctcccacgcactctcgccttctccacacaaagctcgcaaatggcgatctccacctggagcacgcgcctcctcctctccccctccgcctccgcctcgagccatagacctaaccctacccgccgcctcgccttcccctcccccatctccggccccggccgccaggctccccgcgcctacatctccgcgccggcgtccggccccgacgcctacccgtccccggccctcgacgccgcggcggcggcggcggacgtcgccgcggccatcgcctcctcggacgccgtcacgtgggcgggggtctgggccctcctgtcgccgcacagggcccgcatcgcggtctccctcgcggcgctcctcgcgtgcaccacctgcaccctctccatgccgctcttctcagggaggttcttcgagacgctgataggaaggggctccgaacccctgtggaggctgctgtccaaaatcgccgtgctgtatacgctggagcccatatttacaatcgtattcgtgatcaacatgaccgtgatctgggagaaggtgatggcgaggctccggagccaaatatttcgcaggattctaatccagaagatggtattctttgatcgtcacaaggttggcgagttgactggtttgttgacatctgatttgggtactttgaagagtgtcgtaagtgacaacatatcaagggatcgtgggctaagggcactctctgagatcaccggtacactttgtatacttttcacattatccactgagctagctcctgtactaggactcctaatggtctctgtctccgtgctagttgctcttttcaagaggtcaactgttcccacatttaaatcttatggaattgtccaagcacgtatatcagacactgcatcagaaacattttcagctattcgtactgttaggtcatttgggggtgaaaaacgacaaatttctatgtttgacaatttggcacttgctttccagaatagtggcacaaaactaggcgtgctgaaatctgccaacgagtcattgactcgggtggtagtctatgtttccctaatggcactttatgttcttggtggaagcaaggttaatgcgggaaaattgtctgttggaaccatggcatcttttattggttacacattcacactgacattcgctgttcaaggagctgttaatactcttggtgatctacgtgggacatttgcttctgtagaaagaataaattctattctatcagcagaggacattgatgattcacttgcatatggtttagccaaagaactagaagattcaaatggtgcagtgcacgaaaatggcactgctaacaaacattacatgtcagcactaaaatcatcaagcagctgtagtaatcttgcctggtctggtgacattcacctagaaggtgtccacttttcttacccactgagatctgatgtggagatcttaaatgggcttgatcttacaattgagtgtggaaaaattacagcacttgttggacctagtggtgctggaaaaagcacagtggtgcaacttcttgcacggtactatgagccaactcatggtcgcatcactgtggctggggaagacatccgtgtatttgataaaagagaatggtctcgagttgtatccttagtgaatcaggaccctgtcctattctcagtttctgtcggagaaaacatcgcttatggtcttccggatgatgttgtttccaaggatgagataataaaggccgctaaagctgccaatgctcatgaattcattgtctctcttccacagggctatgacacacttgttggtgaacgtggcagcctcctaagtgggggacagagacagagaattgctattgctcgtgctcttctgaaaaactctcctattctaatacttgatgaggctaccagtgcacttgatacgaccagtgaacggcttgtacaggaagctctcaatcacttgatgaagggaaggacttctctggtgatcgcgcacagattgagcaccgtgcaaaatgcgcatcaaatcgctgtctgctcagatggcaagatagcagaacttgggactcatgctgaactggttgctagcggtggccgatatgcgtcacttgttggtacacagaggctcgcatttgagtaagcaacttcagaaaatttctgtttcccgaaagacgttgccgacgagctctctcgaccatattttacatcatctgacataatatacggtgataggtttacgaaacacatgtacatgaattacgaaaaccacatgtatcaaagtttacactcaaaacaccgaaggtctcaataggctgtgctcacaaaatc

SEQ ID NO: 19440 - DNA, 1200 bp, Oryza sativa
  ref <308>: DATABASE ACCESSION NUMBER: AK069800
  ref <309>: DATABASE ENTRY DATE: 2001-12-06
gaatcgaacccaacccatttaccccgaatctcaccctccacccccaactccggcgaccacctcgccgccatggccgcccgccggagccccgccgcggcccaccaccgcctcttcctcctcctcctcctcttctcggccctcctcgcccccctcgcgtccgcctaccgccccggcgacatcgtccccatgctccgctccggccagtaccacggctcgaggtcggtgtggttcgatgtggtgggacgccactgcccgtccttcgcggtcaaccatgaggttatgatgccgatccccaagccgactgggttcaccggtgcagatccttacaagataacatttcaaattggtcacgaaaagttccaccttccttggctttatgtcataaatcgcaaaagctctgaagttccaatgattgatttccatttgaaatactctggaaatgatttacttggtgtcacagctaaagtagtggacatgcctcacatttatgttgaacatcatcctgacataaggaagaatttctgggatcaacagaattggccaaaatatgttctggtcagatatacatgggaggagcaatcggagatagatgttcctggaggtttctatgtgttgtttggatctgggcttgttctatccttcatccttgcaatctacgtcctgcaatcatctcaggaaaagttgacaagatttgtgcgagaagcagttaatgacagtagtctaccggaaggagggtttgcaaaggttgagtgatctttctacaaggagctggaaaattatacactagtctgtccattgatcagaaaactgtcagtagataccgagttgtcagtcaaatttcatgggcgagctttcaacttcaaacaagagccagtggattgtcttgtataaatacatacattgcaaacgatttagctattatgacatgaaaagaggaaagagaaatggacattaggttttcccttggcagaatggtatttttagcaaactattgtccgactgtcactaactcacttcagttgatgtattgcgtgatgattttgtctgatgcattttttttgtgtgtgtttttatgcttcttgtggaaatcttcatccttgaaaaaaccaacaacttctcggtttttctaggatggaggaggtatgtattaaactgctatggcgcattgctttctgcttgtaagaatcactatgtcaagtt

SEQ ID NO: 19441 - DNA, 2935 bp, Oryza sativa
  ref <308>: DATABASE ACCESSION NUMBER: AK069801
  ref <309>: DATABASE ENTRY DATE: 2001-12-06
ggcttttcccggacaggtctcccggcgccacggcatccaagctgctcgtcgcgctatctatacatgacacgccccgtctccctccttgcttgacaccaattcaacgacctctcgcgactgatcgatcgatcgatcgatcattcgatcgccatgaggctctcggtctccgtcgccgcggtgctcgtcgttcttgcggcgctccggccgccgcgggtggcggtggcgcagaagtacgcggccatcttcaacttcggggactcgctggtggacgccggcaacctcgtcgtggatggcatcccggactacctcgccacggcgcggctgccgtacgggatgacgtacttcgggtaccccaccgggcgttgctccgacggccgcctcgtcgtcgacttcatcgcgcaggaggtggggttgccgctgctgccgccgtcgaaggcgaagaacgcgacgttccaccgcggcgccaacttcgccatcaccggcgcgacgtcgctggacacgccgtacttccaggggcgcgggctggggcacacggtgtggaactccggctctctgcacacccagatcaagtggttccaggacatgaaggcctcatctgcaagtcccctcaagagtgcagggacctgttccggcgatctctgttcatcgtgggggagttcggcggcaacgactacaactcgccgctgttcgcgttccggccactggaggaggtgcacaccttcgtccccgacgtcgttgactccatcggcaagggcatcgagaagctgatcgaggaaggggcggtggagctggtggtgcccgggggtgctgccgatcgggtgcttcccggtgtacctctccatcttccggaagcagccggagatgtacggtcgccggagcggctgcatcagggacctcaacacgctgtcctgggtgcacaacgctgcgctgcagcggaagatcgccgagctccggctcaagcaccccggcgtccgcgtcatgtacgccgactactacaccccggcgatccagttcgtcctccacgccgagaaatacggtcagtgctatgctcacttcggcttcgtcttcttcctctcgctgttttttttttcttttttcgcgcggttttttttccttttttttgttttgggttctcgtgtcgcagttcccgcggcccgtggtctcacggcggcttgcgtctaaggttgttagttgggttcgttacggcaacgtgacagacgctgacaggtgggacccacagcctgtcacggtcgtcctattttttgaaaactaaaaagagagaagaaccatccttctatggttttatcttttaaaaaagagccttttttttgttctgttcaagctaaactattcgagattttttttaaaaaaaaactcagaaatcaagccagcaaggttcgatttttctatacggagaagttggaaacgaccactataagtatttgcgaataatttaattaagcggatggatgaatgaatatataatacgaagaacagctgtgctagctagcagcctagcagcgtatcaggccaaaatcaaaggctgcttagctacatttcttctccaaaatattttaaattctatatatgagatatcgtcatcatcattttgaaagcaagcatggggagagaacgagatgtggggcaaacacaagaaccaatcagtcgagtgacgggagcaaaaagcatgcgtttctgggcgaacattcagaaggggtagttgggggccaatttcccccaaatatatttatgaaggtttcgtgatcaatcgacgcaccatgacccttgaactcttcaatagggaaatgtgattgattttaatttctagtaaagcttcgctggctagctaacgtacatccgtccaagctaattaagctgggctccggctcctccccggcgtcaacactgcagctgattaattatgaaatgtgtaagcatcagtgcaattgctattttgcgtaggtgacatgacatggcaaaagcatttttgaagtgacacctaactaaacgatgacataactagctaatcaatcaagcagaacaccctccaaattaaacctctctcttcggtagatcgtttgtagggaaaattaatttaataaatccctgtttggttgtcagtgatgacaccacatgtgaccatatcaattggtacgtgagagaagacttggaattgttagcgtgatgccggccatgaattagtagtagccttctccaggtttttaaattgcaactaaattaaagccttaatgacaatcttacttcgtgttgattccatgtggtccatatagggcattgacctgttcagggaggtgtccactgtccaatagccgtacaggatgagcagggctttggggattttatacaggcaactggaatgttagctagataggcttagcagcttaattttggagtcaatagtccatgataaaacaattaggataagcaggatcaacttaataataacaatcagcaagtagtactagtgtaagtacactgaacaatcttgtcagaaaaatataagaaccactagaagtaccaccacgaagtaagataaaaggtacgagatgtactaaacaacacacatatggcgctgtgcttacaccatactacttgggattagcaaattaacacatccaacgagcttgttggctaggccttttcttttgggggccattctctcagaacattgcacgcatacgacagtttctaatcattcagcaattagtaaggtatcatcatgcatgattcgggcgacgtgcatctgattctaccactgattttgtgtagaaaacaattcaatttccttccctctctttttttctgcataattaaatttctaatatatactagaagaaaacgacctgcccaaacaataattgagctactttttccttgagaaaatgattgaacaggataaacatagcggatcagc

SEQ ID NO: 19442 - DNA, 1741 bp, Oryza sativa
  ref <308>: DATABASE ACCESSION NUMBER: AK069802
  ref <309>: DATABASE ENTRY DATE: 2001-12-06
gagcaagcgcgcgcccagatgccgcccacaccggttgcctttccatgccttgcaggtgcagctccctaataggttcctcgtcttcaaaaccgatgtgagatgtgagattagatatatcgcacaagattatatatatataaaaaaaaacagaggagagaattgaacaccagcatcgatcggtgcagccggcatggtcaccaagaatgttcagcagcagcagcagcatcgtgtagatgtagtggtgcctgttcctgctatggtggtggcagccatggcgagcccctgccccgccaataagctcctccgcggcgcaatccagctcgccttcgggttcgcgctcggcatcgccgtcgccatctacctcattgggtcagcgacgcctgccgccgtccccggaggatcatccctcgagctcttcttccctctcccgccgccggccgccgcgtcgacggcgaacctgtcggcggtccggcagaagcagccgccgactccatcgccggaggcggagaagacgacgacggcgatcaagtcccagtcgtggccggcggacgacgcttcaggcggcaacagcaccgccgatcaggcaggcggaggattcgtggatattagcgacgaggagctgatgaagctggcggcagcggcgccgagggaggtgaggacgggcggcggcggcggcccgaggccgaaggtggcgttcctgttcctgacgaggtgggaccttccgatggcgccgctgtgggagaagttcttcgaggggcaccgcgggctctactccgtctacgtgcacaccgacccggcgttcaacggctccgaccccggcgaggcctccgtcttctaccgccgcactatccccagcaaggaagttaaatggggcgagataagcatggtggaagccgagcggcgtctcctggcgcacgcgctgctggaccaggccaacgcccggttcatcctcctgtcggagtcgcacgtcccgctcttcgacttccccacggtctactcgtacctcatcaactccaccaccaagatatacctcgagtcctacgacttgccaggcgtgacggggcgcggccggtacaaacgcagcatgagccccgtcgtcactgccgcacagtggcgcaagggctcgcagtggttcgaggtggacaggggcctcgccgccgacgtcatcaccgacgatgtctacttccctgtgttcgcgaggcactgcagccgtaattgctacgccgacgagcactacctgcccacgttcctgggcatccgccacccgtcgcgcgtcaccaaccggagcgtgacgtgggtcgactggtcccacgggggcccgcacccggcgaggttcacgaggatggaggtcacgccggacttcctccggtggcttagggccggggccgggactacgtgcgactacaatggcgccaccacgacggtctgcttcctgttcgcgaggaagttcctgcccaactcgctcaccaggttcctcagattcgctccaaaggtcatgggctttggatgatgatgtgcagcgaacgttttaatatttagctaggatatacaacttttcacattctttggtttgttttattcgcctattccacagacccaacgtatacatgtacgtaaatttcattttccttttctttcttcctgatttcattatgtaaagaccaaatgaatgtaaagagcacaaggaactatattttttatactaaccacacatggaatatagagtttattacacgccctc

SEQ ID NO: 19443 - DNA, 1946 bp, Oryza sativa
  ref <308>: DATABASE ACCESSION NUMBER: AK069803
  ref <309>: DATABASE ENTRY DATE: 2001-12-06
gactctcgttgatcactccgcacccccctcaactctctctatcgatcgatcgatcgatctgtgcctccatccccgatgcccccatcaagatctcatcatcaggatcatctccctgccgccgccgccgagtgaaatcaactagtgtatgcctctcactgtggctgagatcaagtgaccgaggaagaagacgaaggagacggcggccggcggtgtaaagctgtatagctagctctctagctctgcgtgtgctcggtccccgcgccgcagtgctgtgcctgtgcctgtgcctgtgcgctatctagctgtggagatggaggcgcggctgcggctgctcgtcgtcgtcgtcgttgttgccgggcactgcgccgccgtcgcgtccgccgccggtaactcgtcggtggtggggtaccacggggacccgacgttcaacgtcaggaactacggcgctaaggggaacggccaaaccgacgacagcaaggcgctgatgacggcgtggaaggcggcgtgcgcggcgaccggggcggtgacgctggtgctcccgccggggacctactacatcgggccggtgcagttccatggcccctgcagcaaggccaccaccatgaccttcctcatgcaggggacgctcaaggcggcgaccgacctgaagaggttcggcaacgactgggtcgagttcgggtgggtgaaccacctcatcgtctccggccagaacggcgccgccttcgacggccagggcgccgcctcctggcccttcaacaagtgccccatccgcaaggactgcaaagtcctccccaccagcgtgctgttcgtgaacaacaaaaacatggtggtgcagaacgtggcgtcggtgaacagcaagttcttccacatggcgctgctgcagtgcagcggggcgaagatcagcggggtgaagatcagcgcgccggagagcagcccgaacacggacggcatccacatcgagcggagcaacggggtgtccatcgcggacaccaccatcgcgacgggcgacgactgcatctccatcgggcaggggaacgacaacatcgacgtggcgcgcgtccactgcgggccggggcacggcatgagcgtgggcagcctcggccggtacgtcggcgagggggacgtcacgcggatccacgtccgcgacatgaccttccacggcaccatgaacggcgtccgcatcaagacgtgggagaactcccccaccaagagcaacgccgcccacatgctgttcgagaacctcgtcatgaacgacgtccagaaccccatcatcatcgaccagaagtactgcccctactacaactgcgagcacaagttcgtgtccggggtgacgatcaaggacgtgcagttcaagaacatcaaggggacggcgacgacgcaggtggcggtgctgctcaagtgcggggtgccgtgccagggcgtcgtgctgcaggacgtcgacctgcggtacaaggggaacggcgtctcgtcgtccaagtgcgagaacgtcagggccaagtacgccggcttccagaaccccaagccgtgcccgtagccccatgacgacgatctgtgacgagatcgttaattttttgcatgctgtcttggcaagcatgcacctagcaagcaacaaagacactagcttagctagctccgattaatgtgtcgtgcactgagcttaattaatttgtgattcttttcttttccctttatgctacttagacgattttcttttcttttctccttcatgtacgtttcttagacgattttgttgctttgattttttttcccctctcccttgacgcttaattatagtggattctgtacgtggtataagtgagctgccgattactggcattagtttctgaatcactcaacttgtgaataccccaatgtcatgcttaattaattggaacaaagactaaactgtctcaaaagccgtctggttcgatccatcattccatctc

SEQ ID NO: 19444 - DNA, 1520 bp, Oryza sativa
  ref <308>: DATABASE ACCESSION NUMBER: AK069804
  ref <309>: DATABASE ENTRY DATE: 2001-12-06
gggccaaagaatgacatctcttctcatcatcttattcccttctacttaaataaaaaaagaagaagaaaaaacccatcattgcctccatcttctggtcaaaggatgacatcaatccctatcatctcatcccctcctatataaagaacccagtactaccttcatctctgactcatagcaatatacatacatcgtatcacagggaaataatcaacataatcagcaacaatgggagccaagaagcataccttgcaagtgcttccatggctactgctctttgcgcagcacactgcagccagtgcctgcgactgtgctaacaccacagacggggcagacagacagggtgcaatgaagctaaagctcattgccattgcatccatccttgcagctggggcggctggtgtcttggtgccagtgattggccgctccatggctgcgctgcgccctgatggtgacatcttctttgctgtcaaggcatttgcagccggcgtcatccttgccactggcatggtgcacattcttccagcggcgtttgatgcgctcacatctccatgcctcaaaaggggtggtggggataggaatcccttcccctttgcgggccttgtttcaatgtctgctgcagtgtccacaatggtggtggactcattggctgctggatactatcaccggtctcaattcaggaaggcacgcccagttgacaacatcaacgtacacaagcatgctggagacgagagggctgaacatgcacaacacataaatgcgcacacacatggaggacatacacattcacatggtgatatagtggtctgtggctcaccagaggagggttcagtagctgaatcaattcgacataaggtagtatctcaggttcttgagctgggaatcttggtgcattcagttatcattggagtatccttaggtgcatctgtgaggccatctactatcaggccactagttggtgccctcagcttccaccagttctttgaaggtgtaggtttgggtggttgcattgttcaggctaattttaaggtaagggcaaccgtcattatggcaatatttttctccctgactgcacctgtgggcatcgtgctaggaattgcaatttcatcgagctacaatgtgcatagctcaactgccttcgtcgttgaaggagtcttcaactcagcctcagcaggaattttgatctacatgtccctagttgaccttctagcaacagatttcaataacccgaagctacagattaatacaaagcttcagctcatggcataccttgcacttttcctaggtgctggactgatgtcaatgcttgccatatgggcatagatcttcagaataacagaggatcttatttcccagataggcttgatttgtattaatctatgagttttctatcttcgcaaaataacatactcttggtggagtatttattgtatccatcctagattttctaaaaccaaagcttatctcaggtgatctctttgtactttatgatatgataatacatgatgacttaacttgttctt

SEQ ID NO: 19445 - DNA, 1829 bp, Oryza sativa
  ref <308>: DATABASE ACCESSION NUMBER: AK069805
  ref <309>: DATABASE ENTRY DATE: 2001-12-06
taccgtgtttattaattaccctaccaaccgtacgccaccctcccaaggggaaagaggaaaaaaaaaaaacccctcccctttcgttcccgtcgccggcggccgccgccgccgcccggaacctctgctccccctggccatggcgttccctgattgggtcatgctcgacccctacgtcttccgcgacggcccgttccccgacgacgatccgaccgcggcgatcgggcacaactcgagaggcgacaaggtcggcgtgcgcttcctgctccgcgcgccgccggagccgtccagcatcttcctggattgggaggctggcacaggggattgcgacgacttctccgtcgtcgccgcccaccgcgacgccgtcctgttccagatgggttacctggtttcgttgggccccagcaatgcctacaaggcgttcgactatttgctctaccgggcggcgggggccggcggctcttcgccgtcgctcgacttgctcgctcccttcggtggctccgtcgacgagctcaaggccaggatggaggcggacggcctgatccgcctcacgaaccagcacctccgcaggctcaagtgcctggacatcggcgtcctgtgccgcgacggcgaggagttcgccgtggcggagctccagatcaccaggtcagaggtcggtccggagctccacgtgctgcgttcttctacctccagccgcaagtgggagctcaagcggccgccgatcacccctgcgaacggcggctctctcgatctggagaaatttctctgggactgggacgccgacacggtcatcccgttcgggagctacctgtgctgggtggattactgtcttggtatcttgttctgcgacatgtttgatgagaatccacagctccactacctagagttccccgcggatgtcagaggagcatgcttcggtgggtgttgtcaggccgtgggtgtgaccaatggcgtcatgaagctcgtctctctggttcctgatgatggcctcattgctgagaattacacccctgaatctggtttcaccatcgtttgctggaccttgaggatggatgaaatggataagatggtgtgggagaaagatgccgtgctcaaatctgattatctttggtcgatgctcaaacccgattttctttggcccctagatgagttcccttttatcactaccaataggttcccaagagtgcagttccctctaatcagcatcgatgactcaagtgttatgtatcttgtcttggcacagaatgggatggtggaggaggcaggatacaattacgatgaaacatggctccttgcaattgatatgagtaaaatgaccttgaaaatgtcatttccatatatcaatgatgaaatgggagatccatctcctgagatgcttgcatttgctgaggataaattctggaggtttgagccattcctcgctgctgacttctccaggcatttcaatctgcgatgccccaggttatccaagcaaatttgcatggaatcagctctactgcctcagaaaagaaaattcggttgtgctgaataccttccattggatggtccctctcttgccatattctgaattctgatgtgaagtgaacttttcttctgaattctgatgcgaacggaggtaattctgatgtgaacggaggtaattctgatgggaatgatgtatcttccaaactctgatgtgaatgagtgtgattctgatgtgaacgatgtgaatatcttctgaattcaaatgtgaatgagatgtgattgatgaatatcttctgaattatgatgcgaatgagtgtaattctgttgagaatatcttctgaattatttttgacatggaatatcttctg

SEQ ID NO: 19446 - DNA, 1536 bp, Oryza sativa
  ref <308>: DATABASE ACCESSION NUMBER: AK069806
  ref <309>: DATABASE ENTRY DATE: 2001-12-06
gagttcgcaccatccggcggaggaagatggaggcgcaggcgacccaccggcgagccggagaccgcggcggcggtggcgacggcgggagctcctccgcctccatcgccaagcacctcgcaaaccagagccaggtcttgaagtggctgcaagatttctctgataaggtggaggagagagctaaaggagccgctgcagaagtcaatgtgttgttagatgaggctggggcgctggagctggatatgaagaccgcgatgatctccttcaacaacctgacccgccaaaggttcattgaacataaaatttcagatgaagatagtatgcatctgaaaacaacggagagtatgcatggttctctgcaatcccaagtgccagctcaggattatgaacgtgatattttaccaagatacaaagaagcattacacataggactttcttcctgtaaggaccacttccgaagcaagggacgctctaccacctctgtgttcagggctatgtctgcatatggccctcttccacatataattggttctgaagagtacattcatgataacagctgtggtctggcagatgatatgcagcctctaagtgatgacttcagttggttgcgggagtttcaaagtgagtcttcagactcacggactgctgatatctctgagtctcaaattttcggggctcagcgaggttatgagaagggggaaactgactctgtggtttctgctgcacgagaattcaaggcaatgctggaggctgcacttgttaatccctataagttctatgatgatgcaactattacagcgcaagatgcttctgtagagaagaagataagcacaagtgaggaccaagttatgctgacagggacaagtgaagcaccgagtggaagatcagcacaagaagataactctgaacagacaggactttttgcaagcttgcaaagcgcagatgccaatcctcatgacatctattctgctttggttagagaaggcctgtttgatactggtgatgagattctgtctatggatagaggggagtctgctgatactcctatttcaggcctagcgtcaggtttagcaaatcttggcactgctgatccagctgaaaggggctactcaataaacgagactacaaatgaggagggatacttgattgaaggggatgatccatcaccatcaaacaaagacgaacaagatgaccaaactgatgcacatggtgtgtcttcgccagagccagaagatggtgtttctagaccatcctagccatgctgatattggttgatttcttctcgagtgcagttcattctgtcaaaatctactgtagacgctggtgaagcaactgaatggcaatgatttagacgaggaacacacttttgctgccatgtgctgagtgctgtagactaagaaattatatactccctttgtttcaggttataagacgttttgatttttggtcaaagtcaggacaaatttgtagaaaaaaatagtaacattttcaagccaggacaaatttattatgaaaatatatttaattattgatttgatg

SEQ ID NO: 19447 - DNA, 2020 bp, Oryza sativa
  ref <308>: DATABASE ACCESSION NUMBER: AK069807
  ref <309>: DATABASE ENTRY DATE: 2001-12-06
ggcacgccatttcccccctcaccctctcgctcccgctcctctcctctcctcttcgtcctcgcattttccgccgccgccgccgcggcgctggtgtggttgagtgtttttttttttttgggttttttgtttgtttgggttggattggatatggcggcggccgcggacttgtacgggcgcctcaacaggagcagcacgcgggggttcctcgcatacgtggcggcgggggcggcgtgcgccgcggtgctcgcctgcttcgtcatccccgccgccgagccgcgcgccggtgacgccaatggcggcctccgcctctcctcgcggtcggcgcgcgtctggccggacctcgcgttcaactggcgggtggtggtggccaccgtcgtcgggttcctcggctcggcgttcggcaccgtcggcggcgtcggcggcggcgggatattcgtgcccatgctcaacctcctcgtcggcttcgacaccaagtccgccgccgcgctctccaagtgcatgatcatgggggcgtcggcgtcgtcggtttggtacaacctgcaggtgtcgcatccgaccaaggaggcgccggtcatcgactacaagctcgcgctgctcttccagcccatgctcatgctcgggatcacaatcggagtcgagctcagcgtcatcttcccctactggctcatcaccgtcctcatcataatcctcttcatagggacttcctcgcggtcattttacaagggaattctcatgtggaaggatgagacgaggatccagatggagacgcgggagcgagaagaggaatcgaagtcgtcctgtgccgcaagggatgtggttattgacccgagttgtgaagagcccctcctatgccagcctcagcccaaggagaaatctgctctggagactttcttgttcaatttgaggtggaagaatatcctagttctcatgactgtatggtcgtctttcttggtgctgcaaatcttcaagaataactcacaatcatgcagcactttctactgggtgatcaacattcttcaggtcccggttgcgttaagtgtattcctgtgggagggcgtacagctgtgcagagagagccgtgctcgacgcatggatgggaactgggagtgtgtctgtgaggcctctattgagtggtcacctgcacagctcatcttctgtgccttctgtggtttgcttggtggtactgttggtggccttcttggatccgggggtgggttcatccttggtccacttctccttgagcttgggtgcatccctcaggttgcaagtgcaacagcaacattcgtgatgatgttctcctcatccctatccgtagtggagttctacttcctgaacagattcccaatcccttttgctgtctacttgatctgcatttccatattggctggattctggggccagtccttggtccggaaactcgtgcacgtgctcaagcgagcatctctgattgtcttcatcctatcctctgtcatcttcgcgagtgctcttacaatgggtgttgttggaacccagaagagcatcagcatgatcaacaaccatgagtacatggggttcctcgacttctgcgagaagtgaagaacccatcagactgtccatactctctgggggaaatccaggtcaacacctaattgacctcacctcccccaaatttaaacgagaaaagaaataaggtcgtgaagtgcacatatgcaccgcgttagcgcctcgctaacctgcaagcgcacgtccgacaaagtatcgtagtgtattccagttttcatggcatatgcatgtgttagctcctggctaacctgcaaaccctatctcttggtcttgtaagagtcttctggtctttttgtcatgcatgcgttagctcctggctaacctgcaatttagtttctctagggagaaatcgcagctatgcccattcattcttgtgcttgctcctggctaagctagcctgcaaatggttattgtatggaacagtgtaaatatgccagcccattccttctgtcaatatacaattgttgcattttttagg

SEQ ID NO: 19448 - DNA, 1108 bp, Oryza sativa
  ref <308>: DATABASE ACCESSION NUMBER: AK069808
  ref <309>: DATABASE ENTRY DATE: 2001-12-06
gagaactctctcctctctctctctactcttctcttctctctccttttgttgcttccatttctcgttcttgcacggggaagaggagagaaagatgtgtgtcgctgtggtttgaaaaaggttgggtgtgagaggagagagaaagtggagtggaggggagagagagagagagagatgggttcttgcgcttcggttcacaaggacctcgggttccccaagaagctgtttcttgcgtcgtcgcctaccaaggagaagaaggccgcgaacgggaagggtggcggtggcggtgtgtctgttgatctcaagcgaaaggagcagcagcaggcggcggcggcaggggttggcgtcaggagccccggttctggtagcaaggatgaaatgttctttgactcgcgggcatggttagattctgattgcgaggacgacttctacagtgtgaatggagattttactccgtctcgtggcagcactccaaactaccaacccagaacacaaacagttatgagcaatgtctttgtacctgataatgtacagaattccaaatcacctgaaccttctccaactggaaggagaaaactagccgagctcttgcaggaggcgatgcagaatggttccgaagatagcaccgatgcatctgttccagacatcagcaagaatgagaagcagcaattccagcctgtttctgcagctgtgaagccagtatctgagtccagctccacgtgtagcacagaaccgacgccgatcagagaagcgaagaatcgcaaggagaaggcgtggtacaccggtcgctgttgcttgccggcttttgttcataccctagacttagatgagaggaggcagaagatgacccctgggccttgtgctgtttgacatggctgcttcccttctatgagctgtatctacaatatactacctgatccggccctgagttcactgtaaagaagactagtattgagagcactatatccttgtaataatcaagtgaatagtcactcttgagaattcatgtgctgtatccatgttaaatcaactgtaaggtgaggatatctagctcaagaaatgatcattttgtgcatatctggatgaatctttatggatataaaattttctc

SEQ ID NO: 19449 - DNA, 1526 bp, Oryza sativa
  ref <308>: DATABASE ACCESSION NUMBER: AK069809
  ref <309>: DATABASE ENTRY DATE: 2001-12-06
gacagtgactagtgacaaacgatcgatcgatccctccatccacaaaccctcctcgatctcatcttccttcgtctcgtcaatggcggcgagctactcgtgccggcggacatgcgaggcgtgcagcacgagggcgatggccgggtgcgtggtgggcgagccggcgtcggcgccggggcagcgggtgacgttgctggcgatcgacggcggcggcatcaggggcctcatcccgggcaccatcctcgccttcctcgaggccaggctgcaggagctggatggccccgacgcgcgcctcgccgattacttcgactgcatcgccgggaccagcaccggcggcctcatcaccgccatgctcgccgcgcccggcgaccacggccgcccgctcttcgccgccagcgacatcaaccgcttctacctcgacaacggcccactcatcttcccacaaaagaggtgcggcatggcggcggccatggcggcgctgacgaggccgaggtacaacggcaagtacctgcaggggaagatcaggaagatgctgggcgagacgagggtgcgcgacacgctgacgaacgtcgtcatccccacgttcgacgtcaggctgctccagccaaccatcttctccacatacgacgcgaagagcatgccgctcaagaacgcgctcctctccgacatctgcatcagcacatccgcggcgccgacctacctccccgcgcactgcttccagaccaccgacgacgccaccggcaaggtccgcgagttcgacctcatcgacggcggcgtcgccgccaacaacccgacgatggtggccatgacgcagatcaccaagaagataatggtgaaggacaaggaggagctgtacccggtaaagccgtcggactgcggtaagttcctggtgctgtccgtgggcaccgggtcgacgtcggaccaggggatgtacacggcgaggcggtgctcgcggtgggggatcgtccggtggctgcgcaacaaggggatggcgcccatcatcgacatcttcatggcggccagctccgacctcgtcgacatccacgccgccgtcatgttccagtcgctgcacagcgacggcgactacctccgcatccaggacaacacgctccacggcgacgccgccacggtggacgccgccaccagggacaacatgcgggcgctcgtcgggatcggcgagcggatgctggcgcagcgggtgtcgagggtcaacgtcgagaccggcaggtacgtcgaggtgcccggcgccggcagcaacgccgacgcgctgaggggcttcgccaggcagctctccgaggagaggagggcgaggctaggtcggcgaaacgcctgcggcggcggcggcgaaggagagcccagcggcgtggcgtgcaagcgttagtaactgtacacgcatcatgctgacgcgatcttttttatttttctttttttttttttacctttctagcggacatggggaataacaagacgtgacagtagtgcaatcggtttgtaacgtgcgtataccaacattgatccatttcttcatc

SEQ ID NO: 19450 - DNA, 2743 bp, Oryza sativa
  ref <308>: DATABASE ACCESSION NUMBER: AK069810
  ref <309>: DATABASE ENTRY DATE: 2001-12-06
gggtttccttctacacgcgtcgttgtctcgtcctgggactgtgaggtgcctcgctcttgcgccgccgctgcggagaggggtggtcgccgggagaaggaaggaaggcgctacatggcgccaactctaacggatccggatggtgttcctcgatgggatcggaggaaagggcggcagccctccaggtttttgtgcgtcccattcgacaccgatttcttctttttacggagaatcatccgatccatttcctaggttttcctaggttggggtagtatatttgttttctgtaatccttgatctaatcaagtagccgcagtaattcttatgcgatgttatctaattttcccctatccgctttctgattggcaccatagtacatttgtttttacccttgactaaattacagttcagagtctagttcagtttcattgttcttttgttcaaagggtattcgttcaaataagctctatatattgcttgagtgggaaaggaaaggttttaattcagaaagtaatctattcatgtttaaattttggccacccgtatattttctgaaaaaaaaaatgaatacataaaggatgtcgtattattaaagtgtgttgtgtgacttgtgtcctaaatataagcatcgagctctcgttcatcgtattctaaccatttaaaaatcattagtggtcaaagttgaaatagtgcttgtcaacagtgactggaatttgggagaccttgtgtacacttttaaccttttttatactgcatagcgattcatcataagtttgttctgtactatgtccatttgttcatgtaaaaatgtagatgaactcaaaaggaaaaggtacctcatacggtactcgcactctacaacatcagcttctgcatcctcaacatttacattgctcaaatcgacactaatcagaaaataatcttgttgaagaagaggtttcattagatttcagctagccatggtcaaactaagagatgtggttaactcttccttcgagtactagttgtaaatcgctcaactaatctgtaagctatgctagtcgtacatcaagtatctgtgcaggtgctaggtaatcagatcaagcctttgctgcagtatcaacttttactactaatggcatcatcagtcgagcatcctttccatgccacaacaaggaaccaaatacatgatcccgttgaggcacatccacatggaagttaaccgtgaaagtcttcttcgcaccgtaattctcgaagactagaacttttggagtcaccgtgacattgatacccagtggagcagacacgaaagcatgaaggagaccatgatggatatgcacctttgacaagagcagctattcctgtaacatgggggcacgccatggaagttccagaaaggatgttgaagtgcttgtcctccttagcaggagaccatgccgccaatatgttcaacccgggagcagcaatatctggctacagaatgcataagtgtcttgtaaacacatcaataaacttttgactggtagcttcgtttttcaattccgattaccttcagaatctccggtgtcaatgaatttgggcctcttgaagagaaggccgccacccggggagcatctctagaacctaaaatcgtcttcgctggtgaaatttgatggtgagtttgcctctccccgctggcattgccctctccatcttgtaggaaccggaggcattccatgatctctgaaactaggagattctggccatattcctggggggaacagaggcacaaggtagctcagccgctgcatcgacggacaagcccatgaaatcccatgaatgagtggtgtggaggctcctctttgtgtttgggaacactgagatgacaccaggcatatctgcagaagtgtgcagcagagttagctttcagtcatcatcacaccaggatcacgtgtcaggatgctaaagacatcagaagccatgcatatacaaggaaattactggctaatttcatggcttgttgtttgttcagctttgctgcaaatccttggaaaccgttgctgtaagtgtagacatgcgatgcctctgccttctccatgctgagaccaagcatccaattagtcaagctacagaacaagtatggaagctagattgatagatatcaacagctgatgatgaactcattccaaaccttccgtcatgaacagctgtcagcatctggtgatgaagcctcagcatgtcatgccgattctcagtgctgccttgcaatcctttgcccatgtagaccacataaacctgaaatataagcatccatcaaggaaatgttagatcactgggaagagatcaagaaagaagataaagccatgattgcagaagagtgagtagtacggaatgaatgcaagaaagcttgtgcatggtaggaggtggactactgaaaccaacctgagcacaagagcaagaggagcagaactctcctagtaacaccacaaacacatagaacacgaggaagatcatattgtctctgtcctgcaaagaagcaatcacatacacccaaacatgcagatataggcagacagtgaggttttggaatggaagcctgcaagctgcaaacgtacatatgaccaaattttttttatggacgagtagtatgctttgtggaactgacaagccacagcactactccctcagtcccaaaataagtgcagttttgcactgttcatgttcaacttttgatcattcgtcttatttgaaatttttttatgattaatatttttattgttattggatg

SEQ ID NO: 19451 - DNA, 1579 bp, Oryza sativa
  ref <308>: DATABASE ACCESSION NUMBER: AK069811
  ref <309>: DATABASE ENTRY DATE: 2001-12-06
gattcccactctctcctcttcccgatccccccaacacccaaaccctaaccctcgaagcgacgcaacccaccggcggcgatggggcagggcactcccggcgggatggggaagcagggcggcctccccggcgatcgcaagccgggcgacggcggcgccggcgacaagaaggaccgcaagttcgagccccccgccgcgccgtcccgcgtcggccggaagcagcggaagcagaaggggcccgaggcggcggcgcgcctgcccgccgtggcgccgctctccaagtgccgcctccgcttgctcaagctggagcgggtcaaggactacctcctcatggaggaggagttcgtcgtcagccaggagcggctgcgacccagcgaggacaagacggaggaggaccgatccaaggtcgatgacctccggggcacccccatgagcgttggctcgcttgaggagatcatcgatgagagccacgccatcgtctcgtcgtccgtcgggccggaatactatgttggcatattatcattcgtcgacaaggaccagctcgagccagggtgtgccattctgatgcataacaaggttctctctgtggttggaattttgcaagatgaggttgaccctatggtttctgtcatgaaagttgaaaaggcacctttggagtcttatgcggacatcggtggtctggatgcccaaattcaagagattaaagaggctgttgagcttcccttgactcatcctgagctatatgaggacattggaataaggcctcccaagggagtaatattatatggggaacctggcacaggcaaaactctacttgcaaaggcggttgctaattctacatcagcaacatttttgcgtgttgttgggagtgagttgatccaaaagtaccttggtgatggccccaagcttgtaagagaattgtttagggtggctgatgatctttctccgtcaattgtctttattgacgagattgatgcagtcggaacaaagaggtatgatgctcattcgggtggagagcgtgaaattcagagaaccatgttggagttgcttaatcagctggatggttttgattcaaggggagatgttaaagttattttagcaacaaatcgcattgaaagtcttgacccagctttgcttcgacctggtcggatagacagaaagattgaatttccgttaccagatattaaaaccaggaggcggatcttccagatacacacatctaagatgacattggcagatgatgttaacctagaagagtttgtgatgaccaaggatgagttttctggtgctgacatcaaagcaatatgtacggaggccggattgctcgctttaagggagcgcagaatgaaggtgacacatgccgatttcaagaaggccaaagagaaggtcatgttcaagaagaaggaaggtgtaccggaagggctttatatgtgagacatccaccactcatcagcaccagaattacctccaggacacggttaagtgtaatagagaactggtagagctggtgtttggttcaatgttcggagaatgtttgcttacacccttcttattcagcaatgtcgaactaaagaaccccctg

SEQ ID NO: 19452 - DNA, 1018 bp, Oryza sativa
  ref <308>: DATABASE ACCESSION NUMBER: AK069812
  ref <309>: DATABASE ENTRY DATE: 2001-12-06
gattcccccctttcttctctaggttttatgggcttcatggttcatcagtttcttctattttgtttgttccattgtttttgtatctttccttcttgcaagttttagttcacagaatttttgggttttccaataaagagtaggtgcatattagtcagcaatttttttatgaaagctctcattggtgttttcatctcttctgttgaatgcagtgggctcattagttggagtcttcatcggcgcgttcatggggatgtccacggaaagcggcatgctacgaggcgcaggcgtcggggtggtctccggcgcggtcttctccatcgaggccgtcgaatcgtgcatcgaaatctggagatcaagtgaatcaggaaaatacagcattatcttcgtgcttgacatcatctctagcctcttcagtggaaggattgtgtgggagaaggtcagcccagcactgcagcgcgcggtgcagagtcagatgagtctactgagtacaccattcattgacaacaatgacctttttgaaaccggaaatacaggaggcatgtcaagagatctaattaacagaatcccaaagaccacattcagcgctgcaaccaatcctgatcaggaaactgataactgttgtgcagtttgccttcaggattttggagcatcgcaatttgttcgggtcctgcctcattgccagcacacgttccacgcacgatgcatcgacaactggcttttcaggcacgcatcatgcccgctatgcagggctggtgtgcatatagaccatatacatatgtaaaatagaactcgcagcgcacctggtgtattttcaggcgaatacccgtgcccgcggtccgtatcataagtatagtcttgtacacataggaggcctttttttcttcccagtctttgtgtggagctatgttccagccgcacgtttttttgttacagcaataacaagttatgtactaatatacattctgaaaaaaagaactaaactaacagtctctgaattatggctgtgtactggagcctc

SEQ ID NO: 19453 - DNA, 962 bp, Oryza sativa
  ref <308>: DATABASE ACCESSION NUMBER: AK069813
  ref <309>: DATABASE ENTRY DATE: 2001-12-06
gggctgagctcgaggtcgaggctgcgtgggtgtgcgacgtcggggatgagctgcaacggctgccgcgtgctgcggaaggggtgcagcgaggggtgcgtgttgcggccgtgcctgcagtggatcgacggcgccgaggcgcagggccacgccaccgtgttcgtcgccaagttctttggccgcgccggcctcatgtccttcctcaccgccgtccccgagccgcagcgcgcagcggtgttccagtcgctgctgtacgaggcggcggggaggacgatcaacccggtgggcggcgcggtcgggctgctctccggcgggagctggcacctctgccaggcggcggtcgacaccgtgctgcgcggcggaggcatccaaccgctgccggaccaggtcgacgccgccgccgccggtggccgcgacgtgttcgcctccacggcgaggcgcgccatgggcgggtgctccacgttctcgacggcgaagcggtcgacgacgacgacgacgaccaagaaccccggtactccgcatgacgccgccgccgcggcgccccagccggaaccgtcgtgcgacctcggcctgtggctcagccccggctccccgccggcgcccggggaccggcgatccggcggcaggcgggccgacacgccgtcgatgaactccgagggatccgtcacgacgtgcggcgtcgtcggcgacggcgagagggagcccgagctgctgaatctttttgtctaggctagctagctaattaacctgctcaattctcatatgctttctttgctgcatcccggcgaactctttggtagcctctcgccggcgaggtatcccttagccattttttggccgtgtaaaagtcgacggtgcgcgtgcactgcttctacttgactctttacagtaccttatgtttttttctccccctactttgttagcatcaaaacgtcgaataaaagcgaacagattaacctcgcgtc

SEQ ID NO: 19454 - DNA, 1296 bp, Oryza sativa
  ref <308>: DATABASE ACCESSION NUMBER: AK069814
  ref <309>: DATABASE ENTRY DATE: 2001-12-06
gatatccgatcccttctcgatcatcgctcatcatcacaatcatcaacagctcagttcatccgtgccgtgttaatttagctagctagcaatcgagctcagttttcctaattaattgctagctcgatttgctcggtgatctcttcaattcgccggagcttggaatcaatcgagagattagagtgtacgtgagagctagcgggagatcgtcggcggcgatggtgaacacggcggcggtggcggcggcgaagggcagcaggggcagcgggctgccgctggcgtcgctgaaccacatcagcatcgtgtgcaggtcgttgcaggagtcgctcaccttctacaccgacgtgctcggcttcttccccgtccgtcgccccggatccttcgacttcgacggcgcatggctgtttaattatgggattggtatccatctgcttcaggctgaagatcctgacagcctgccagggaaaacagagatcaatcctaaagataatcacatctccttccagtgtgagagcatggtggcagtggagcggcggctgaaggagctaggcatcccttacatacaacgatgtgtggaggaaggtggcatctatgtggaccaaatcttcttccacgatcccgatggcttcatgatcgagatctgcaactgcgacaacctccccgtcgtccccctcggcgccgaccagccgctcgtcatggccgcctgcaagagggccgccgtcatcaagcagcagcagcaggcgtcctcttctccggcgacggcggcggcggcggcacagtgcgccgtgccatcgtcgacgaaggcgatccacgtcggcgaggaggcacacatctcgtgcgcctaaaggcaggagagattgtgtacatgcttgtgtggctgcaatgcaattagggatgcaagtaggctgatgtacaaactcaccaaaataggttatttactactcccttctctcgtaaaaaaaccaatctaggatcggatgtgacacaccttcatactacgaatctagacatatatatgtccagattcacagtactataatatgtcatatctgattctaggtttgttttttatagcaaggatggagtacgtggttggtgggttggtccacttaaatagcatgtatgtgggttagtggtcagctctctttcatcgctaaatgcaatgaacggttgtggtttgctagatcagttgtcaggttatgcgattgggctcactgggagtttgtacatgagtactatggtgttgggcaatgtaatcccctttgttataagtaaagaataaattaagcagaatgagtc

SEQ ID NO: 19455 - DNA, 1765 bp, Oryza sativa
  ref <308>: DATABASE ACCESSION NUMBER: AK069815
  ref <309>: DATABASE ENTRY DATE: 2001-12-06
gatcgcctcgtctcacgtttgatccatcacactcacacaacacaaccctccccaaaacctcccgaagagagcaagatgttcggcttcgggcaccacggccaccatggccaagaccagccgccccagcaccacggcggcggcggcggcggcgcgcaccagcccaccttcaagatcttctgccgcgccgacgaggggtactgcgtcgccgtgcgcgaggggaacgtcgtcctcgccccgaccaacccgcgcgacgagcaccagcactggtacaaggacatgcgcttcagcgccaagatcaaggacgaggagggcaacccggcgttcgcgctcgtcaacaaggccaccggcctcgccatcaagcactccctcggccagggccacccggtgaagctggcgccgttcaacccggagtacccggacgagtcggtgctgtggacggagagcggcgacgtgggcaagagcttccgctgcatccgcatgctgaacaacatccgcctcaacttcgacgcgttccacggcgacaaggaccacggcggcgtgcacgacggcaccaccatcgtgctctgggagtgggccaagggcgacaaccagtgctggaagatcctcccctggggcgacgaggcctacgccggcggcagcgccaacgcaccccgcggcggcaacgagcccaccgtccgcatcttctgcaaggccgacgagggcttcagcgtcaccgtccgcggcggctccgtctgcctcgcccccaccaaccctcgcgacgagtaccagcactggatcaaggacatgaggcacagcaacagcatcaaggacgaggaaggctaccccgccttcgccctcgtcaacagggtcaccggcgaggccatcaagcactcccaaggcgaaggccaccctgtgaagctggtgccgtacaaccccggataccaggacgagtcggtgctgtggacggagagccgcgacgtcgggcacggcttccgctgcatccgcatggtgaacaacatctacctcaacttcgacgccctccacggcgacaaggaccacggcggcgtccgcgacggcaccaccgtcgcgctctggaagtggtgcgagggcgacaaccagcgctggaagatcgtcccctggtaaatgcggtgtgctggagctgcattggtcgtcgccgtgatctgtggagttgggagagtttgcgcccgtggcctgctgccctctgcctttgttgctagaataaaagtcgtgtgcgatgatcagtggtgatggtcttgtgtctgtgtccgtgtgtaatgcttttagtcgttttctcgagtcctgcttttgtgacaaaatgggggtgagaggagaggtgtcgtttccgtgaactatctcgaaggcgtttggccttgcagcttgttcttcagatgttcggagtttcagaccttttgatgagtaccctgctttatcatttatcagccatgtgtctagttcgatcaatatgcatcctttgaagtggcattggtttgtctttgaggatcaagatcctgtgcagttgttattgtaactgtaacttaagcagttacatgtgcatcacatgatctagaatggaaggccaggatgtgaagtggtactgtagcagagatgtactattatacctgtactgtagaagtcatctagagccactggatctgaaaacggatggccatgattgagtgcagttgctattgtgcagttacaatagcaactgcatttgatctcaatccgtcttggaggattaaggatttgattgctgtctgatgcc

SEQ ID NO: 19456 - DNA, 3784 bp, Oryza sativa
  ref <308>: DATABASE ACCESSION NUMBER: AK069816
  ref <309>: DATABASE ENTRY DATE: 2001-12-06
ggcaagttggcacgctcaccatctcgacacccggaggaggaggaccccaaccactgccctcgcagacagagaggagaagagcgcctcctgcctgccgctgcagccgcccgcgacacgctcccccctcccgagatctccgccgctcgccgccgcagatccgcgcggcgtggactccggcccagatcccggcgatggctgggatggaggccttcgaggccctacttccgccgcgcggatttgaaccaggacggccgcatcagcggccaggaggccgtcgccttcttccagggcgccaacctgccgcagcaagtcctcgcccaggtatggatgcacgccgacaagaacaagaccggcttcctcggccggccggagttcttcaacgcgctgcgcctcgtcaccgtggcgcagagcgggcgtcagctcacgcccgacatagtgcagtcggcgctgtatggccctgccgctgctagaattccagctcccaagatagccggcggcgggcaagctcccccgcagatggctgcggcgggcgctcccaggccgcaggtaaatgccgcggtgtcacctgctccagggcaggctggagctccgcagccgcagatgaatgttgctggtgctccaaggcctcagggaagtggtatgatgccgggctctgctcaaattggcggttcgcagcaggtgaacgccggagccgtgccaagaccccaaggggtcaattctatgatgccggctgcaagtcagggtggtgctctgcagccaactcagtttgcaacgcagaggggaatgcaatcacagccgcctagcatggggtttaatcaacagcctcctccttcgagtactggtttcatgaggccaactcagccaggagctccagcagcatcacttcaaggccaaggacccgggattaatcaagtaccactaggaggaggcagcatgggagcacctgctggttggcgaggaggcaatgttggttccgttggaggtctcccgcaagctactccaggagcaactgctccacaacaagcaacaccgggtggatttggtcttacattgtctagtacaatgggcatggctcccggacaacaggcacaaggaacgcctccttcgtcaatgccaccacaaagcaacggtgctgtatcagctcaagattcgaaagctttggtgctgtctggaaatggctctgccggtggcttaggagcaagcaatgacatcttctctgctcttactcagcctaagtcgaatgtatccacactttcatttccgacgagcatggctcctaattcatccagttttatgtccacaccatctggctcccagaacctgtcgaatctagctcagtttggttctcaacaaggtattccgacagtgagttctggtggcagtcaacctcaactgactcatcccatcacaaagccgagtgttccagcaccaactgtatctggtgtttctgctggagtttctaattcagcttctcaatggccaaaagttactcagtctgacatccagaagtacactaaagtctttgcggatgttgatagggacagagatggcaaaataactggcgcggaagctcgcaccctgttcctcagttggagacttccaagagagattctgaagcaagtgtgggacctgtctgaccaagataatgatggcatgctttctttgagagagttttgcattgctctttatttgatggagaggcaccgagctggaactcctttgcctccagcacttcctgactctcttaaatatgatgaggtactgctgcgtgcaacaggcttgccttcaacagcatacaacggcccgtcatggcaacaaaatcaaggactgccacacaagggtcctggagcagctgggatgcctgctactggtgtgcggcaacctttgccaccacatttgcaggcacagatggatggtgctaacagaccagggcaaccaagacctcacatgcctggtatggataaccatgcagcacctcaagcaaataaagatgacggaagtggagcgaactcagctgtgcaggaggatgcccctaagaaggttgaggtggagaagcaagtcctagattccagagagaaactagaatactaccgtacaaagatgcaagatcttgttctgtacaaaagtcggtgtgacaacaggctgaatgaaatcacagaaagggcatcctctgataaacgtgaggtggaatcattagctaagaagtatgaagagaaatacaagcaagtggcagagttagcttccaaactggcagttgaagaacatgccttccgtgatgttcaggagaggaaagttgaactgcatgatgcattagttaaaatggtacaaggtggaagtgttgatggtttgcttcaggttcgagctgatcgaatccaataccaattagaggagatggagaaagcttttagtgaacggtgcaagcactttggactgcagttcaagccatctgcatcagttgagcttccttttggttgggaacctgggaagcaagagggggcaattgagtgggatgaagactgggacaaatttgaggatgaagggtttggttttgtaaaggacaatggtacaattgttgaaaaccctgttgcttctgaaaatgtgaaagtgccatctctctggaatgatatggatgagagccctgttgcatcttcgaacggtcacatcaaggctgagagacattacagagctggtgatcatgcagctgagagtgacttagggtatgattttggtgaggaatctgtaaggagccccagcagtgctggaagaagtgcatctggaagtccatttgtgtcttcaaattttgcgatgcatgactcatctcccagcaaaaaggaaacctacagtgaccatggtggttctgaatccatttttggtgacaaatatgccgatgaaacctcctggaactttgatgaccaagacactgaatctgtttggggatctaatgcaatgaacaacgagtctgaccatcatggaagtgcacacaactctttctttgggtcagatgacttcggtgtaaatcctgttagggtggggctctccaagtggtgccagtacctatggaaagaagaaaagttcattctttgatgattctgttccaagttcacctgcatacacatctggattctcaccaaaattcagtgaaagccgcgatgatagctcctcatataacttaggaaggttcgattccttcagatcccaggagagcggattcttccctcaggaaagtcgtttttccaggtttgactccataaacaactccaaaggtgagaatgtaactggattcgattcaccgaaaagctcaacaaatttcggtcggtttgattcttttgatgatgccgatccatttggttcaagtggaccctttaaagcatcaggtagcaggtctccccccaaattctgatacaccagggtactatttttagtgaattcatttgtcgatacaaggctgaattcttttgaggaaactccaacgcgttgatgcagtggaacctttttgagtgggaggttggtcattcaccttgtgcgtttttcctgtccattatacggtacaaaggggacaggttttggtatatcctttgtattttgtaaagtacaccgagtttgtttttgttcatagttatcatatctctggaacggctgctgatcatctgctgtttgccatttgtttcttggtttgtaccataccaaatgttacagttggtttactaaactcccaccattttgtaagaaactgaggacgatttagcatgtttgcgatctgtatgtgtaaaatcattttgggatc

SEQ ID NO: 19457 - DNA, 1416 bp, Oryza sativa
  ref <308>: DATABASE ACCESSION NUMBER: AK069817
  ref <309>: DATABASE ENTRY DATE: 2001-12-06
gattactcattacggccacgcgatcgtcgtgctccaccctcaacaaacccacgcaagcgtccgcgcatatcgatccagaatgacgttattggcgatatagatgctagatcggggaacggcggggcaatcttgctgctgtttgagacgccatcgggctttgcaattttctcttttgatgggatccgcctcatcgcaccaactgccatggaggatatctggcaaaactttgccatggaatatagggcaaaatttgtagtttggcgtcttgcttttcaagtttttacagacaagtctctggcaattaactgtgatactggtgtggacgatcagcttaatctcatgataacaaagtaccaccgcaaaggggggaaaatagctgttgggaaacccgaatataaaacaatcatagaagcaaacctgggtatttcctgtctgtatgatgaatttgtgatggaggtgatgtggggtttgacgaatcttatgcatagtttagtccctgaagaaaactctcagctgagtaaggaggaccgtctccagatgagtcaaggattaaaaatgctcctgaatcgttatggatttgatgtcaaaccagggatggttaacaaacgtattcttgaggcagcatctgacttgtatgattgtgatgattgtgagaagaaaaataattggtccttgcgtcgtgctggtcggaaccttatggatatctctagcattaacagtgaggattggggcctgttgaaactttctacagctctgatgatagtatgttaccctgaagaaaagatcatagcatgcttgctgaaacattctacagatttgctgatagcatcttaccctagaagggaagttatagaatacagtcaaaagatgttttcaccagatgtgctatctaagctggtaactgatgcaccaaaatatggcatttggataaaaaagcgcacttccaagagaatccatgaagaaatggtatttttgtatcaacaaaggattgaaaagcgaaagctcttggccaccttgataggggaggctacaaaggtttatgaagctgaacaagcggaattgctgacaaactagaagtgaccacaggtattctgaagctgctatctatgcccaagatgacttccagtgatttccagaccaccacttcttttgtgttttgtttatctcaagttaaatttgggaattactgatatgatcagtgtactgtttggtttctactttagacaagttagactgtgcttctccaagctgctatttgttttggttttggtagtattggtttctactttagacaagtcagactgtgtttctccaagctgctatttgttttggttttggtagtactagctgaagcgcacaatgccgcgctgcccggatcaattgaagtccagtatatatatactatttaccaatggc

SEQ ID NO: 19458 - DNA, 1811 bp, Oryza sativa
  ref <308>: DATABASE ACCESSION NUMBER: AK099110
  ref <309>: DATABASE ENTRY DATE: 2002-08-28
gatgtcccaagatggatccgcccatggcgccagcgccgccgccctccacccactccaccgcacccttcgcaactccggaggtgcgttctgtcgccgccagacgcccgcggcctgcggcggcgagcatctccgcgcgcctacgcgacgtggcgaggaggaggaaggataggcctcgtcgctgccgggcacaggtggctccccgcggcggcgaccgcatcagcgccctctccgacgatgtgctcctcctcatcctgcggcggctcgccacccgcgccgcgctcgccaccgctatgctctccaagcgctgggcccggctcctgcgctggcttgacaccctcgatttcatggtcggtgaaatactcccgccgcgctaccgtaggtgcatccaactccaccaagcggctggttttgctgcgtatcccgttgatgtcaaggttctcgttgcaagtatcaagcgacacgagcgccttgccatgcgaaacatagcggcctccatcaatagcttgttagacgcggatggcagtgatgaatgtgctggccaagctcgacggagggcccgtgtgctgcgggtggagttctttgcgactcactacaccgatcttatgaaccgattgatcaccaaggcattggatgcttgggaagtcgaggatcttgaagtttttgctaagcctgcatattggtctgagtggtctctgccgccgattgtccacagatttcctcaccatggtctctgcattgagccccacaagtcccggctgagaagcttgaagctaggtggttgtatcattccgccattgcaggggttccacgctctcaccaaaatgaccttgcaagacttgcgaaactccgtggccaaagcatcctatgaagatgtgtttaagtcatgcccccagttgcaagtgctacacctcaagtcatgcaggtgggcggaccggggcattctggttatcgatttcccaaagtcagggattaagcagcttattgtggagttttgcagcgccattgcactacactctcttgggatgcttgagagcatagctataagggagacttgggtcaggtataagcattgctccttctcgcatcttatgcacatgaaccttaacttacgccatggttaccgtaatcgtctgcgtgacttatgtattggttgggacttgaacatccagcagtttcttggattcaccaagaacataaccaacctggttctacgattcactggatatgggagatggttcgtgccatcttgcccctcgttgttgctggctaatctcagaaggctcctgattgctgatgtgccttcatcatgggatgtctcttggcctcgcctcctacttgaagcagcaccatgcctggagagccttcacatccatattatcccttgggatgacgattcttttgatgaaatcatttggcaaccatccactttgcagcatgaagaactaaaagagttggttgtaattggtttcgagggaacagaaagacagatttactttgttaactttgtgatggaagtatcaacaacattgcagcttgttgctctatttagatatgggcatgttcaagaaatggggcgttgggactggaaaattgtgaggcagcaacaccattggaatgatgaggagaaagcccaaattctgaaccagtttgctgatagagattcttgctcaataactccagttcaagtagttgtagagtgatctgttatgttaatgttttacttgtatacaaggctttaagttataaagcatgcatctgttatgttacttgtatacaaggctttaagttataaagcatgcatctgttatgtc

SEQ ID NO: 19459 - DNA, 1414 bp, Oryza sativa
  ref <308>: DATABASE ACCESSION NUMBER: AK099111
  ref <309>: DATABASE ENTRY DATE: 2002-08-28
gagcagctagctagccgcggtcggtcgatccagctgctggggatgagtacttagttagctcggagctagctactaatggatgatatacttatgctagttagttaaatacagttattagttagttgtaggttgcatctatcatatctccatcggttaattaattgattgatagctagattatcaacaattaatgagcatggtggtgcagcaggagcaggaggtggtgttcgacgcggcggtgctgagcgggcagacggagatcccgtcgcagttcatatggccggcggaggagagccccgggtcggtggcggtggaggagctggaggtggcgctgatcgacgtgggggcgggggcggagaggtcgtcggtggtccggcaggtgggggaggcgtgcgagaggcacggcttcttcctggtggttaaccacggcatcgaggcggcgctgctggaggaggcgcaccggtgcatggacgccttcttcacgctgccgctgggggagaagcagcgggcgcagcggcgcgcgggggagagctgcggctacgccagcagcttcacggggcgcttcgcgtccaagctgccgtggaaggagacgctgtcgttccggtactcatcggctggagatgaagagggcgaggagggcgtgggtgagtacctggtgcggaagctcggggcggagcacgggcggcggctgggcgaggtgtactcgcgctactgccacgagatgagccgcctgtcgctggagctgatggaggtgctcggggagagcctgggcatcgtcggagaccggcgccactacttccggcgattcttccagcgcaacgactccatcatgcgcctcaactactacccggcgtgccagaggccactcgacacgctgggcaccggtccgcactgcgaccccacctcgctcaccatcctccaccaggaccacgtcggcggcctggaggtgtgggcggaggggcggtggcgcgccatccgccctcgccccggggcgctcgtcgtcaacgtcggcgacaccttcatggcgctctccaacgccaggtaccgcagctgcctgcaccgggcggtcgtcaacagcacggcgcctcgccgctcgctggccttcttcctctgcccggagatggacacggtggtgcgcccgccggaggagctggtcgacgaccaccacccgagggtgtacccggacttcacgtggcgggcgctgctggacttcacgcagcgccactacagggccgacatgcgcacgcttcaggccttctccgactggcttaatcatcatcgtcacctgcaaccaacaatatactcctagctcctagtcctagctatatactcctattatccatccatccatccatcttacactactataccattagcatcgatcgatcatccattaattaattaattaattact

SEQ ID NO: 19460 - DNA, 1483 bp, Oryza sativa
  ref <308>: DATABASE ACCESSION NUMBER: AK069818
  ref <309>: DATABASE ENTRY DATE: 2001-12-06
gagagagagagagagctggaaatggatcccctttaaaagccgttgcgttggctctgccgccttggcaacaacatccaatttccaaaccaagagagaagcagcagcgatggcgatgcggcagggagcgctgcgaggcccctccgattactcccaggagcccacccgccacccctccctgcgcatcaacgccaaggagccgttcaatgcggaggcgacgaggcgggacctcgtggcgtcctacatcacccccgtggatctcttcctcaagaggaaccatggccccatccccatcctccgcgacatcgacagctactatgtgacggttgccggtctgatagagaggccagcgaagctttatctgaatgacatcaagaagctgcccaagtacaatgtcactgccactctgcagtgtgcagagaacaggaggaccgaaatgagcaagagcaggaaggtgagaggcgtcggatgggatgtctgcgctctcgggaatgcgacatggggaggagctaagttatctgatgtccttcagctcattggtgtgccatatcatactgaaattactccatcaggaggaaagcatgttgagttcactagtgtagatcagtgccctgaggaaaaaggtggcccttacaaagcatcgatttctttaggccatgcaacaaatcctgcagcagatgtactggttgcatatgaaatgaatggtgaggtgctcaagcgtgatcatggataccctctccgtgtcgtagttccaggtgtgattggtgctcgttcagtcaaatggttggacagaattgacataattgaggaagagtgtcagggtttctttatgcaaaaggattacaaaatgttccctccatctgttgattgggacaatattgtgtggtcaaccaggaagccccaaatggactacccagttcagtctgccatatgctctttggaagacacaaatgccatcattccaggagaagtgactgtcactggatatgcgttgtcaggaggcggccgaggtattgagagggtggatatatccactgacggtggcaagacttggttcggtgctgtccggtaccaaaaggaaggtgtaccatacgtcgcaggtgacataagtagtgacaagtgggcttgggttctcttcaagactgttatcgatgtgaaaggtgacacggaggttatcgtaaaagcggttgattccagtgcaaatgtgcaacctgagagcgtggagaccatatggaaccttagagggatcctgaacacctgctggcaccgtgttcgccttctgacaatacacaaccttagaagccttttgtgatgatcctacacatacacctaactagtattatctctttaaatttaccgctctatgttgcactgtcgttccgctttcggatctgcattggagaaaaagagtcaagagggaccaataatataatgctggctgacttgcttggatgctggaataaaatcccgtgccaccttgttatcc

SEQ ID NO: 19461 - DNA, 1687 bp, Oryza sativa
  ref <308>: DATABASE ACCESSION NUMBER: AK069819
  ref <309>: DATABASE ENTRY DATE: 2001-12-06
ttggtcatccgccccgtcggccgcagcggcggaccgacagcagatggcagcgttagtggagcaggaggcgaggataggaccttctcgtcgtccgacatggccggcgacggtgcactcgaccattgccggtagcagtgtcgaagctatagggggtgccgaactgggcctggcaccccccaatggcccatgaacgattccccacccccgacaaagcccatctggccatctgcgcagctgcccagcccattagcacttggagtctcgatatacgggagagagtcaagcgatacctcggcttcgtcgtgaagtcccatcgcttgcgagatggctaacgggcgatcgctaggggccggccttcagtttctcaagtacgcagcaccgacgcatcgtttccggtctccctcgtcccgtccggcgctaatcggcgatcagccgattgcagtctcgtggcgacgcggccagccgccgatagagtggctgctcgaggcaccaagcaggagctaggagcaagcaatccaacagaggtggtctgcagaacatgcgcacatcttctgagctcacggaccaggttccacctatctgttggctgctgctttttgctacatcaaaattgctaggtgtttagctaagatgaagaggaagataacaacgattgattgcttttacaagccagtggctccaagggcaggctctgttgaaaaatcctaacccaactaatgtggaagctgttgatccggttaatctgcaatctcctaatcagaacagtgctgaacctttagagctgaacaaggaattgtaactacggcatttgaaagggacccagggtgcccatcgatcggctagaggaggtggaagcggttttgctcgatttttcttgggttttagttgaagattgaagcctacaaggtacccattgaatgtaatggatctggaatggataactacagcggatcgtggctctcgttgccgtggccaccagcacaaacttagttgatgcactggaataaatttggtgtccatgtcatgattgcaaaaaagacagacaactttcggctcaacaggtccatgcacatcttcttacaaggggttttgtgggcaacttccttggcgaggaggagcaaggtgagggaagtgccggcaactatcacgggcatgatgcaaatgacggctgcgaggaggaggaggaccaaacgtgtgtcgatcatggtgaacctattctagatcagatgctgcgcgatggggagaggtttggcactgataatagggaatatcgcaagatcacaaccatggtgaaggactccaaaactctagtttacaatggatgtaagtaggggtggacaggaagctcgtggctcgttagctcgctcggctcgtgacaagcccggctcggcttcatttttctaacaagccgggctaggattttagctcgttagagataacgagccagctcgagctgctcgcgagccttaacgagctaggccttgacaagttagcaggccgcagcccacaacttttagacttcaaaaattttagacttacaatcttttgatttaggaaatttaaacttagcatattttgagttagaatatatattgaaatgtttaggatttaaagataggaatttttggacccatgagtttttagacttggtgaattttgacttagggatgaaattggggtcgtatgg

SEQ ID NO: 19462 - DNA, 1351 bp, Oryza sativa
  ref <308>: DATABASE ACCESSION NUMBER: AK069820
  ref <309>: DATABASE ENTRY DATE: 2001-12-06
ggagccctccaaattcccaaggcgggcctcgagtcgagcccaaaccccttcgccgccccgccatgcagttccccttcgccgccggcgattaccccgccgaccaggtcgaccccgactacctctacttcctccgccacatccgccccgatggcgactcctacaccctcgagctcccctccgatggcgtctcccctccttccctcgtgaagtacgaggcccccgccgacaccggcagcaccgacggcgagtgcgtctccgatccctcccctggccgcgccagcaccaaccgcccgccggaggagaaggagtcgtcggtggaggtggacgccgagcctcctgccccctcctggatcgactccctcgtcgacatcgacgaggactaccgcctcttcctcaagcacacgcgcgtggtgaacgacaacatggtgctcgagattgacggcgccgtcgtcacctacccgtgcgccgcgtcctccgagagcagcagcgaggtcgaggatgcgcgggagaaagaggtggccatggattcagacgagccggtggtaattcttccggacccaaaagtatgcgactgggtggcggtgggtgacgcatccgtgcgaacattagatagtaagaagaagaggaagatgagttcaagcaattccaataatgccggcccttccatccccccggggtcacaaggtgttatatggccggcacatatcaacagtagaccggattcagatttcaagcagaggttattggatgctctcagcaaaccatttagtcgaaaagaatatattaagctatttgacatggcttctattcgtacaccattagtaaaattacggcaggtgcgcaatgatgtaaagttctaccctacacaggaaatgggaaattcatactttgatcattacccagatctcgttgaccaagttatgcacactagctttccaaatggtttagctctgatgcgtgggtttttcttctggttgcagaataatgcacatgaagatcaattcaggccatgggttgatgtttctaaagaccacgaggttattcctttgatcgattgagatttacacattgcagctggtcaaaccctcaagtccaaaacattaaacatctatttgcgggaatgactctcttaagggtgacgtaatgtcatcagcagagattgtctcgtatctatatggaatgagataaataaatatattgccaatgatcgagaaataattccctattggaatatgcgcacatcctctttgcaaataatttaacattgagttttgcctgtgaatttgagggctggattccatgttctacctgatctcaccatcataaagcaataaagcagtggtgttatttc

SEQ ID NO: 19463 - DNA, 2315 bp, Oryza sativa
  ref <308>: DATABASE ACCESSION NUMBER: AK069821
  ref <309>: DATABASE ENTRY DATE: 2001-12-06
gacgtcttccattccagcccagatcgagcgagagagccgtctccctcttcgcttctcctctcccccccgtgatctgaccgccggcgacgaccccctcccaccacccgccgccgccgccgcgcccccgcccccgccggcgacgaccaccatgtcgtacgatcgcgtcacgaccttcgaggactcggagaaggagagcgagtacggctacgtccgcaaggtttctggacctgtggtcgtggctgatggaatgggtggtgctgccatgtatgaacttgtccgagttggtaatgataacctcattggggaaattattcgtcttgagggtgattcagccaccattcaagtttatgaggaaacagctgggttgatggtcaatgatccagtgttgagaacaagaaagcctctttcagttgaattgggacctggtatccttggaaatatctttgatggaatccagcgccctctaaaaactattgctataaagtctggagatgtgtacataccacgtggtgtttcagtccctgctcttgacaaagatcagttgtgggattttgagccaaagaagctaggtgttggagatgccatcactggtggagatctatatgctactgtgtttgagaatacgctgatgaaacatcatgttgcccttcctcctggttctatggggaaaattagttacattgcaccagctggccagtatagcttgcaggatacagttctggaactggaattccagggcatcaaaaagcaatttactatgctccagacatggcctgtccggtcaccaaggcctgtttcatcaaagcttgctgctgacacgcctcttctaaccggacagcgtgtacttgatgcactatttccctcagttcttggaggaacttgtgctattcctggagcatttggttgtggaaaaactgtcattagtcaggcactttcaaagtactccaattctgaagctgtggtttatgtgggctgcggggaaggaggaaacgagatggctgaggtccttatggacttcccacaattgacaatgacattgcctgatggacgtgaagagtctgtcatgaaaagaactacacttgttgctaacacatccaacatgcctgttgctgctcgtgaagcctccatttatacaggaattacaattgctgaatacttccgtgacatgggctataatgtcagtatgatggctgattctacttctcggtgggctgaagctttgcgtgagatttcaggacgtctggctgaaatgcctgcggatagtggttaccctgcatatttggctgcacgtttggcatccttttacgaacgtgctggtaaggtgaaatgtctcggcagtccagatcggacaggcagtgtcacaattgttggtgctgtctctccacctggaggtgatttttcagatcctgttacctctgcaactcttggtattgtgcaggtcttttggggattggataagaagctggctcaaagaaagcatttcccatctgtcaattggctcatctcttactcaaaatactcaaaggctctggaatccttctatgagaagtttgatcaagatttcattgatattagaacaaaagctcgtgaagtgttacagagagaggacgatctaaatgaaattgtccagcttgttggtaaagatgcactggcagaatctgataagattacattggaaacagccaagctactaagggaagattacttggcacagaatgcatttaccccatatgacaagttctgtccattctacgagtctgtttggatgatgcgcaacattattcatttcaatacattagcaaatcaggctgtggagcgtgcagctaatgctgatggacaaaaaataacatacagtgtcataaagcatcgtatgggtgatctattttatcgcctagtatctcaaaagtttgaggaccctgcagagggtgaagatgtcctagtcgcaaaattccagaaattgtatgatgacctcacaaccggattccgcaacctagaagatgaagctaggtgaagtgctgtaaattgaggatcacattcgtgtaaacaataaaatatcaccagatattcgaagcgagttggggcaatttattttgcttcgcgtgaggttgtagatgtgaattacgtttcagaatcatcatattttccttctgcatcgacactgctgctgctttttgtagcttcctgtttgacctccggtgctcgatgaaggcattctttttggtgtacaattatttatattgtaagatacctgtgcacatgttgatagttgaataagcacgatgaccatctacttgaacatcatatatttttctccc

SEQ ID NO: 19464 - DNA, 3416 bp, Oryza sativa
  ref <308>: DATABASE ACCESSION NUMBER: AK069822
  ref <309>: DATABASE ENTRY DATE: 2001-12-06
tggttcaaaggaaaattcacataggaccatatcctgcagtccctgttgatccatcctgccaccgatcttgtctcttctccggccgccgggccgccctccgctttggaccttccggccaccggcctccgtcccgtgacctcctcctcatcctcatcctcctcgtggaaaccaccacccccatcttctgatgcttcctcctagtttctaacgcatcgatcacttccgacacgacatggcgtcgtcgtcgtcggcgctggtggtggtggtggcggttcttgcgttggcggaggcggcggtggcgttctcggggtacaacacgagcgccggggcggtggccgggaagctgaacgtgcacctggtgccgcactcccacgacgacgtcgggtggctcaagaccatcgaccagtacttcgtcggcaccaacaactccatccagggcgcgtgcgtgatgaacacgctcgactccgtggtggacgcgctcatcctggaccccgcgcgcaagttcgtcttcgcagagcaggctttcttccaaagatggtgggcagagaaaagcccaaaaatccaggccatagtccacaagctagttgattctggtcagctagagttcataaatggtgggtggtgtatgcatgatgaagccgccgtccattatattgacatgattgatcagaccacacttggtcatcgggtaatcaagaaacagtttaacaagatcccaagagctggctggcaaattgatccttttggtcattctgcagttcaaggttatttgcttggggcagagcttggtttcgattctatgcattttgcgagaatcgattaccaagatagagcaaagcgtaaaggagacaaaggcctagaggttatatggcgcggctcaagagcatttggttcatcttctcagatcttcacaaatgcatttcctgtccattatagccctccagatggcttcggcttcgaaattttcgatgattttgtacctgtacaggatgacatgttgctgtttgactacaatcttaaagaacgtgtgaatgattttgttgctgcagccttaaaacaggcaaatgttacgcgcacaaaccacataatgtggactatgggggacgattttaattaccagtatgctgagtcttggttccggaacatggacaggcttatcaattatgtgaacaaggatggccgtgtgcatgcactgtactctactccatctatttacacagatgcaaaacatgcgtcgaatgaatcatggccactcaaatacgatgattatttcccgtatgctgatgcaaaaaatgcttactggactggatattttacaagccgtccaactttcaagcgatatattcgaatgatcagtggatattacctggctgcgcgtcaattggaatttttggtgggtagaagttccttaggattgtttacttctagcttggaagatccactggggattgcccaacatcatgatgcagtctcaggaacggcaaagcaacacacaactgatgattattcgaaacgccttgcgattggggtttctcaggttgagaaaggtgttaatactgctctaagttgtctcacaagttccaaaggaacatgtacagcaacaaaatttagtcagtgccaacttctcaatattagctactgcccttcaactgaggaaggaatttcatccgcaaagagtttagttatagttgtttataatcctcttggatgggaacgtagtgactttgtaagagttccagtaaatgatgccaacttaattgtaaaaacctctgatggaacttctctggagtcacaactagttgaagttgatatcgtgacagcacgtttaaggaagttatacataaaggcttatcttggaatcacgtccgataaacccccaaagtattggctagtttttcaagcttctgtaccaccactcggctggaacacctacttcatatcaaaatctactggaacaggatctaatggaatggggtatgtctcaaccatggtttctccaagtaatgacacaatagaaattggaccagggcctctgaagatgtcctattcatcaaaatctggacaactcaagagaatgttcaattctatctctgcagtggatttgccaattcaacagagctttctttggtatgcttcaagcacgggagattctgaagattcacaggcatccggagcatatattttcagaccaaataggactacaccgactatagtttcaggaatggcgccattgaaagttatccatggacctcttgttgacgaagtccaccaacagttcagctcatggatttatcaggtcacgagactctacaagaataaggagcacgctgaagttgaatatactattggaccaatacctgttgatgatgatgatgacataggaaaggaggttgttaccagactgacaacaaatatggccaccaacaaaatattttatacagattctaatggaagagatttcctcgaaagggtgagaaaccacagggatgattgggaccttaatttgtctcaacctgttgcaggaaattactacccggtcaatcaaggaatatatgtagcagatgggaaatatgaactatctgtccttgtggatcatgctgttggagcttcgagtattcaagatggtcagattgaagttatgctccacaggcgtctttctgcagacgatggcagaggagttggggaaccacttaatgaagtagtatgtgtggatcaaaagtgcgatgggctagtggccagggcaacttactatatcaatgtcaataagaaaggacatggagctcattggcgccgaacatatagccaacaagtttattcaccgttccttgttgcttttgcacatgaggacgaacgcagttggaaatccaacaatattgcaaaagcaagtacggtagaaggaaactatagtcttcctgataatgttgcaatcatcaccttgcagagtcttgatgatggcaccacactccttcgattggcgcatctttttcaggctcaagaggacacacaatattcagtaatggcaaaggttgaattgagaaagctgtttggaaagaggataatcaaagatttgactgagactagcctatctgcaaaccaaaagaagtcagagatgaagaagctcaattggagagtaaccggggagagcaaaactgatcctgcaccattgaagggtggcccagttgacagccacgcccttgttgttgagcttggaccgatggagatacgcacattcttgctgaaattctgaactgcggttgttttggccttttattcttctctcttttgctgtgaaggaaaggcttaatttggatagttgcctggatttatctgaggatgatgttgctgtcggtaactggtaataagagaataataagtgcttccagcaaatgaaataaaggaaaatattcttgttgccc

SEQ ID NO: 19465 - DNA, 1199 bp, Oryza sativa
  ref <308>: DATABASE ACCESSION NUMBER: AK069823
  ref <309>: DATABASE ENTRY DATE: 2001-12-06
gactacaaatttatcttttctcgaacgaaaaaaaaaagcgataaaaaccatctcatcgaggaagaaagcaacccacgataaccctcttcttcttctacccatctcgccgtcgccgccgccgccgccgccgccgccgtcgaatcgatcgaagcccagcagcgagcgatggggctggactactacaaggtgctcggcgtgggccgcggcgccaccgacgaggagctcaagagatcctacgacgtgctcagcgacaagaaccgctcgccgcacgccgacgactccctcttcaagcaaggccggcgcggcgccgccgccgaccacctcctcctcctcctcccacggcggcggaggaggcttccgcttcagcccgaggagcgccgaggagatcttctcggagatgttcgggggcgcattcggcggcgcggggccacgcgcccccggcgccgggttcccggggttcggtgggtccccccgggcaggggagacgtcggcgacgaaagctccggcgatcgagcggcagctggcttgcagccttgaggacctctacagggggcgccaccaagaagatgaagatctctagggatgtcctcgacgccactgggaaacccgacaaatctggaggagatcctgacaatcgatatcaagcctggatggaagaagggtacaaaggtaacctttcccaagaaaggcaatgagaagcctaacatcataccatcagacctagtgtttataatagaagagcggtcgcacgctagattcaagcgagacaaggatgatcttatttacacgcataggatctcgctcgtggaggctttgaccggttgcacagtccaactgacaactctggatgggcggaatttaaccgttccagtgaagtccgtcatcaatcctacttctgaagaggttgtgaagggcgaagggatgccaatcacaaaggaaccgtctaagaaaggggatctgaagatcaggtttcagatcaagttccccaccaatctaacgtctgaccaaaagtcagggatccagcaacttttgcctaagccttaactggtagtacaatattgtgaacctgtatttagtcgtttgttttagcagttgggaatacattgagagggtttgatcacagttgctgaatgtacaatcactgcttcggtgcaagtattgaagaacatgtttgcattggtatttccaacattactccg

SEQ ID NO: 19466 - DNA, 1507 bp, Oryza sativa
  ref <308>: DATABASE ACCESSION NUMBER: AK069824
  ref <309>: DATABASE ENTRY DATE: 2001-12-06
gtgtgttcaaaccgaagcaaaacgggaaggaaaaccaaccaaatccaagaagctgcttctatggcgacggcggcggatggcgtggcggtagcgaggcaagcggagctccggcggatcgagggcaactcctgcttcaacaaggcccgcctcggcgccgccatcgactgctacaccgaggctatcgctctttgccccgacgtcgccgtctactggctcaaccggggcctctgccatttcaagcgcaaggaatgggctaaggtcgaagaggatagcaggagagctcttgcccttgatgacactctggtcaaggtaacatcatctcaatgtcccttgttcatacataaatcaagtgattgttacaggtcttcaactttggtccagggtcactatttgctgggatgtgccatgcttgagaaggaacaatgtgctcttgctatcaaggaattcaacaaggctttggatcttcttaagtcttcgaatttgggggacaaaatggcggaggacatttggcaggttcttgcgaaggcaaaataccaagattgggaaatacactccactaagagagtttggaagatgcaaagtttaaagtatgttatgcatgaaaaataattgcaataataatgttccataattgtgttgcagattaactgtagtgtgaatcttgggtattggtggccaatttactcctataacaacctggacactccctttattatctaaaatttatgatgctttaaactttctaacaccactgtgtcacatggacaattagggaagcatgtgaaaatgctttgcaggagcaccactttcttagtggcacacttgtgggagatggctcaaccaatgagtatacagaccaactgaaattgttatcagaagtcttcaccaaagctacaatcgacgatacaccaacagatgtaatattattatctatgttatctcatgttcaacatctttgtgctagcatattttttttctctgtgatcttaggctgttgctacctgaaaatctaggtgcctgactacctttgctgccaaataacctttgagatttttagagatccagtgatcacacccagtggtataacgtatgagaggtccataatccttgaacatctttgcaaggtgggcaatttcgacccggtgacacgagagcctctgaaagagcatcaattggttcctaacctggctataaaggaagcagtccaagcctacctcaagaatcacagttgggcctacaagttgaactgatgatgttgctctgtagttgcttagtgctaacaacaggtgttgataaaatgttgggttgtcaagggggaattctttgcttttctgatgtaatgtataagcaagttcattcgtgccctcatggaattgattgattcttgggcaacttctgacgaaccttggacaattgtacataaaacatcatagcagaaccttggacggtttcagacataccgtgccaaaatgacaattctcagtgacaaattattcttttgttcggt

SEQ ID NO: 19467 - DNA, 1517 bp, Oryza sativa
  ref <308>: DATABASE ACCESSION NUMBER: AK069825
  ref <309>: DATABASE ENTRY DATE: 2001-12-06
gctaccaacaagagttgattctacagtacagatccctccctcctccaagctttcccatggcgctgcagtacgtggaggcacagcgcaggcgcgccccgacctcgccgacgcctacgccgacctcgccgacctctaccagcgcaagctctggcaccagctcaccctcaagctcgaccacttcctccaactccccgccgcccagactggcgacaccatcatacagctctacaacaatttcatctctgacttcgagacgaagatcaatcttctcaaacttgcccacttcgcggtcatcgcttcacgccagtaccctgacaaggatgccgcgattagtttcctcgagggggtaaccgcaaaactgcgcgagacgagggaacggcgcatcgatgaacccgttctctatgtcaagatgcagatagctgcaattaaccttgagaagggagatcaaaaggagtgcaagaagcttttggatgaagggaaatccacccttgatagcatgactgatgttgatcccacagtccatgctagcttttattggatatcatctcagtaccataaggcttgccaagaattcgctgaattctataagaatgctcttctttatctggcctacactactgtggagtcgctctctgagtcattcaagctggatttggcatttgatctctcccttgcagccttgcttggtgataacatatacaactttggggaattattagctcacccgattatcaacagtctaattggaaccaaggtggagtgggtctatcatatgttgcaagcattcaacactggcaacctagctctctaccaagaactttgcaaggtccacaacgctgctcttagtgcacagccagctttggtgcagaatgaacgaaaactgctagagaagatcaacattctatgtctgatggagataatctttacccggccatcagaagacagaactatcccattaagtgttatagctgagcgcactaagctttctatcagtgatgtggaatatcttcttatgaagagcctctcggttcatcttatagaagggataattgatgaggtggacagcacagttcacgtgtcatgggtccagcctagagtacttggaattccacaggtgaaggccttgcgtgagcggctggacgcatgggtcggaaaagttcacactacactgttgtcagttgaggcagagacccctgatcttgtggctgcataacttatcgaccacttgtcctttcgctatacgagcttggtcaacaaggctgcggtgcttaatgagaggtgatctggctgtggtgcttatagttttctggagaatgagaacatgttgccttggatatttccctgcgtcctgttgatcaggatctgtaatttcaccctttcttttatcctttgggcattgagtcctggagctatcacggaaaagatacaaacgggccaaaagtttcataccggcaagatgttatcgtagttcttttagtcaaatttagattgtaatgcagaggatattttcccctttt

SEQ ID NO: 19468 - DNA, 1059 bp, Oryza sativa
  ref <308>: DATABASE ACCESSION NUMBER: AK069826
  ref <309>: DATABASE ENTRY DATE: 2001-12-06
gaggagtaaatcaatcagtgggagaggattaagatgatgatgatctgtctcttaggcctccatcacgcccgttaattccctttcaggctggtcttcgcctacctgttgctgctgctcctccatcaaatacccccattccctctcctctctgctactactatacctccttcttgttcctttcttcagacaaaggctttgcctttccttcctcttccaccatcctgccacaagaagcaagaacctctcttaatttgagcaagaaaccattcgtcacatcaacggaggaagcagctatagtttgattgattggttgatcgatcgatgctgggcggcggcaagatgaagggtggggagacgatgggcggcggcggcggcagcggcagcagcagcattagcccgctggtgtcgttcgtgctgggcgccgccatggccaccgtctgcatcctcttcgtcatgtccgccagcccgggacgccgcctcgctgacatctccgcctggagcaacgccgacgactcgccgccgctgccgctcccgttgcaggacgccgccgtcgactccaacgactcgctggccgccgccgccgccgccaacgtcaccgtcgttgctgctccggctcccgcccccgtccaggctccggcgccggcgtccccttacggcgacctggaggaggtgctccggcgagcggcgaccaaggacaggacggtgatcatgacgcagatcaacctggcgtggacgaagccggggtcgctgctggacctcttcttcgagagcttcaggctcggggagggcggcgtgtcgcggctgctggaccacctggtgatcgtcaccatggaccccgcggcgtacgaggggtgccaggcggtgcaccgccattgctacttcctccgcaccaccggcgtcgactaccgctccgaagatgttcatgagcaaggactacctcgagatgatgtggggtcgcaacaagtttcagcagaccatccttgagctcggctacaacttcctcttcacggatgtggacgtgatgtggttcagggacccgttcaggcacatatcaatggg

SEQ ID NO: 19469 - DNA, 2097 bp, Oryza sativa
  ref <308>: DATABASE ACCESSION NUMBER: AK069827
  ref <309>: DATABASE ENTRY DATE: 2001-12-06
gatcttgcttctatttcacaaagccatattcctgttgatagagttcactgtgaatctgccataccatccatgagcgggattggagggatgattgcgagttccgtggcgaatcgggtcgccagcaggctcagcgagcttgtggtggaggaggccactctgctgtggagattcaaggacgacgtggacgacatggaggagaagatgagagatctggaggctgtgatacaagatgttgatggcaaagcacgccagggaggaaaagatggagaggcggaacggcggtggctcaacaaactcaagtccgtcgcctacgacgttgaggacgtgctggatgagctcgatgctgctcagctcatcaagaaccatcaacccaagctcaagttattcctttcccggaacaatccgcttctccggaagatgaccatagcccgcaacatgaagaactcgagggagaaaatagtctcaataaaaaaggatagcattaagcttcatcatgtgcatcgtgaactagtggcagaagggagtagagacaatgaaacttttgcagatgatggtgacgtggacattggaatgctagggagggatgccgaaacaaaaaaaataatcaaccttctgttgaacactgaagctaaggaggatatctcaatcatcccaattgttgggcttggtggactagggaagactaccttagcccaagcagtttttgcagacaaaagggtcaatgtctttgatttgcgaatctgggtctatgtttccaaggagtttgacctgctcaaaattgggaaggctatcatcagaggagcaaacagaagtatcaacctggacaactgcaacttgcagtttgtaaacaataatctgaaaaaagaacttgccaacagaagatacttgattgttctagatgatctctgggaagaatatggagaaaatttggaaaagttgaagcagatgttacaacatggcggaaagggtagcaagattatagcaactacacgtagtggaagcgtagtgcaagtactatacactggttatcttgcaaatgaacggaaagtatgtccggtgcctgagcctgatcatatcaatttgggtgttttatcaccttacgactgctggagcgtcatgaagcggagagtatttgggcctgatgatggccaaaatggcttagaggaaattggaaggcaaattgccgagaagtgtggaggactaccactggtggcaaatgctctcgggcaagtaatgtctgaacataggacggttgaggcatggacagatataagggatagaaagattgttttggatttcaaagcagatcatcagcaagacactatagagcgcctaatgttgagctattactatatgaagcgagaattcaaaatgtgctttacatatttggcagccttttcgaagggtttcgtcatggacactgatcgcttgatccagcaatggatagcccttggatacattgaagcacgagataatggtcaaaggtgtgtcaactatcttttgcggatgtcctttcttcagatttccaagtcttccatggttagtccaatgcacaccaaagctccacgcaagctcaccatgcatgatttagtgcatgatctcgcaacaataattgctcctgatgaattccttgtcatggacgctaccatgccaaatacatggagcaaagctaataataagcgttattgccgacatgcacagttggtcaactaccagaagcaacccaagtttttcaaagatctaccaagcaaggaacaaaaggtgtgcttgataaggcttggtccattaaagagtgtctaaatttacctggccgtgaagaacatgatgtacatgagatagaaaatggagagtgttgcagtatagtggagcttgggaaactaagttgtcgtgcactgggaattcaacatcttgaaaatgttgagcggctggacaatgcaagggaagctaagttgcgtgatatgactgaccttcgggaactaactttgtcatggggacttggtggcacgagaaatgtggacaaggatgaagaggtgcttgagaacctattacctcctcgaactcttgaaagttttatggtacatgtgcaaggatttccct

SEQ ID NO: 19470 - DNA, 3178 bp, Oryza sativa
  ref <308>: DATABASE ACCESSION NUMBER: AK069828
  ref <309>: DATABASE ENTRY DATE: 2001-12-06
ggtgctcctacttgggaagttgggtgggattggcgtcgtgttcgtgtagctcctcttctcctcattgctggcttggcctttggctataccttcccttcatcacctcctagtataaagcaattcaattcccaatccccccggcccgaagtgaaggaagcggatcatggagctcgccatggattttgcgctccgcctccgcgacgccgccaaccaccacctctcccgctacgagcctctcgtgctcctcgccgcgcccctcctcgccctcctcgctgcccgcaccctccacgccgccgctgccgccgtcgccgaccgcggtctccgcaccgtcctcctcgctctagccatgacagccatcaagttgcttccgggagttagcgcctacatcaacgctgagaagaggaaggttgttgaccagctgcagtcaggtggcacgtccacaaaaagtactctgcggaccgagttgccaactgttgggctttccaaccaagtgataaacgatctcgaaacactgaaagctagagatgtaaactggcagggaaaatgctctggcacagtttatattgctgggagtgaatccgaaggtcattttgcattgataaacaaggcttactctatgttttcacacaccaacccacttcaccaggacgtattcaagagtgtggcacaattagaggctgaagtagttgcaatgacagctgctttgcttggcatcaaagaaaaatcatccggtggacagatttgtggtaatatgacatcgggcggaactgaaagcatattattagcagtaaaaacatcacgcgactatatgcgaacaaagaagggcattacaaagcctgaaatgataattgccgaatcagcacattctgcatacgataaagctgctcaatatttcaatattaaagtgcggcgtgtgccagtgaacaaagagtttcttgcagatgtgaaaggattcaaaaggtgtataaacggaaatacgataatgaattatatataattaactccagtaagtccatatgctacagatatcacaacagcgatgaatccataatttcatatacattttatttatattttttaggggcaaccaaaggaagatgcgctgcttatattgaaagcataaagcaagaaacagagttcattggccaagcatacaaacacagtaacagacaacacaaactaccaatttaaatgcattcggtccttctgtttagtgaagctaactcaagaagatttgtaggtggtacatagttgctctctatggtaccatgacatgttatagctcatatgtttgccggtcaatttggtaatttatttaacctatactctgaacttttcaggtcttcattgtttctggcaatgtgatcaaaatttatgctgaaggagggttgggttattctatacatggtttgggcacagagcttgagttctatgatcttctgcaaaaacttggctcgccattgatcaaccatgtccctgagatcattgcaagtggctttcttgtgtacctggatggtgtctacaagacagttccatgggatggaaacggaataccagatgttctagctaaatactactctttggaggtgtcttatgcaaacggctcttttcctcttggattatggagcaagcaactgtttggattgagtaattcaactgatgctccagacagaccaatttgtccttacatggttaccagaaaatgcaaaggggatatttttgctcgcatacgtgataaattgaccaagactgatgttttgaatcttgcatcatccttgggagttcaaatgcgaaatattcatcaattaccccttccacatgtggaacacatatccaaatctgggaacgaagatatcaaagcaaaggaaaattcaatttctgatgtcactcatgttccgcctgaatggaaacaagtagtttctactctagacaggagaaagaaaagtataaagaagcatctaagtaactggtaggtggaaatattttgaagctggtttgtcggtatatatttttagtcactaaaaatgatttttgttttgctctgttttttatttatccaaaaagtaatattttttaatcattgaggaaaagattttttttccctccgaaataaattgcatagaatgtgaatacaaagatattatcaaactatataaaggttcagtacaggttatgtttagattgtgcccttggagttccggaaacattgttcgaggcttgtccaggactccagaatacagtggtagtcgtggattagattactagtcctatctcttttctccttatttaacataagcaaaatctaagatgcaatgactatgcatttatttggagttgacttgttatatcctgacaggcaatcactagatgcagttcataatgatactataacattctttacgtatctgtgtaggggtggttcaattccacaggttctaattgagaaggctgaagaatatctccctgacgacatccgctttcttatcaagtttgttaaggacgatgatggtgattcagtctatgtggtaccttcttggatacattcagatataatggatgataacattctcattgaggggaccacagaaccaggaacttccactgattgcattgccgttgaagatctgaacaaaatggatgcaattcatatcattgatttcagtgatctgtccattggggatcctctatgtgacttaattccactgcacttggatgtattccgtggtgatattgatcttctcaggcagtttttacgaagctatcagcttccttttctgagagcagaatcaaataaagatatatacaagtcaatacaaaattctaaattcagcagggcatcgtatcgtgcgatgtgctactgcatacttcacgaggacaacgtcctgggagccatatttagcctgtggaaggatctgggcaccgcgacgtcatgggaagatgttgaacacttggtttggggagagctgaatcaataccagcagtcatgcagcgtgggcgaaattaactgacgcgatagagttttccatactaagataaaggcacaagaaatttgatttgtaacctgaaactgtaccacaaagtataccatcgaaacagtgtattatgttacactaacacatgcttgatatgcaataacaacgcatcgaaaggacaacttcgttcagatgcaacatattgg

SEQ ID NO: 19471 - DNA, 4568 bp, Oryza sativa
  ref <308>: DATABASE ACCESSION NUMBER: AK069829
  ref <309>: DATABASE ENTRY DATE: 2001-12-06
gctagtccttggtaatgaactaatggtggcagtgtggcactcgctccgctgctctattcccccctcgcgtccgccgccgacggcgatggccacctcgccgccgcgaccacttcatcgtctcccttcagatggcggcgcaagatctcgtactggtgagcaccggcaggggggcagtagcctcaagacccccccctccctcccccccaccgcgcaacgagaggcgcgcgccacaggaatctacggatcattcagttttgaccagaacccatattgcaatgggtgttctacacacccctctctgagattctcacgggaggtgattgattccaaatcctctgtagtagcagataagtcaccaaactttagggtggagaatgctccttttgcttatcaggaaccatggcgctgcttgaagatcggtcagccattcctatatccttaggtgcatacctcaagctgcagtgagggaacatatgacattgtagtcttgtccggatagagatcaatataccttagcttgcaactgttctcaatgagtagtcaacggatggcgggagagggaagggggaggtgacgtacgagcacacgagggaggcggtgagatcgctggatcaggagaaaggattggtgcgaaagcacaattttaccctcccaccaacagaacacaatcggtacctcctttcgcggggacgcggtaccaccaggtatcgagcaattccagccgttagattgcgccagatcgagtgccaggatatggtacagcctcccctcaaggattgtaaaaagtctcctagtattatttatcagatgtttagtatatgggttatcactctgttaattgcagtttgaccttgacaagttccaagtctcctactgatattttctttttttctaacattttcacagttctactatttaacagacccctttgcatttgaagccatccgttattactgattgagcattacaccttagtattgccataccttgcctttacctatacctcaaggcactcaatcctttcaatggctgatgctgttctaccagcttttctgcaagtgctttttcagaatgccatggagctgttgaagaagaaactggagtttgcttgtgatattgataatgaggggcaaaaactcatgtccaatatggaaatgattcaagctgttcttagaggaggcgagaagatgaagtttaatgatgagcagagactctggttttctgatctgaaagatgctggctatgatgccatggatgtattggatgaatacctctatgaagttcagcgacgtaaggtgatccatcttccccatctgcgtaaccatacattaagttctgctttgaatccttcacgtcttaaatttatgagtaatatggaaaggaagattaagtgtatagctggtaaaattgatgatttgaaaaataagcgcttaaccttccaagtagaggtccatgattaaacagatcaacaacatgaaggaagtatgtgtaacgggagtacctctcttcctccaatttcaccctgtggtagagagaatgatcaggagaggattgtaaatatgcttctccaacgtgatttgaagcccaacattgcagtattgcctatactgggtgaggcttatattgggaagacaactgttgctcagctaatcatcaatgacaagcgtgtatcaaggcactttgatgtcagaatatgggctcatgtatcacctgatttcaatataaaaaggatatctgcatctatcctagagtctatatatgacaaatctcattatgacaacctggacaccctccaaaaacacatacaaaagcggctacgagggaaaaggttcctgcttgtcctagatgactattggacagagaactggcatgactgggaggaggtcaagcgtccattgctcaaggcttctgctggaagcaaggttatagtgacaacacggagtggggcagtcgcaaaattgcttggtatggatctaacgtatcaattgaaactatcaattgaaacctctatcaagtgaggactgctggtcattgttccgccgatgcgcccttggtgtggaagtcaaagaatataattctggagatttcctcgatagattgaagatggaagttctacagaagtgtaacggtgttcctttcattgcggccagcttaggccatagattacaccagaaggataaaagtaagtgggttgctattctgcaagaggaaatttgtgatgccaatcccaattatttcattcgggcccgtcaactgagctatgcacagttacactcccatctcaagccttgttttgcttactgctcaattattccacgggaattccagtttgaggagtggcttatcaagcattggatggctcagggcttcattcagtctaagcctgatgctgtagccactgggagttcttactttagaactttatttgaacagtcgtttttccagagagaactggttcaccatagtggggaacgacaccgttatagcatgtcccgaatgatgcatgagctcgctttgcacgtctcaactgatgaatgctatatcttggggagtcctggcgaagttccagagaaggtccggcatttaacagtattactcgacgagtttgccagccaaaacatgttcgagacaatttcccaatgtaagcatttacatacacttctagtcactggtggcaacgcaggttatgaactgagtatccccaaaaatttactcaatagtacattaaaaaagcttcgacttctagaattggataacattgagatcaccaagctacctaaatcaattggaaatttgatacacctccgctgtctcatgctccaaggatccaagataagaaagctgcctgaatcaatatgcagcctgtacaatcttcaaactctgtgcctaaggaactgctatgatcttgagaagttgccacgcagaataaagtatcttcacaagctaaggcatatcgatctgcatctggatgatccttcccctgatatccatggattgaaggatatgcctgtggatataggattgttgactgatcttcagacactgtcaaggtttgtcacaagcaagaggaacattcttgacaaccacagcaatattaaggagctagataaattggacaatctctgcggggaactactcatttcaaatctgcatgttgttaaggatgcgcaagaagctgcacaggcacatttggcttccaaacaatttctccaaaagatggagctctcatggaaaggcaacaacaaacaagctgaacaaattttggagcaactgaaaccaccctccggaataaaagagcttaccatttcaggttataccggcatatcgtgtcctatctggcttggttctgaaagctacacgaatctagtcactttgtcactctatcatttcaagagctgcaccgttgttccttccctttggctattacctcttttggaaaatctccacatcaagggatgggatgcattggttaaattttgtggtagcagttctgccaatttccaagctctgaagaagctacatttcgagaggatggacagtttaaagcaatgggatggggatgagagaagtgcattccctgcccttactgagctggttgtcgacaattgccccatgctggagcaaccgtctcacaagcttcgatcactgacaaagataacagtggaaggatcaccaaaatttcctggtcttcagaacttcccatcgctgacgagtgcgaatataatcgcgagcggtgagtttatttggggatcatggcgctccctttcttgtcttacgtccatcacccttcgcaaactgccgatggagcacatcccacctgggttaggacggctccgttttctgcgacaccttgagatcattcgttgtgagcaactggtgtccatgcctgaggattggccaccttgcaatctgactcgcttctccgtgaagcattgccctcagcttcttcagctacccaacggtctccaacgcctgcgagaattggaagacatggaggttgtaggatgtggaaagcttacctgcctcccggagatgagaaaacttacttcactagaaagactggagatttcagaatgtggctcgattcagtccctgccaagtaaaggtttgcccaagaaactgcagttcttgagcgtaaacaaatgcccatggcttagttcgcgttgcatggttctgggaagtactatctcttcactatggattgacggtgaacttattaggtactagtatgaattggatttagatttagaataaggggatgacaactctgcagtacagagtaagttaagcctcttttgtttgattccgtaacagtttcagaatgtaagttaagcctagtgtgcctcaaatgtcctacatgatcttgtttgtggagaaatcatctttcttctgtaatgtaaagtactgtttcatatgtattaacttggataaacgtgccagcaaaagcacaatgccagaatgggaaccaaaatgacccagtatgacatggtatctttctgtaagacatccttaaaccttgtgttttgttgaactttatcatttgcaccgaaccttttacaagcatgtct

SEQ ID NO: 19472 - DNA, 778 bp, Oryza sativa
  ref <308>: DATABASE ACCESSION NUMBER: AK069830
  ref <309>: DATABASE ENTRY DATE: 2001-12-06
gcgtctccctttcttctccccaaagaaagaagcgagagagagagagagaaagcttcgcaggcgacgatggcgagcggcggcgtggtgaagaaggagatcggcgggaaccacgacgtcctccgcttcggcgtcaacgacagcgtcaagggggacctcgcgccgccgcacccgctccaggccagcgtccacaaggatgccaagttctgggcggacaagaagaggttcggcgcggaagccatctacggatccgccttcaacatccgcaaggatcttgatgcccaaatcctctccaagttccaaaggccccctggtgcattgccgtcatctatgctaggatatgaggcactgactggttccttagatgattttgggtttgaagattatcttaacttgccccaagattctgaaagcttccgtgctcccgacatgcaccacggaatggaggttcgcctcggtttgtcaaagggacctgtttgccctagtttcaattgatttctcaaaaatgtatttcttgtcttacactgcgctcctcgttcagtatctatatcggtctttagaccgtgaccgtgaccgtgacatgtaagaactataggtattgcatccgtttgaggagttctaaaatcgaatttaatgttatcatgtttgaacttatgtccggtttgctggttgctgtggtcgaatgcacttaagaaaatgatttgctccctgcatggacatctgggaatctggccagttggagcgtgtacataatgagatgtctattatgcattggttctac

SEQ ID NO: 19473 - DNA, 1661 bp, Oryza sativa
  ref <308>: DATABASE ACCESSION NUMBER: AK069831
  ref <309>: DATABASE ENTRY DATE: 2001-12-06
gattcatgcctcccgcttcctcctccacccaatgccgccacagcgcctcgccaccgccaccgcgcaccaccccgccggcccgtcccgccgccggctccaccaccgccgcggcgcgatgttctccgtctcctgctggcgcatcggggccatcgcctccctcgtcgcggcggccgcggccaccaccgtgctcctcaacttctccctcccatcctcaccccacgtgcccgccacagacttcaccgggaaactgtccgccgcgatctccccgccgccaccgccctcgtcgcctcctccagcaccggcgacgccgcctcctcctcctcccgcgccaccgccacctgctgcaaggccgcgacgaagagagccgtcgtattggaggatggcgccggaggaggcactgcggtacgccaagaaggagataatggccgccgggccggtgatcgacgaccccgacctatacgcgcctctcttcaagaacgtctcccagttcaagaggagctatgaactgatggaacggatactcaaagtttacatttaccaggacggccggaggcccatcttccacacgcctcccctcagcggcatctacgcgtccgagggctggttcatgaagctcctcaaggagagccggaggttcgccgtcaccgaccccgccaaggcgcacctcttctaccttccctacagctcccagcagctcaggatctcgctctacgttcccgactcccacaacctcaggccgctggccgcctacctccgcgacttcgtcaaaggcctcgccgccaagtacccgttctggaatcgcaccagaggcgccgaccatttcctcgtcgcctgccatgattggctgcagggatcttacacgacgacggcgcatggcgacctgcgccggaacaccgtcaaggcgctgtgcaacgcggacagctcggaggggatcttcaccccgggcagggacgtgtcactcccggagacgacgatccggacgccgaggcggccgctccggtacgtcggcgggctgccggtgtcgcggcggggcatcctcgccttcttcgccggcaacgtgcacggcagggtgaggccggtgctcctcaagcactggggcgacggccgcgacgacgacatgcgggtgtacgggccgctcccggcgcgggtgtcccggcggatgagctacatccagcacatgaagaacagccgcttctgcctctgccccatggggtacgaggtgaacagcccccggatcgtggaggcgctctactacgagtgcgttccggtgatcatcgccgacaacttcgtgctgccgctgagcgacgtgctggactggagcgccttcgcggtggtcgtcgccgagaaggacgtaccggacctgaagaagatactgcaggggatcacgctccggaagtacgtggccatgcacggctgcgtcaagcggctgcagaggcatttcctgtggcacgcgaggcccctccggtacgacctcttccacatgatcctgcactccatctggctgagcagagtgaaccaaatcgagctccacgagtagagaccgcgtcttgtgttcggtcagagaaatgtacgttcttggttcagcgcaagattctctgtaagttttggagaagactggccagaatcttaaacgatatgcaattatgaattatgcatgcacc

SEQ ID NO: 19474 - DNA, 840 bp, Oryza sativa
  ref <308>: DATABASE ACCESSION NUMBER: AK069832
  ref <309>: DATABASE ENTRY DATE: 2001-12-06
gggcggcgccgtcgtccctcgcgtcctcccacctctcccgcctcgccgacctccgccgcgcaggcgtcgccgccgccgccccggcgcatccgcagcagctccgcctcgggtgctcccgccgccgcgcccagcgcgtcgtcgccatggccggatccggcaagttcttcgttggaggcaactggaagtgcgtaagtatccgctcctcctcatcaatcaacttttgcagacgcacggggtacctatgagcagagcgatgatggatggagattctgctgctgctgcaccttcgtgatcttgagtcgttggcgccttgtggttgccgcctaggacattccaaagatgagcggaatgaatgggattttttgtcgtcatcaatacatcgtgatctacaccacacctggtcgtgtttgctagatatggagtcgcttttggtgccacaagatgtagtcgtttttggcttaagcagttctcttggggaatatgcatcttatatgcaaaaatgtataatttttttcagacttcatcttctcagtccctggctttctcatttgcccaaatttcatggagtcgagcaactactgttacgtagacagggattggttctagtgctccaaggataagaaagtgtgtgcatcagtatcttgtccaaaataaattagttctagtggtccgagggtaagaaagtgtgcatcagtatcttgtccaaaaataaagatagtagcatcttctttaggccatccttaggacgagctgattcagttgctcatttttccttttggagaatcatctcggtattatatgttgcttcactttttatcgagagcttatgctaactatatc

SEQ ID NO: 19475 - DNA, 1677 bp, Oryza sativa
  ref <308>: DATABASE ACCESSION NUMBER: AK069833
  ref <309>: DATABASE ENTRY DATE: 2001-12-06
gacaaatctcacgcactgtctctcgttcgcgcaaagcacgctgcttttctccgctttgcgagcaccatagcctagcccaccatgtgcggcggcgccatcctctccgacctcatcccgccgccgcggcgggtcaccgccggcgacctctggctggagaagaccaagaagcagcagcagcagaagaagaagaacaagggcgcgaggaggctgccactgcgccaagaggaggaggatgatttcgaggccgacttcgaggagttcgaggtggattccggcgagtgggaggtggagtccgacgccgacgaggccaagccgctcgccgcgccccggagcggcttcgctaaaggtggattgaaaaacactactgttgctggtgctgatgggcctgcagcaaggtctgctaaaaggaagagaaagaaccaattcaggggtatccgccagcggccatggggcaaatgggctgcggaaatcagagatcctcgcaaaggtgtccgcgtctggcttggcaccttcaactctcctgaggaagctgccagagcttatgatgctgaagcacgaaggattcgaggcaagaaggccaaggtcaatttcccagatggggctccagtggcttctcagaggagtcatgctgagccctcctccatgaacatgcctgctttcagcatcgaagagaagccggccgtcatgtcagcaggcaacaaaaccatgtacaacacaaatgcttatgcctaccctgctgttgagtacaccttacaggagccatttgtgcagattcagaatgtctcatttgttcctgcaatgaacgcgattgaggatactttcgtgaacctgtcctctgatcaagggagcaactcctttggttgctcggactttagccaggagaatgatatcaagacccctgacataacttccatgcttgcaccgaccatgacaggtgttgatgactccgcattcctccagaacaatgccagtgatgcaatggtacctcctgtgatggggaatgctagcattgatcttgctgacctggagccgtacatgaaatttctgatcgatggtggttcggatgagtcgattgacacccttctgagctctgatggatctcaggatgtggccagtagcatggacctttggagcttcgatgacatgcccgtgtcggccgagttctactgaggggtttggggtgtagcaactggtgcctgtatatataaggacaaatggaataaacattctggacatccaagaagcggcatgtgtctgtcgggcgcttctagttgcgctatatagctatgttagtatgttagtatgtgctgtgtctagcttagatgctgaagtctcaagtactatttggcagtgaaactatctatctgtaactgctatatgaggctggaacaagttacttagcttctaccttatctgtacttgctatagtggctgtgaaccttgtggatctgaactctgaagccaatgtttactatataatgtggttggttttataaactctagttgatttggacccctgtcaatggtcatgctatggctggggataagaaccattgatgatcatatttgactagaaacgctgcttccaaaatatcccataaagtaaagctgaacttgtactaatgttcttgcacaagttgcaataatgttgccttatggaaaaacagtttccggacc

SEQ ID NO: 19476 - DNA, 3358 bp, Oryza sativa
  ref <308>: DATABASE ACCESSION NUMBER: AK069834
  ref <309>: DATABASE ENTRY DATE: 2001-12-06
ggaaagtctgaaacggtcgtctcctcgagtctgaactctcgagtctcaaccctcgtcgtcgtcgtctccacccaatctctcccatttccatttccatttccatttcctcccaaaaaaacacacaagacgaaaaaaggagaaaaatcgcaactttaccattcggtccaaactagcgacatccctttctccctcccttgtgcagcatcaaactcgttcaaaggttagccttttgggggtttctctcgtttgactgacccggggtggagtggagacgtggagtcgttggtgtttggttcagtatcctcgctcttcttggttgttggtggtggctcaaagattgggctttgacccggctttggccgtcgttgacgacggtggaggagggattcctcaatccgcggtgaaaagattttgggttttcaagtcttaattaggtcggagtgagttttgattgtactactccatgtttactcgatttgggaggtgaggaggaggaggttaggttacctaggtttttggagggggagatggccggagcgggagccgtgggggggagcaactgggaggagatggtgaggaggatgctcccaccggggaccaccatcccggaggcgccggccaacctcgactattcgattgcgctcgagtacgacggccctccggtgtcctacgagctccccaggatcgatcccgtcgacctgccggcgattcccaccgcgcagcccgtctccggcccgctggtgcccgggaggagcaacggcgtggtggctccggtcgtcaggccggtgtttatgccgccggtgcaccggaagcaggatgctcaccgtgccgagccaccgccggttgcggcacagggtaggaggaggagaagctcggaatcggtcgattcggcgccgcagaatgaggggttctctgatgatgatgactcatgctcggtgtcgcaagaatccgcgcacaatttccatgggcagagaggtggtaggacagctgctcaggagggaagaagagctcaggttgtcacatttggggtcactgaggacagcaggtatgagagcaaagagtttgatgatgtgtcggaacagtacgtggcggtgaccaagaaggagaagagagggaggacctgcagccgttgcggtaaaaggaagtgggagagcaaggaatcatgcattgtttgcgacgcgaggttttgcagctactgcgtgctcagggccatgggctcgatgccagaagggcgcaagtgcatcacttgcattggccagccaatcgatgagagcaagcggtcgaagctcgggaagggttcgaggatactatcacgtctgctcagcccgttggaagtaaggcaaatactgaaagctgagaaggaatgccaagcaaaccagctccggcctgagcaactcatcataaatggttttcctcttaatccagatgagatggccagcttgcttagttgccaacggcctcctcaaaagctcaagcctggaagatattggtacgacaaggagtcaggcttgtggggaaaggaaggagaaaagccagacagggttgtcagcactaacctaacctttaatggaaagcttcagcccaatgccagtaatggcaacactcaggtttatatgaatggaagggaaattaccaagattgaactgagagttctgaagattgcacaagttcagtgcccccgtgacactcacttttgggtttaccatgatggtggctatgaggaagaaggccaaaacaatatcaaagggaagatatgggaatcgcctgtgacacgttttgcatgtgccttgttttcactaccggttcctccagcaaactctgacgaaccaaaggacgaagctccttattcagcaagaactgttcctgattacttagatcagaaaagaatccaaaagcttcttattcttggatcgcctggagctggtacaagcaccatattcaagcaggcaaagttattatacgacactaggtttacccaagaagaacttgatagtatcaaacttatgatccaaagtaatatgttcaagtaccttgggatccttcttgagggccgtgagcgttttgaggaagaggctttggctggatcgaataacccaagctcagaggatgagaatacgcagcatgatggaaataaatcgaatggttcagattcttgcatatactcgataaatgcaaagctgaagaagttctcggattggcttttggatataatagcaatgggagacctcgatgcattcttccctgcagctacgcgtgaatatgctccaattgttgaggaaatgtggaaggatcctgccatacaagcaacatataaaagaaaagacgaattgcattttctccctgatgttgccgaatatttcttgagcagggccattgaagtatcaagtaatgagtatgaaccttcagagaaagatataatatatgctgaaggagtaacacaagggaatggattagccttcattgagtttactctggatgaccgtagccctatgtcagaaatgtacactgacaatcatgagcctcactctcagacactaaacaaatatcagctgattagagtaagtgccaagggaatgaatgagggatgcaagtgggtggaaatgtttgaggatgtcagcatggtaatattctcggtagcactcagtgactatgaccagctgggggccccttcaagtggtggcaacagtccccttgtgaataagatgatccaaagcagggacttgtttgaggctacaatcaggcaaccatgtttccgcgacatgccatttgttcttgtgctcaacaagttcgacctcttcgaggagaaaatcgggcgcgtcccgctctccacctgcgagtggttcagcgacttctgccctctccggactcaccacaacaatcagtcgctggctcaccaggcgttctactatgtcgcgatgaagttcaaggagttgtacgccgcctgcacggatcgcaagctgttcgtgtggcaggcgcgagcccgcgacaggctgaccgtcgacgaggccttcaagttcatcagggaggtgctcaaatgggaggatgagaaggatgggggtgggtactacccagatgagtccttctacagcaccacagagctcagctcctcacgtctgatcagacaagaatgatgcacattttgcccagaaagaaactggagattgttgctcttcttttttcagtagtattttttcccctgggtgatttgcaaccgatttcgttctgtgcaggcagagatctcgttactgattgtattgtatagtagtattgctgtattagtttgtcagatggagatgatgattattgtgtgttctttatagatcattaattaatacactttcatactaatttgccagtc

SEQ ID NO: 19477 - DNA, 1071 bp, Oryza sativa
  ref <308>: DATABASE ACCESSION NUMBER: AK099112
  ref <309>: DATABASE ENTRY DATE: 2002-08-28
gatccatctcaccaccaaaaaaaaaaggaaaaaaaaacaaaacacaccaagccaaataaaagcgacaatgggatcgctcaccaccaacatcgtcctcgccgtcgccgtggtggcagcgctggtcggcggcgggtcgtgcggcccgcccaaggtgccacccggcccgaacatcacgaccaactacaacgccccgtggctccccgccagggccacctggtacggccagccctacggctccggctccaccgacaatggtggcgcgtgcgggatcaagaacgtcaacctgcctccctacaacggcatgatctcctgcggcaacgtcccaatcttcaaggacggcaggggatgcggctcatgctacgaggtgaagtgtgagcagccggcggcgtgctcgaagcagccggtgacggtgttcatcacggacatgaactacgagcccatctcggcgtaccacttcgacttctccggcaaggcgttcggcgccatggcttgcccggggaaggagaccgagctccgcaaggccggcatcatcgacatgcagttcaggagggtgcgctgcaagtaccccggcggccagaaggtcaccttccacgtcgagaagggctccaaccccaactacctcgccgtgctcgtcaagttcgtcgccgacgacggtgacgtcatccagatggacctccaggaggccggattgccagcgtggaggcccatgaagctgtcgtggggcgccatctggaggatggacaccgccacgccactcaaggcacccttctccattcgcgtcaccaccgagtccggcaagagcctcatcgccaaagacgtcatcccggtcaactggatgccagacgccatctacgtatcaaacgtccagttctattgagatcggacggaaacgatcctcctaatttatttccctattaatttgttcaaatggtttccttctataacctatatttttcccgttgttagaaatggttccatttcctcctacagcttactttaagatagttgcgcttgtatatctgcgccatcttgtaagttgtaagatgctgaagaacactatgaattctgagc

SEQ ID NO: 19478 - DNA, 1872 bp, Oryza sativa
  ref <308>: DATABASE ACCESSION NUMBER: AK069835
  ref <309>: DATABASE ENTRY DATE: 2001-12-06
gaaccctctccgagtgcccaagatcacggtttccttggagcaaaggatctacaaggaattgagaagtgaacagtatggctttgcaaaagtggtgatgctaatataccgtagattgttggtttcttgtaaagagcagatgccactatttgcaagtagcttattaagtattgtacacactcttttagatcaaaagaggcaggatgatatgcgcatcataggatgtgaaaccttgtttgactttgcagttaatcaggtggatggtacatatcagttcaatttggaagggctagtcccaagactatgtgagctatctcaagaagtaggagaggatgagcagaccattgccctacgcgctgcagccctgcaagccctttcagctatgatttggttcatgggagagctctcacatatttcatcggaattcgataatgtggttcaagtagtacttgaaaactaccgacctcagaagatgcaaaatgatggtcaagttaccaaggattcaagcgacctgttggagcaagaagcccccaaaacggaggactccaaagcagaggactccaaaacggaggactcttccccctttgtcatctctgctgtccccttgtgggagaacatagttaatgttaagggtggagttaaccttactgtggaggaagcaaaggatcctaagttttggtccagaatatgtgtgcacaatatggctaggctttccagggaggcaacaacattccgtcgtatcctggagtctttgtttcggtacttcggcaacaacagttcatggtcacctgaaaatggacttgctctgtgtgtattgttggacatgcaactgttagtggaaaacgcaggacaaaacatgcacttaatgttgtctctactgataaagcatattgaacacaagaccatggtgaagcaacaggagatgcagcttagtatcgtggaggtagcagccaccctagcagaacaatccatcgctcaggcttcagcagcaactataggtgccataagtgatcttgtcaggcatttgaaaaggacatttcatattactctcggcagcaaagattcggagctagtaaaatggaatgaaaagttccgaaaggctatagatgattgtctaggacagctggcaaagaaggtaactgatgctggaccagttctggacatgatggccgtgatgctagaaaatattgctagcactcctgttgtagctagatcaactgcagctgctgtttatcgtacagctcaaataattgcttctgttccaaatattacctatcagaataaggtgtttccagaagctctgtttcatcagttgctcttaacgatgatccaccctgatcatgaagctcgagtagctgcgcaccgcattttcgctattgtcttggtcccctcttccgttgccccctcgattcaagcaagtgtatcaggtcaggctaagaaacatgacatgcagaggacactctctagggctgtctcggtgttttcatcttcagctgccatctttgacaagttgaaaaaggacaagcactcagacaactcacaaggtgatagcagtggcttgcatagtatcagtgaagagtctagtaatgccaaacgttcgaacctacctgtgtctcaaagtcgccgacgtagcatgaaaattcctaatttttccatgaagaggggtccttcaatggctatgagagctccttcagtagccctgagagccccttccatatctctcagagttacttcgatgtctttgagagcaccttccatgtctataaaggcagaccatggttcctcaagccatccagaagatgaaatggaatcagttttgctgaagctgagcagtcgccagatcacacttttgctttcatccatttgggctcaagc

SEQ ID NO: 19479 - DNA, 1688 bp, Oryza sativa
  ref <308>: DATABASE ACCESSION NUMBER: AK069836
  ref <309>: DATABASE ENTRY DATE: 2001-12-06
gagagcgacttccccaatcaatcatcccgtctccgtcctcgcccgccgccgccgccgccgccgatctccatcctgcgaggtggcgccggcttccgccgcatcatcgctcaccgttgagcatcctaatccatcccatccgccctcctcgcccgccgcttccgccgatccccatcctagccatcaccatcacgcacgccacgccatccgcctccatccctcgccgccgccgtgcaccaccgccgtcatccgcctcttcctcttcttcttgctccacaagtaatctcatctccctcgatctcctcttctctccatttctctccgtgtagagaaaggaggtggagacaggggttggggaacaccgccgcgtagataaggcccttcttccattcggttctatcacagagatgatggctgtgacaaatggagtaatccatgcatcttctagggaacccttattttccttcggtgtcattgctgatgtccagtacgctgatattccagatggtcgctcattccttggtgtcccacgctactaccgtcatagcatcagcgtcctccaaagggctgtcagcacatggaacaaacaacacaacatcaagttttcaatcaactttggtgacatcattgatggatattgcccaaaggacaaatcgttgtgggcagtgcagaaggtccttgatgagtttgagaaatttgatggcccaacttaccacatgtttgggaaccattgcctctataaccttcctcgtggcaagctagtatcgttgctgaagatgccaaccgattctgatcgtgcatactatgacttctctccatgtcccgagtacagatttgttgtcctggacgcttatgacttcagtgcacttggctggccccgtgaccatccagtgactgccgaagcaatgaagttcctggaagaaaagaacccaaactctgacaagaacagccctgacggtctggttggcgttgaccggcggtttgtgatgtttaatggtggagttggtaaagagcagttgtcatggctcaatgatgtcctccaggatgcatcagcacgccggcaaaatgtcatcctatgcagtcatctcccaatggatcctggctcagcttcttttgcagctctcatgtggaactacgatgaggtgatggctattgttcgccagtacaaatgtgttaaggcatgctttgccgggcacgaccacaagggaggtcactctgtggactcgcatggcgtacatcaccggactcttgaggctgcattggagtgtcctcctggtactagtgcattcgggcacatcgaagtgtatccagacaagttgttgcttgtgggttctgataaaatggctgatactgagatgtgttttgagccctagagtgaactgtgtagcggagggaaattcatccaacttcattgttttgattaatattcagaaacatgtgacttcattatactcattttctggcagcataattacatgtatgtaatagcatggaaactggaggtggcagcagctgctatgcttgccgcttaatctcccctcctctctcccaagaggaaagaggcagcaagatgaaaagcaaccgaaaggtaaataaagtaggataactttttccatgataatatcacaaattagaacatgcttgtttcttgaatattggacaaatatcagaaaatagagtgtggtaatttt

SEQ ID NO: 19480 - DNA, 1712 bp, Oryza sativa
  ref <308>: DATABASE ACCESSION NUMBER: AK069837
  ref <309>: DATABASE ENTRY DATE: 2001-12-06
gtggcagcagctgaggctgagcgaccgtcccccgacgccgacgccgacccccgtctcgtgagggagggagggtcatcgccatcgaatcccaaaaaatcacccgccgccgcatcctcgaatccaatcattcaatcaaggaggaggaggaggatttggatttggatttggatttggaattagggttagtgattccccatttttttgagggcaatcgatcgagcttagctagggttggatgcgatgacggcggcggcgtcgtggtcccggtcggtgacggagacggtgcgggggtctcaccagtacacggtgaaggggttctcgatggcgaagggcgtaggggccgggcggtacgtgagcagcgacaccttcgcggtgggcggctaccactgggccgtctacctctaccccgacggcaagaaccccgaggacaacgccaactacgtctccgtcttcgtcgccctcgcctccgacggcgccgacgtccgcgccctcttcgagctcaccctcctcgaccagtccggccgcggccgccacaaggtccactcccacttcgaccgatccctccaggccggaccctacaccctcaagtaccgaggctccatgtggggctacaagcgcttctaccgaagatcactcttagaatcatccgactttctcaaggacgactgcctcgttatgaactgcactgtaggcgtcgtcaagaaccgtctcgaaacaccaaagaacatccacatcaatattcctccatccgacatgggccgttgcttcaacaacctcctcaatctccgcatcggctgtgacgtatcttttgaggtgggtgatgaaagagtccaggcgcacaagtggattcttgctgcccgctcccctgtattcaaagcccaattctttggtcctattgggaatcctgacctacacacagtcattgtcgaggatgtagaacctcttgtcttcaaggcaatggtgaatttcatatactctgatgaacttcctagtattcatgaactagctggatctgtctcaacttggacatcgacagtagtagtacagcatttgttggcggctgctgacagatatggactagatcggctacgtctgctatgcgaggaaaagttatgtgatgaactcactgctgaaacagttgcaacaactttagccctagctgaacaacatcattgtactcagctgaaatctgcttgtctgaagttcactgctgttcgggaaaatctgggagctgtgatggagacagaaggatttaattacttggaggagacatgcccgtccctgctatctgacttgttagctactgtcgcagtagtggatgatgatgctgcgtcattcaaccggaagaggggagtcggtggtaacgaaggagcgaatcctgtggagagcgtggaggctagtgataggcgcatccgcaggagggtttagccgggttagaactaatgtaggctttcttcttggttcctcctctctatgcttgccatcaactgtacactatgatcgtagtttgtgtgatgtgctgtcatgttattagtggtgaaagtttaatttggacaccgttaaccaacctcttgccgtgtgaataatttcctattttgactacgccgtttcgcagcagagattttaaccttgccagtggattggatgttatgattggtatctgctgattatatgtggtgttagcatttcaatggatgccaatttgcaatgcc

SEQ ID NO: 19481 - DNA, 1560 bp, Oryza sativa
  ref <308>: DATABASE ACCESSION NUMBER: AK069838
  ref <309>: DATABASE ENTRY DATE: 2001-12-06
ggtggtggaggcgggaaacttatcctgcttttgccttgcccccgtgtcttcgccacgccagccgccccccgcctgccgacgaggccgcggccgctgctcagttcaggctcagctcgaggggatcgtgcggttggttgcgcgaagcggcggcgagaaatggcgggcgcgagcttcctctcgaccgtgcggcagcctcccgcgccgccgccgccgctgctcgccccacgcggctccgcttcctccgtctcgtctcctgcgcgacggcacgcccacattctggtgtgctgccatgctaccgcgcaggaagagcctgtgcgattccgtagaagggatttaatcggcggctgcttgactactgccattggcttggaattagtcgagggctctacaggattcacaggagtggctactgcagctgatctgattgagcgtcgacaacgctctgaattccaatcaagcatcaaaagcaccctcgccacagccataacggctaaaaaagagctcattccatctttgttgacgttggcactgaatgatgccatgacatatgataaggccacgaagtcaggaggtccaaatggatcggtcaggctaagtgcagaaataagcagacctgaaaacagtggactttctgctgctgtggatctgctagttgaagcgaaaaaggagatagattcctactccaagggaggacccattgcatttgcagatctgatccaatttgcagcacaatcagcactcaagctaacattcgttgatgcggccattgccaaatgtggcgggaacgaagaaaaaggaagaacactatactcagcttatggttcaaatggccagtggggtttattcgacaaactgttcgggcgacaagatacacaggaacctgatcctgaaggaagggtacctgactggagcaaagcttctgtgcaggaaatgaaggataagttcgtcgcagttggtttgggtcctcgtcagcttgctgtgatgtcagtcttcctggggcctgaccaagctgccacggaggaacggttgatagccgacaaggattgccgcccatgggtcgagaagtatcaacgcagtcgcgagacggtctctcgaactgactacgaggttgacctgataaccacgctcacaaagctgagctcccttgggcagaagataaactacgaggcctacacgtaccctaagcaaaagattgacttgggtaaattgaaattgtgatggatagtttcctgatcatctctcagtctcggtgatgctgatacagtaacgaagagcttcatttgtttgcctaagaagagtgatttgatttggcagtgacattccgacatttttacacggcaataagtacggcatgtatagatggtttagattcactgttcccttcgctcttttctgaacttcaagaatcagacatgatgatttccatgagttgtgttctgtaaattctcttacttgtataatgtgaagaggcaatagcagccaagtggagtaatagacaatactgtttcttcaacagttctccaatataccaccatatcgctatgcggtatgtagccagcc

SEQ ID NO: 19482 - DNA, 2273 bp, Oryza sativa
  ref <308>: DATABASE ACCESSION NUMBER: AK069839
  ref <309>: DATABASE ENTRY DATE: 2001-12-06
tggcgacggcgttggccaaccctcgacggcacggccatctcccatcaaaacctcaaccacagagccgcccaccatcgatgccgcaaccgcctctagactctagttcatctcccactccggtgagatctccctggtgagcttgttgttcttcttcagttcttttctctctctctgtctcctgtcacttggcaagtggggaaacccttgtagatccgaaaattttccctagttttttttttttccttttccaaacaagcccatggctctactccgagcagccgccgccgccgacctcctccgccgccaccgccgcgccccgctcccactcttactctccgctctctcgccgcctccaccgaccaccccggaatcctgccccgacggccccagtcccgtcgccccatacttcgctccgcctccgcctccgctatgccgccgccgtcgaagctggccgcctccgcctccgcctccgcgcgtctcgtcttcctcctacgtcggcagggggatcctgctccccgcgaccttctcgatctactctcccctctctacctcctcctccgcctcccccgacggctccccggatgaggattcctcgccgccgcacccgtctcccgcggcggcgcctccgtcctcgtgggttgacaggtggctcccacaggcggcgcgcccctacgccatgcttgcccgcctcgacaagcccatcggcacctggctcctcgcgtggccctgcttctggtcaatctcaatggcggcgatgccgggggagctgcctgacatgagaatgctggcactcttcggatgtggagccgtcctcctcagaggcgctggatgcacggtcaatgatcttcttgatcgagacattgataacaaggttgagcgcaccaaaagcaggccttttgcatcaggcattctaacccctacacaaggagtgggcttccttggattgcagcttttactgggattgggcattcttctccaactaaataactatagccgtattcttggggcatcttcacttttttttggtcttctcttatcccttgatgaagagattcacattttggcctcaggcgtatcttggcttgacctttaattggggagctttgttaggatgggctgccattaaagaaagcttagatcctgccatcatcctcccattgtataccgctggtatatgctggacactcgtatatgataccatatatgcacatcaggacaaagaagatgacctcaaagtaggggtcaagtccacagcattaaggtttggagatttaacaaatcactggattagtggcttcggtgttgcatgcattggcagcttagcactcagtggctacagtgctgaccttgcatggccttactatccttttctagctgctgcatctgcgcagttagcatggcagatttcaactgttgatttatctgaccgcctggattgcaacaggaaatttgtgtccaataagtggtttggcgctttgatatttggtggagttttatgtggacgacttgtatcatgataattatgagccacgagtttattatggttcatggtagtgttttcagtggaaaattcgtaattttgatagaatagaaagactcttgacaaaacttaggatgcgcaaacctccaaagaatggaaagttgattcaaaaagaaagaaagaaagaatgggagttagggcttgggtttcctctgtggcgcgctagttccaatttcatatcatgcagtgcagtctcatttctatttttattggatgaaagcccttatccatgttgaggactgctatgccctgctttatgcatcaagttgcagaatgaacttttgttatttcctgagcactttgtgacaatgttccccatcttctgttcaaaagataaaccagggaacatgataaaatattgatgcagattgttgtgcatttacaagactcttctgaattctgatgctccttattcatgacaaggctaattaattcagtctaacaccaaacatatttttacgggactaagatgtaaattgtgccatacatttttttcccatggatagcagttggacagaactatcataatgtatttaccggttataccgattagttcattttgttaccacgatcttgttaccatgttcgatgtgtcccttgcagtcttgtagagttctcttgcacattctctgtttgatatgatgttgattttttagagagagaaagatgttgattcagttgttagacttgttctatgagaacatgatcagtatatgaggtattttcccaaggc

SEQ ID NO: 19483 - DNA, 2152 bp, Oryza sativa
  ref <308>: DATABASE ACCESSION NUMBER: AK069840
  ref <309>: DATABASE ENTRY DATE: 2001-12-06
gtctcacacctccaccaccaccattctccctctcctcctcctcccccccaaaaaaaggggcaccaccaccaccaccaccaccgcatcgctccacgccaaaacgggagcggattcggcggtggcggtggcagtcgcagggaggggggggcatgtcgacgcggtccaagtcggtgccggtgcccgcggggggcggcgcggcgacggtgccgctcgccgtgctgctgcggcgggaggtggtcagcgagaagaccgcggcggagcgccccgagctgcaggtcgggctcttcagccaggccaagaagggggaggactacaccttcctcaagcccgactgcgagcgcctccccggcgtcccctcctcctccttctccgccttcggcctgtttgatgggcacaatgggaatggagccgcgatttacaccaaggagaatctcttgagcaacatcttgaccgcaatcccagctgatctcaacagggaggattggcttgccgcgcttccgagagcgatggttgcagcatttgtcaaaactgataaagatttccaaacgaaagcccgctcatcagggacaacggtgacatttgtcataatagatggattgtttattaccgttgcatctgttggtgattcgcgttgtgtactagaagctgaaggttctatttatcatttatctgctgatcatcgatttgatgccagtaaagaggaggttgaccgtgtaacagaatctgggggtgatgttggtagacttaatgtcgttggtggtgctgagattggccctcttagatgctggcctggtggtttgtgtctatcaaggtcaattggagaccaggatgtgggtcaattcattgttccggttccttatgtcaagcaagtaaagctatcaacggctggaggccggcttattatttcaagtgatggtgtttgggatgtcttgactgcagaagttgcatttaactgttcacgaacacttcctccagaggctgctgcggaacaaattgtcaaagaagcagtgcaacaaaagggacttagggatgacactacttgtattgttgttgacatactaccagacaaagcaaatcttaccatgccacatacaaaaaagcaaccaggaatgggtgttttcaaaaacatgtttcgcaagaaaacaccatctgattcatcatcccatacagatagagaatatatggacccagacattgtggaggaaatatttgaggacggatgcgcatttctttccaaacggttggattccgaatacccagttcgaaatatgttcaagctcttcatatgtgccatttgccaagtggagttaaaaccaagtcaagggatatccgtacatgaagattcatcacaacctgggaacttgcgtcgctgggatggtccattcctttgccaaggctgtcaagaaaagaaagaagccatggaggggaagcgtcgttcacgagattcttcgtctagaaacagtgggtcaagtgaatagtcatttattgttagatttatcaggaagctactgaccttgcagcacacccagtcccccacaagagccgaagattttgcaccacttgccattgtatttggtggcacctcctcttcaataatatggactttctcggagttctgatatagaacgacaattgaattagcagggaggaggtggcttctgttgaatagcttttatggaagtgagaagctcgttgtctttgacactgctagcttcatacccagcagctttactctcattcttttgaccatgatggcatctacatgttgaaagatgatccatgaagactggtatgacatgtctattctgaggtcaactaaattgtgaattactgaccgtatagagcactgatgaatagcaacggcattgtgattcttaattaggactagatgactacatcaatatttttttttaaggccgaccttgattcgtgatcgaaaaatattcattcctgttgaagtccagcctttccttaactccaatgtaattagcatcggaacagattccttcaaactgctgtgattaatcagcaagacacatctcattgacctgtatacaatgtacagaatcttgctaactagacagatatgtttctccaacctgacctgtagctactgttgattatattcatttgatttggtgtccatgcctgc

SEQ ID NO: 19484 - DNA, 787 bp, Oryza sativa
  ref <308>: DATABASE ACCESSION NUMBER: AK069841
  ref <309>: DATABASE ENTRY DATE: 2001-12-06
gagatatcccctcattgtttacatgttaatacacattctctattttttttaaattttttcttaaccatttaagtgacatgcaaagaatgatttcccgttcttctaactcgttgttcgtcatttgttccaagtttaggtttgtgttcatagatacatttaaatttgaatcttcacagtttatacaaaattaggagaaacaatgggaaaaaaaagaaaaagaagttacaataatactcctatacgacaagaacctgtcgattttgtttatcaatggctgcaggcaatttgaccgcagcagacatcgagagtgcgactgccttcgtcatagtgatgatcttcctggtcaatttattagtttgtttgatgacagacgccttgaataattactggattcgttctgccaaggaagaagaagcatcaccaccagctggtcatgtacgaggaaatgttgctgctgtgaaggcagcgcagatcgtgccaactcagtacgcagatcagaggattgctgtctgagttctatacgccggctagtgtagaagtttggccactgcattggccattaatttcctgggtgttatatatgtgtcatgtgaacccactctacctaagtatttacagctagatatatagcttgatctggctaaattggctcagtggccaattaattaagtgtgtactctttattgtctcgtccgaacacaactacttgtatgtccagttgaaaacagtacgtggccatcgtgccttgcaccaaggtatatattgttgggtatttggttttctctcc

SEQ ID NO: 19485 - DNA, 1409 bp, Oryza sativa
  ref <308>: DATABASE ACCESSION NUMBER: AK069842
  ref <309>: DATABASE ENTRY DATE: 2001-12-06
ggatcgacggagcgagcgagctagccagccagtgttagagcttgagctgcttgttcttcttctacctcctgcactcgcgtgctgcacaagtagctcagctagatagagcgtcagaaatggccagcaacaactcgagaacaaactccagggcgaactactccaacgagatccacgatctctccacggtgcagaacggcaccatgcctaccatgtactacggcgagaaggccatcgccgacttcttccctcctcacctcctcaagaaggtcgtgtcggaggtggtggccacgttcctgctggtgttcatgacgtgtggggcggcagggatcagcggcagcgacctgtctcgcatatcgcagctgggacagtcgatcgccggtggcctcatcgtgacggtgatgatctacgccgtcggccacatctccggcgcccacatgaaccccgccgtgacgctcgcgttcgccgtgttcaggcatttcccctggattcaggttccgttctactgggcggcgcagttcaccggagcgatatgcgcgtcgttcgtgctcaaggcggtgatccacccggtggatgtgatcggaaccaccacgcccgtggggccgcactggcactcgctcgtcgtcgaggtcatcgtgacgttcaacatgatgttcgtcacgctcgccgtcgccacggacacgagagcggtgggtgagttggccgggttggcggttggttccgcggtttgcattacgtccatcttcgcaggggcaatttcaggtggatcgatgaacccggcaaggacgctggggccggcgctggcgagcaacaagttcgacggcctgtggatctacttcctgggcccagtcatgggcacgctctcgggagcatggacctacaccttcatccgcttcgaggacacccccaaggaaggctcctcccagaagctctcctccttcaagctgcgccgcttgcggagccagcagtccatcgccgccgacgacgtcgacgagatggagaacatccaagtgtgataggacgacgagatgtcgtcgatcgtgtcctcttactcggaaaattaccagtcgatctcggtctcgtcatcactagctacgtctttgtgtgtgttttgtgtcgtgtcactgctgcttcgtacacgccggagagagttacataaaacgcgcgcgcgtgcacgggggagtggcgctagctttggttgcttggtggttcgtgtggggtacgtagattgctcgctctgttaattccggggctggagcctgctaattttgggcgtgtgcgtgtgccgcttgtgcatcagtctctgccgtcaaattgtgcgtgtgtgccaggtgtactatctctccagcagttgcttgttccacttcaattcacccccaaagtaattaaaaggatgtcacgttctctcccct

SEQ ID NO: 19486 - DNA, 1355 bp, Oryza sativa
  ref <308>: DATABASE ACCESSION NUMBER: AK069843
  ref <309>: DATABASE ENTRY DATE: 2001-12-06
gaggtgcagcaatggcggacaagccgagccgcgggctggtgctctacgccgcggggcacgcggcgctgctccctccggcgagcggcggcggcggcggagccggaggaggagggggagggagccacctcgacgccttcgcgtctctcgcgtcatgtggcttcctctccctccgctcgccccctctcgcgagtggggaggagaagcgtgacagcacgattcttgagctcgcgcagctgctcgacgtgtacgatgatctcttccctgctaagactgagaaaactggtcaagagactgcccaggtggatccactgcaactagcagttcccaagctatctgagaggtttatggggatcagagctgccatggtcaccaattgcccccttgttagttcttttgcagcaaatcttggttttcatgtatccgggactgaagatttagttgcacaatctggatcttccgctgcttctaaggaggctggaattatttcccaggcgttaagtctgcttggattttcagaggggaatgttcaggagacatctgaatttgatctggtgtttctgcatgttgccatggagaatacaaacagcaagttgggaaaactgggaatgaagactgatctaaatcggcttgataaattagttggtgcaatcatggaagcggcgcccataagttcagctatcgcctcccgtattcttgtatctgtgatgttgagctatgggtctgctgctgaaaataaggatgagttttccatctcaaaatcttcgactgaaatagattctgacttgaacttgcttcgcccacgccagagctatactatgaaagcaggaaatacattggatgatgttaggaatcatcatccgattctgttagcacagtggcaggaaggagttacacgctctgatttgaccgaagggttctcttttgaggaattcataaagcgtggtggaaatcttgctatgcttgctgaacgctttctacatgaggtggcatttaagctctggaaagctcctaaatatggagcttaaatctgcctgagaagatcctctctaaataaggcgcgaaaataataaaaagagaatgatctgttgggttccttctgtaaatgggaactgcagatattgcaaatagatgagttttggaggagacgtactctcccaaggttacagaattgataaaggagatgctgataaactgaaaactagtacggtttttactgaattgatgggagatttgtactgtgcttatccgatgcttttgaacggaggaactttcctgagcttatgtgaaacgccgttgctgtttgtgtagaatccatttacttgaaactttctaacttgggagctgtttcagcactg

SEQ ID NO: 19487 - DNA, 2276 bp, Oryza sativa
  ref <308>: DATABASE ACCESSION NUMBER: AK069844
  ref <309>: DATABASE ENTRY DATE: 2001-12-06
gatttctctctgcctctccacctccacgtccatctctctctctctctcctctctcctctctcctctctcctgtcgccttcccacgcgcgccgctcgatccgtgtagctgtcagcgatggctgaggaggcgaagcaagagacccccgccgccgccgaggtggtggtggtggagaaggccgacgaggtggtggcggtggagaaggccgtggaggtggaggcggaggagaagaagttggcggagcaggaggaggaggaggagaagaaggcggaggaggcggaggaggccgctgggggcgatgaggcggcggtgatcgaggggacggggtcgttcaaggaggagagcaacctcgtctccgagctccccgacccggagcgcacggcgctcgcccagctcaaggagctcgtcgccgccgcgcttgccgccggcgagtttgaccttcccccgccgccgccgcctccaccggccaaggcggaggagccggccaaggaggaggaacccaaggccgccgaggcccccgccgccgaggagcccaaggccgaggccgaggctgaggctgaggccgccgccacggaggagcccaagaccgaggagcccaagaccgaggagcccgccaaggaggaggagcccaaggcggcggcggcggctgcggccgaggagcccaaggcggaggcggcggcgggggaggccaagccggccgagccggaaacggaggagaagaccgtcgtggtcaccgaggatgaaggcaccagcaagacggtggaggccatcgaggagaccgtcgtcgtcgccgccccggccgcggccgcggaagccgaggctgcggcgccgaaggaggagctgatatggggcgtgccgctgaccggcgacgacgagcgcacggacaccgtgctgctcaagttcctccgcgccagggagttcaaggtgaaggaggccatggcgatgctcaaggcggcggtgctgtggcgcaagcgcttcggcatcgacgccgtcctggccgccgacctcggcctgccggagctcgagaacgtggtgttctaccgcggcgccgaccgcgagggccaccccgtctgctacaacgtctacggcgagttccaggacaaggacctctacgagaaggccttcggcgacgaggagaagcgggagcgattcctcaagtggcgcatccagctcctcgagcgcggcatcctcgaccagctcgacttctcccccagcggcatctgctccatggtgcaggtcaccgacctcaagaactcgccgcccatgctcggcaagcaccgcaccgtcacccgccaggcgctcgccctgctccaggacaactaccccgagttcatcgccaagaagattttcatcaacgtgccatggtggtacattgcggctaacaaaatggtgagtccgttcctcacacaacgcaccaagagcaagatcatcttttgcaccgcagccaagtctgcagagacccttttcagatacattgctcctgagcaagtccctgtccaattcggaggcctctacaaagaggatgacaccgagttctccacctcagatgctgtcacagagcttccgatcaaaccttcatccaaagaaactgttgagattcctgctactgagaactccacggttgtgtgggagcttcgggtgcttgggtgggaggtgagctacggtgcagagttcacccctgatgcagagggtggctacactgtcattgtgcagaagacaaggaaggtgcccgccaatgaagagccgatcatgaagggcagcttcaaggttggcgagcctggcaagatcgtcctcacagtcgacaacgcagcatccaagaagaagaagcagcttctttaccgattcaaggtcaagagctcctctgaatctgcctaaggttcgagatatttggctctatagatatgatcaccaaccaaggtccacaggtccataccaccaccatttgaacatgttgcatcatagaagagaacaataagatttttaggtggtcttttgtggttttgttctttaatttgttggcttgctgttcttctggggggttcacatttgtatgtgtttacttaaaaccaaagtgagcttgttctatgagagataggtgggagaaggtggggggaggagtatgagatggtgatgtttcttgtcttcttgaggtcaggacaggagggagggaactgtggaaggaagaactgaagactagctgttgctgatctgtatatctgtctgtacattgcatccatggattctctttcagcaacatgttaatttttagaagagaagc

SEQ ID NO: 19488 - DNA, 4169 bp, Oryza sativa
  ref <308>: DATABASE ACCESSION NUMBER: AK069845
  ref <309>: DATABASE ENTRY DATE: 2001-12-06
cctctcctctcctctcccacctctcctctctcggtgcagatcccggccggagctgcggtcggagggcggtggcggcggcagctaccggcgatggcagaggcggctcaaggcggtggatgcgcggagggtggaaccagcggcggctcccctcctcccagatccggtgtagacggctgcggaggatggaggcggcgtggagggtggacacggcggcggctccgccgggagggcagtggcggcggccgtctcctccagatctggcgccatcggacccaaaccctatcctgcccaacgctcggccgccgcctcacccacacggggcgcaggactccccccgccaccttccgccctccccaactcgtcaccgtcgtcgtccgccctccacccgccgccgacgaagtcatccgtcctcccccgctctctgctgcccgtcctcgtgtctccgccgctccacctccataccccacgccgttggaaagggggagagtgtaggggcaaggacggcggcgcaaagatctgcccccctgtcctcgggagcgacggtggctcgcggatccatcggcctctgtcctttggagctgctaggctcaagtgggaaggacggcggcatgcggatccatcgccccccgtcctcgggagccttagcggcacatggatccagcggcctccgtcctcaggaatggcatggcgggagcgggagggccggcagcatgctgatcttcctgcctccgtcatcgcgagcggcggcggcgggcttagacgagcgagagcgagggcggctggcttaggcgagcgggagcgagtggcagctgcaacaacaacaacagtgatggtggctgcgacgacgatgatgatgctgacggcggctgcgacgaaaacgacgatggcctcctccaaccccggcaccgggccggccgtcggcgacgacttcacctgcctcgatcacgccgctgccgcccaatcctccctcacctgcgagatgacgaggggcttgctcagcatcgagcccttgacgagttggagtgcgcagtgcatcagattcagaccaccttcgccgcctcgagcttgacctcgtgctcgctacggtactccatccttcacccccaccaccaactcccccttttcccctcctgctttctgcttgtgttgactcgatggagagagcaaaatccactcacctgcattccttgagaaggcatggtattgctctttctttgaacaggaacggctgtattttagattgttttactgtgtgatgaaaaatagagagagtttgtgagtttcaaatgagcttttctttggctccattatactgatccacggtggtgtaggatcatacgagaccaaacaaacctaccagagaggggtgaatggtaggaaaaaccaaaaacccaaaatcttttacagaattaaagattattctcgaacgaagtcggtgacgaggtctagtcgccgctggtcgaaccgcccacctgccgccggtcagaccgcccgaacacctgcggtcagactgccgctatcccaccggtcagaccgcgtgcacacctacggttagaccatcgggacatagaaataccggtagatgacaaactcgaagatgtagattgaaactttttgactttattgcatcaactagtgtttacaaagtgcacaaacagcactcctcaccaaaatctcaaactaaactcgaaaccctaactttctctcaactctagtctctctagaaccaatattaggaggcctcaccctccctctctatttatacataaaaaacctcctactcatagtagatgtagaactactatttacaataggacttaatccctcaatttccttattctccaaaaccacagccgaacgctcctgtgccggctcggtctcggtctccttcctattcctccacgcgctgacccttcctccaagcaggccgccaactcaccacctgggccggcctgtctacaacacaagcaagcccacgtgcacatcccagccgaggcactgccgcttgccgccatcacacatgtacagcacacgtacatgcatccccgctacagtacctcgtgtactgtagcacatcttttcttcttccagtttcttcgtaatttccttcgctaacaccgacacttgcacacacacctcgtgaagcccgttgtgaagatctctcccacacgatgtccatccaccgtataccatctcgtatccaacttcgtcacccggtatccttgaccttctggatctcaactcctccatgaatctagtcccgatccccaccgttgaccgaagttgacctccaagaatcctgactctagtcaatttcttatatggtatctcgaccgcactacacatctgttcctcattgaacatagtcccggtcctcaccattgaccaaggctgacctcaagtcacctacacacaatcagacaaaacaaccatttctgggcacagaaatcacaacctgatccacattagtcacacgcacttacaccaacatccacacattttttcaaaccaattcatcgattaaatcatttgcatagctaattgttcatcacaaatattaatcatgacaatattcttttcgataatatgatgcttgcttgcatagctttccatgaagattatattgcacccatgccttctcatcagcattggctactcactgcctaaatttcataaaattgccgtctcacagctcctccttccccctcctctcttttttgttaactttggttttcatagttcaagaatatgacacactttgggcattggtaggatgtgttaatattgcgaaatgacaatggagaagtgggcactgaaaagaacagtcgatcgtgtgttgcctaatcgtcagacagttagatagtagatgaagcattgttgtgaggctgccactttcccaaggagaacgttgtccatgccatgggccaggctatcgatagcagcgcatcttctggttgcccatcgatccatgtccaggtacagcatagggttttgttagggcgctagcgttagggtctaattcagggtatgagtgcttcagggactgcacggccatcgcgctgggtggttgaggagccctgcgactatgccgcactgtctgaatcaatatgcgatgtatgatttttgttatgcacgatacttagcctgctaacctgaatacagaatagttgcctttgctcaactattttgataggtaaatctgaaaccactgaactaaattaattttgctttggtgagttcatttataaggtagggagcttgtcctacatcacattcctgactccagctttctatatactacaatagttgtctttttctatgtttttgagaattgtgcctgaatttcactagatcgcgtctttttgaaatgatatcttaggttgtttgcatgacatgggtactactagattgctaccaggttaactggttaagtctattattgatatgaaggattatttcagtcagacttacaaactgaaagatttccaaacttgtcagtgacttacaaaaatgtgcaaatgtatctgttgtcttccattaatccaagtatatttctccctggggcactgttgatattttacgcaatcttgcaagtatcaactggacatgacaggccatccctcctaaataaagttacctcatttgtttctcatcaatgggatatgcatcaagtgtctaaagatggcattgtcttggagaagaattctgatgggggtaaccgattgcatttccccctccagttttgaaattatatttttgctatcacctatttactactttttaatttttgttttcagtgctaattttataatcaatgtaagtattttattgcaaaattgaaagatcggatcatcggaggaatgttccgctttggtgtatgaacatgttacagttgtattgaacaagcaattaggtgagcaaggcgaaattagagcgaagaagaacctgttggcaccatggctaagggcctccttcactggaaattctgagcatgcttggtcctgcaatcctgctgatgaaaacagtcgaaatctatatgtaaccctacctccccaccatttgcaatgccctacttgtagattgtatcagctgataccatcaatgccactgtaggtgattattgatacctgactcgctgtctcattttgcaaagatgatccagagatttg

SEQ ID NO: 19489 - DNA, 983 bp, Oryza sativa
  ref <308>: DATABASE ACCESSION NUMBER: AK069846
  ref <309>: DATABASE ENTRY DATE: 2001-12-06
gtcgtcgatctcacgctaccctcgatcgagctctctctgcggcaaacccctccctccttcccacccaagggggaaagctccgccgccatcgtcgtgctgctccccgttcccgcggatccatccggggctctgggttgatctacctcgccgtgacaaacagtgagtcggcataaattttggtacagttgagaagttcttgtgttggacatatccctcctcccctagaaataagaagctgcttaagttcactatgtctggaatgccatctgatgaggcaactggtcaagtgaggctcgaaggagatgtttctgacaaaaaggaagaaaaaactcaagagcagagcgaagcaagtggaatgccctcaccacaagaagaggaagcagccatcaagaaaaaatatggtggaatactgcccaagaggacgccacatataactaaggatcatgatcgggcttactttgattctgctgattgggctctaggcaagcaaggtggaagccacaaacctaaagggcctcttgaagcacttcgaccaaaacttcagcctactcaacaacatgcacgtgctcggcggactccctatgcatctgctgacaatgatgagtgtatgaatttgcctcctgaggatttgatccagaatggtgatcccatcgaagacaagaacaaggaagaacagtaacgagtagctgcaccctgtctatttggagcgttgccaatcctgtcctcgagccaaactgttgccttggtaaataactagagccaatgcctacacttgtggggttgagctctgcagtgtttaacttaaacgtaagacgtggtatgtctggcgtctaccacattcagctgttcagtgtctttctggcatctgtaacagctaggaatgaaaacttacatatgatgctgtgataccgatgctgtagtacctgatgtgcaaagaaacaaataatgcttcaaattcagctccccatgaatggaaattagcc

SEQ ID NO: 19490 - DNA, 3781 bp, Oryza sativa
  ref <308>: DATABASE ACCESSION NUMBER: AK069847
  ref <309>: DATABASE ENTRY DATE: 2001-12-06
gattcccaccaaaattcctctctactcccaaattccccccacccctcccggcgaattccccccctccgccgctcgattcggcgctcgaatccgccgtctccgccgccaattcgctcggtccggcggttcgctgatccactctctcgtttttttgttttttttttaccttcttacgcggcgattcggggtgtatgagctcggtttcgcggcgggttggttgatttgctccgccgcgtcggagggcggcggcgcggggaagaggggggcatgtgggtttcgctggtctggatccgtgggtgcgtgggcgtcacgttcgtcgactacttgggcgggagggaagccgagtagatccttttacgcggtgtgccggggagggaggtggtggttgaggttgaggttgacgaggggttctagggtttcgggggcggggggccatggaggctgcccgggtcggggcgcagagccgccacctgtacggcggagggctaggcgagcctgacatggacaggcgcgacaagaggctgttcggctgggacctcaacgactggcggtgggacagtgaccgcttcgtcgctacgccggtgcccgccgcggaggcgagcggcttggcgctgaacagctcgccgtcttcctccgaggaagccggggccgcgtcggtgagaaatgttaatgctagaggtgactccgataagaggaagcgggtggtggtcattgatgatgatgatgtggaggatgacgagctggtggagaacggcggcgggtcactgagcttgagaattgggggtgatgctgttgcccatggagcaggggtgggtggtggtgctgatgaggaagacaggaatggcaaaaagatcagggtgcagggaggcagtcctagtggccccgcgtgccaggtggagggctgcactgcggaccttactggtgtgagggattaccatcgacgacacaaggtctgcgagatgcatgccaaggctaccactgctgtggttgggaacactgtccagcggttctgccaacaatgtagtagattccaccctcttcaagaatttgatgaagggaagcgaagttgccgccgacgtttagcaggccacaacagacgaaggaggaagacccgccctgaagttgctgttggtggttctgcatttactgaggacaaaattagcagttatttattgttgggtctccttggagtatgcgccaatttgaatgctgacaatgctgagcatttaagaggtcaggagttgatatctggtcttttgagaaacctgggggcagttgccaaatcattggatccaaaagaactctgtaaactcttggaggcatgccaaagcatgcaagatggatcaaatgctgggacctctgaaacagctaatgctttggtaaatactgctgtagcagaggctgcagggccatctaactctaagatgccttttgtgaacggtgatcaatgtggcctggcatcatcatctgttgtaccagtacaatcaaagtctcccactgttgcaactcctgaccctccagcatgcaaatttaaagattttgatttgaatgacacttatggtggcatggaaggtttcgaggatgggtatgaaggttcacctacaccagctttcaagacaactgattctcccaattgtccatcatggatgcaccaagattctactcaaagcccaccacagactagtggcaattcagattcaacatcagctcagtcactgtcaagctcaaatggagatgctcagtgtcggactgataaaattgtcttcaagcttttcgagaaagttcctagtgatttacctccagttttgcgatcacagattcttggttggttgtccagtagccctactgatatagagagctatattagacctggttgtattattttaacagtatatcttcgcttagttgagtctgcatggaaagagctctctgataatatgagctcatacctggataagcttctgaatagttccaccggcaacttttgggcatctggtttggtatttgtaatggtacggcatcagatagctttcatgcataatggtcaacttatgttggacagaccacttgcaaacagtgctcatcattactgcaagattttatgtgtgagaccaattgctgctcctttttcaacaaaagtgaatttcagggtagaaggcttgaacctagtcagtgattcctcaaggctaatttgctcatttgaagggagttgtatattccaggaagacaccgataaaatagttgatgacgttgagcatgatgatattgaatatctgaacttctgttgtcctctccctagttcaagagggagaggatttgtggaggttgaagatggtggatttagcaacggcttcttccctttcataattgctgagcaggacatatgctctgaggtctgtgagctggagagcatatttgagtcctccagtcatgaacaggcagatgatgacaatgccaggaaccaagctttagagtttctaaatgagctgggctggcttcttcatagagcaaacataatatctaaacaggataaggttcctctagcatcctttaacatatggagattcagaaatcttggtatatttgccatggagcgggaatggtgtgctgtgaccaaactgctgttagatttcttatttactggactcgttgatatcgggtcccagtctccagaagaggtggtgttgtcagaaaatctgctacatgctgccgtgcggatgaaatctgcccaaatggttaggtttctgctgggatacaagccaaatgaaagcctgaagagaactgcagagacattcctattcagacctgatgctcaaggcccttccaaatttacccccctccatatagcagctgccacagatgatgcagaggatgtattggatgcacttactaatgatcctggactggttgggatcaacacgtggagaaacgcgcgagacggcgcaggcttcaccccagaagactacgctcgccagaggggcaacgatgcttacctgaatatggtcgagaagaagatcaataagcatcttggcaaaggccatgttgtcctcggcgtccctagcagcatacaccctgtaataaccgatggtgtgaagcctggtgaagtcagcctggagatcggcatgaccgtgccgccgccagcaccgagctgcaacgcctgcagccgtcaggccctgatgtaccccaactcgacggcgaggaccttcctgtacaggccagcgatgctgaccgtgatgggcatcgccgtcatctgcgtctgcgtcggcctgctactccacacctgtccaaaggtttatgcagctcctacattcagatgggagctgttagaacgtggaccaatgtgaggaggagcttagaatggaataagtgtagttgtgttttacgtaagtcgagagcttagtgtgctggctaagatcaaaataacagtactatgtgaggaggatgatcctttgtatttaaagcaggatcgtttcgtttatataaaagcttacataccgtcattattaattattattgattagttattattatttatattatatttaccgcctaacatgtaaacagaacatatgttccataaaattcatggtgtggttgtagaattcattctttccagagcttcttgttggagccatgcttctggctgctttcggttcattctagacttctagttttgtggctacaagattttgtcggtgttgtattgttgtaaactcggaataaaacttttttttttcgtcagcgttgtattgttgtaaactcagaataaaacatttttttc

SEQ ID NO: 19491 - DNA, 1975 bp, Oryza sativa
  ref <308>: DATABASE ACCESSION NUMBER: AK069848
  ref <309>: DATABASE ENTRY DATE: 2001-12-06
gatccgatagcttaatctcgagcgcttcgagttcgatctctcgtgaaggggacgacgagggcattgtctccctcctcgcgcgcgcggagtcgccgccgccgccgcctcgtcctcggccacgcggaagtgaagaagaagaagaagaagtgaactagtgaagcctggggcgagccatgatggagaggtcgctgatggaggcgctggctacggcggcgcagggaggcaccgtggggacgtcggttttcgacatgctcaagtacgccgtgctgcccattgccaaggtgtttaccgtctgtttcatggggttcctcatggcctctaagtatgtcaatatcctccagccgaacggccgcaagcttctcaatgggcttgtgttctcgcttctacttccttgccttatattttcccaactgggtagagcaatcacaatcgaaaagatgctgcaatggtggtatattccagtaaatattgttgtaggtgcagtgtcaggctctttgattggctttgtggtggcttctatcatccgaccaccttatccatacttcaagttcactgtgattcacattggaatagggaatattggaaatatacctctggttctcattgcagcattatgtcgagatcccaccaatccttttggtgactctgataaatgtaatgaagatgggaatgcgtatatctcatttggtcaatgggttggtgcaattattgtttacacatatgtgttcaagatgcttgctccaccacctggtgaatcctttgatagcgctgaagaagatattcttccaattaaggcatctggagataatgtggtgcctgaaaaagggaaatatccaacaagcactcgcactagtactgtacctgaaaatgagcctttgttatcttctgaaggtgataaaaatgtttctacttctctaggatcgaagataatgggcattgttagaagcatggttaagttcctaaaagacaagcagcttcttcagccaccaattattgcctctgtttttgcaattgccattggtgttgttccagtcttgaagaattttgtcctcactgatgatgcacctctgttcttcttcacagacagctgtctcattctaggggaagcaatgatcccttgcattttgcttgcagtggggggcaatcttgtcgatggtcctggtgaaggaagtaacaggcttggtgtgcggacaaccgttgctattatttttgcacggctcatcttggttcctcttgctggggttggcatcattgtgttggttgataaacttggtttcattcctaaagatgacaaaatgttcaagtttgtcttgctactgcagcattctatgcccacatctgtgctgtcaggtgctgttgcaaacctgaggggctgtggaaaagaatctgctgctatcttgttctgggtgcacatctttgctgtgttctccatggcaggatggattattttgtatttgagcttactcttctaagtacgtcataccctgatgctatactgcacaggaacgtccataagatcaaaatatcaccagatataccagaaaaagatagtaccatgacatgtacattagccagtaaaccatggcgacagcctgaaggtacgagttgtatcagtattcagtatagatatggttctcctgcccagtgcccaatcgcttaagcgccactgctatgttaattttgctaatcgctcgctgctacaagcaactgagcaatgagaaaatgagggcatagcggtattgccgatgcccagatcatcaggtcctcatgacctttaggtcggtttcctatataagcctctttcctttattaatgtagccccccccaccccacaatgatcttcattgaatgaactacaagctccaaagtgaaaatattggttaaaaggcaagcccaaaccgaaactttgattataaaaggtggcccaaagcatgaacttcggttgaaactttgattatatatcttgattatatgg

SEQ ID NO: 19492 - DNA, 3309 bp, Oryza sativa
  ref <308>: DATABASE ACCESSION NUMBER: AK069849
  ref <309>: DATABASE ENTRY DATE: 2001-12-06
gggtcctccgcgccattggcctcgcgccatcgcatcgtctgccgtcctccgtgccgtcggcctcgcgccatccatccaccgatgccacccgcggcagccgccgccggtgacggcgctacacccatccaagagccgcccccgagcccaccaccgcctcccccgctgccgccgcttcgaccggcgccctcccttgcctcgccccagcgtgcccgatcccccagcgtgcgcgcgtggagaagatgacgacggccacagcagcgacggcgacggggatggcgccgctcgtagatcccgccatcgagggcttccgcatccccttcctccccagcgacaacgacctcctcgactgcctcctccgccccaagattgcctccggccgcgtcgattcctgcttcgcgccgcagaggagggcaaccttcctggtgcgcttcgcggcaagctcgcggaactaggcctccgccgcgtcaacgtggccgcggaaggaggtgcgggagaggcggaagtgcgcgacagatcccgggtgggaggcgagcacgcaggtgacggcgccaccgccgctgcttcactgtggcacataatctggcccttctttactgtggcgcatcatcaaccaaatcaatggatgcaaatggattggttaatcaagtacaacgaacaaacaagaagctaaatggctttgatgcttgtgcagaactcagagctgaatgcaaagttgcaaagcgtattcattactcgagtaaacatgtttcttcttaaggatcttcttgggcgccggcgcagtggcctggccatctcctgccgcggcggcaccagcggcggtcttcttctcctccccggccggctcagcaacggcggcggccgccttgacaacaggagcagccagcccgcggttggcgtgatggagaagagagcccgtggtgagaagaggagagcttccatggctagagcccgtgatgatgcagagaggctgacatatagatcccgatgtcatagagtcaaaatagagagggtagatggagaggctgttggagtgaacaattagtttgactagctaaatgagatggagagttggctatatgggtgtttggagagttcgatttggagaggctgttggagatgctcttataagcaatcggccatgaatagaattgttgaaaagttagggaaaggtatttaccctcgagaaatgagctggggcagaaggagttggaggggtttgcttgggtgaagtcgatggtgttttcactgtatcactcacttcggctgcggcttgatcaacatcttcttcaatttcttcttcatccaaaggttgctcgatggatgggtctaaagcaggcaaatcatcggttggcttggttttctttgacttggctttcttctttggagccggagccgatgggtctatagccaatgctctagtctttctcttcttgtcggcatcagctggttccctaatgaggccctggagcatacttgaagtcctaggggcatgatagccgatgacaggaggagatggcccacctctattgggaacgagaccaggggcatactctatatctctgccactattgctttggtgtggaggtgaagattctgttgtctgcaaaagaaagaggagaactggttaagattcgagtcggctagcagttattcaattgaaactaataaaacaaagtatacctgaggaataacatcagggaatagatctgtcatatacatagaggccgactgatgaaatatatgcagtttccattcaccccaccatctgtcaaatgctctactcctgaaggttgccagctctatattttcaatgctgcccaaaggaggtccttggagattgagcagccgatccatcatcaagatccattatcggcaaggaacaagccaattgagttgacccatcccaaactgtctggcagagctcattggatggtagaattcataggatacctgtatatttcttccttggtggatgccaacatgaaggatgcatgggctaatggcagcggagaagacttctcttgatttttgatacttttcagagttgaggtcttcaaatctaaagtctcctgggagatcaaggtttactgaatcttcatatgggaaccagactcgagcatctctttggaaaccctcatagaagctgcataaccagtctttgagcagtttggccgataactttgctccaacatcggttggtgtagaggcatactccccataggacatacatctgcgatgggttcattcttcgtcgtcatcatctgtaatcggctccagtcttgggaattcaacttctgttacagatggccgattgacgaatttcatgaccatcagattcagccaagactgtaatagccaccatggtccacctactccaaccactgagccaacggctatcttagccgatgcattgttcagcatttggtacaaatagccgagaaggattttgcctaaggggaattgtctctttgattccaaggcctcggctctgaattgccagttagttgtagggccacagcttgatccacagaaaaggaatttctccagccacataagcagaaaagctacatgctctcggggattgacaaatccttggcccatatatgctgccacataaccagaccaaccgcctatgctcttggtcctgaagtcatactgattcttggtgtttagactcatagggttagccgatgaagtcacatccagaccagtaatcatggtgatatctattagtgttggggtcatcggcccttggttgaacaggaaagcattgatggcattagaacagaaataagtggcggcagccattaagggttcttccttagccgaattcgctatggtgagggcaagtgcttgatcgattccaatttcatcccaatgagtttgcttgctagccgatacgcgcttataccatgtggtccaacttttctcgggtgaagttttctcgagggatggccaagatttaaaggtgttcttccaatgacctagattcgcgttggctaatctaaaaggaatcctattggtttcaccgatgatgaactcaatgggatcggggttgccgattagaccaaggaagtaatggttttcatgcgataggcttggaattgcgagcaggttggagagatgctacaactccaaaggaaccaagaaggggaaaacgagataaggaatagggaaaccaatctgttgcgaaaaagggagatctagccgacgaaaataaattgtaaattttttgattgatattggagttaaggtagtgtactaaactccacttcggcgttattaccaaaagaatccaacgactcctgc

SEQ ID NO: 19493 - DNA, 2343 bp, Oryza sativa
  ref <308>: DATABASE ACCESSION NUMBER: AK099113
  ref <309>: DATABASE ENTRY DATE: 2002-08-28
ggttctttcctactccccccagttcgtctctctcccacccccctcaccggcgctcttcccccgcggcagcagcccggccggccgccggcgagcccttctctcgcgagccgccctcccctggacgaggatgcgttgacagcgcctccccctccgttcttccccacagaagcgtcctcctcctcctactcctactactgggctcgtggactggtggtccccccccctccgaccaccgcctccctccccggcgacgaccatccatggagctccaccgctctttctcctcctcctcctcctgccgcagtggtaaagttactcaacagtgaggatttctaaagctcaacagaactagatgatacttgcataatgtggccctcagatatttggaaggcgcatgcagggtcatcacagtcagagggatcagcactggatatggagagaaacggatgcaaccataactgttgcccatctcctctccaaccaattgcatcaggtggtcagcactctgaaagcagcgctgcatatttttcttggccaacatctactctaatgcacgggtctgccgaaggccgcgctaattactttgggaacctacagaagggtgtgttacctggacatcttggccgcttgccaacagggcaaagggccaccaccttgcttgatttgatgattataagagcattccacagcaagatcctacgtcgctttagtcttggtacagcaataggctttcgaatcaagaagggtacattgactgatactcctgccatccttgtttttgttgctcggaaggtgcacaggaagtggctcagccctacacagtgccttccggctcaccttgagggaccggggggagtgtggtgtgatgtcgatgttgttgaattctcttactatggggcaccagcaccaactccaaaggaacaattgtatgacgagcttgttgatggtctgcgtggtagtgatccatctatcggctctggttcacaggtagctagccttgaaacatatggtacattgggtgccattgtgaagagtcgaactggtaataagcaagtaggcttcctgacaaacaggcatgttgcggttgacctggattaccctaaccagaagatgttccatcccttgcccccgaatcttgggcctggtgtatacctaggtgctgttgagcgagcaacatcatttatcacagatgatgtttggtatggtatctatgcgggaacaaatccagagacatttgtcagagctgatggtgcatttataccgtttgctgatgattatgacataactagtgttaatacctcagtcaaaggagttggagtcataggtgatgtaaaggcaatcgatctacaatccccaattagcagtctcatcggaagacaggttgtcaaagttggaagaagctctggtttgacgacagggaccgttgtggcatacgctcttgaatacaatgatgagaagggcatatgcttcttcacagactttcttgttgttggggagaaccaacaaacatttgatcttgaaggggatagtggaagccttataatcttaacaggaaaagatggcgaaaagccccagcccatagggattatatggggtggcacagccaatcgggggaggttgaagctcaaaagtggtcagggtcctgagaactggacaagtggggttgatctcggacggcttctggatctattggagcttgatctaatcactacaagtgaaggactacaagaggccctagaggaacaacgaattattctagctgctgctgcagcagcagctaattcaactgctggggaatcgtcacctgttgctggtcctcaagaaaatgagaaagttgacaagatttacgagcctcttggaatcaacatccaacagcttccaagagacaattcagccacctccacaggacccgatgagttccatgtcgacacggtggaaggcgtcaccaacgtcgaggagcgccaattcctcattggcatgtctccagcacgcgaaggccaagaagccaatggcgacctgaacaaccttgcggagctagagaattcacctgaagacatttgcttctccctgcatctgggcgagagggagcccaagcgactccgctccgattcgtcgctggacatagacttgcagaaatgaaatgaagctgtgtgctgctgttccatcaccgcccagctctgtataacctagtgaaggcagttccattctatgaacccaatagaaataaatatgggctaggtatttgtttccggaaactatctagataggtatccggataatttctatcgttttcacaggatacaagccttactgtatttgtttctgtttttaaaaaattttctg

SEQ ID NO: 19494 - DNA, 2124 bp, Oryza sativa
  ref <308>: DATABASE ACCESSION NUMBER: AK069850
  ref <309>: DATABASE ENTRY DATE: 2001-12-06
gaccacgaggaggcgaccgccgccgcacctctcctcctcttccacgacgaggcgccggtctcgccggcggagcccagcatcgccggcagatccacgtcgagcatcgcggcaggagcaggacagggagaggccgaggacacagcgaaaggggatcgatcgatcgatcgatctagggttttttgagctccgccacccgccccctccttcccgatggagaccccctccgctcccgctcccggggatggaaactcggctcccgcatcatctcgggtgacgtttgaggatatgcttcgcagctgcgatcagagttattatcaaatgctcgggttccctgacgctgcttcctacttcgaggcaaaggagcggaatttgttggctcagtactcgcgtcaggtattccctctgctatggcctatactggagaaggatagcctcacgcgcttcaatcgactttgccaagggtggtcgcgcttgatgggccttcgtggtttcatttacccggagattctcagctccattgtcgccaacaacgctttgcgctgtgccagagtggccctgcaaggcagctctccgttgcgcggacgtcgtgccgatcccaacggcctccatccttatggctacacggctctccacctggccgctgagacgttcagcgtcgaaatggtcaagctcctcctccgccacggtgcgtcagcaaaccaccgcactgagggcgactacgtcattgagggcctcctgcctcttcacgtcgctgttgagaatgccagcatgcacaaatacctggaggacaattgggctgatggccactctcctaacaacctcatatctctcctctgtctgccagagatgaagatgtatttggacacaactagattaattgcccaacatacgcataacattgtcgatgagttgtgggattacatcgataagaagaagtttgtccagttagcaattttgctgctggcttctcagaagcagctccatggccccataaataggagccgtggcaaggctaatctgaatgggtttgaatctattagacggcgcacttatgaagctatcagtggcctacatctccagatgatagctatggtgaatgaggggaaaaatggcagtgcgcttaagaagctgaaagagaagaaggaagcccttcttacagcagacgcactagttggtattatagacaaagctggtcaagatcttgaggattatattcagactaactcagaggtcatcatggtcgtgccacgcgcgacctacgtggctagtgttatttgaagttatgaactcagtaccatggcaaacaatgttcttaaggtggcggcgcctaggcaacaatgcactcccagcgcgatgtagagctgcaggagattcagaaaggtaaaccatgagggggtccttgaacacgtttcatcaattctaaacagcaagggcattgttccttctgggaaagggatagacactgcagaccttaaatgctaccgatatcctgggcaaacatcaattaatatgtcacattcacgagctgacaagtcatatacccttaatgctgaaggttgtaaaaggatcccttcaaaagcgaccatctaaactactggtcctaaaagaagcgagagataagttctttccatactggaaatcggtgctgtctgcccgtttgccggtgaagatagttccaccctgtgaaccaagcagcaatgacatacaaaggactgaaccaaggaaggacatcctaagtactgaagcaagcaggaaggacttgcaaccgccaaacaaatcaatcgcgaatcttgtttcgacgtcaaagccccgattggcaagcaattatgaatgcaggaggcagctttgtgctcttgctgcgatgtctcttaaggtgttgaggcgcacgtgagtgaatctatatggcttggtaaagacgaaagtatcggcggcatgagagtagctgtgctagaatctgtgttcgtgttcttttgaccttcgtggccgtgttatattaacatgtatgtacttgtcatgaaaataagatatatatataccagatgtaatgtatttcaggcttgatgcaacctggtaacttggtaagatttctagctgaacacattgtgctatctttgggagtgcctt

SEQ ID NO: 19495 - DNA, 1633 bp, Oryza sativa
  ref <308>: DATABASE ACCESSION NUMBER: AK069851
  ref <309>: DATABASE ENTRY DATE: 2001-12-06
gaatcgtgctggacctcgcaaaattgcccctccaaccgcatcaacactcgtcgcgcgaagcgtaccatcgtctctctcatcttcctcgcggtctcatcctgatcgatctctgcgagtttatccaatatctgtactcgcaaactagctagagagatctagttagtagctaggcagttgctgcctctcatgtctaccatctacatgagtcagctctcagctgctctccctctcatggagggggagcaccaccatcaccaccaggatcatcaccaaggccacttccaagccttctccctgcagcctaaggatcccccagtcttattcccctttgtgatcagtagaagaagcagcagcagcagccctagcgacagcaccactctaagctatggttcagaccatcacttgacacagcagcagcagcatcagcatcaagccatgcttgagccccaaaatatgattggaggatcatccgctggcatctttgcgacgccgttcccgaccgtcaagagcatccgcgacgacatgatcgagcggtcgcagttcgatccatacgataccgagaagctgcaggcgagctgcgggttagccaaggtcgtcgccggcggcaagtggagcgcggtgccagcggccaagatgaagatcacgaggaagatgggtgagccgtcgtccggtgtcactggcggggctgcgacgacggtggcgccgaagaagccgaggaggaggccggcgcaggcgtacgaggatcacggccatggcggcgccatgggccaagcttttggcgtgattagggtgtgctccgactgcaacaccaccaagactcccttgtggaggagtggcccgtgcggccccaagtcgctttgcaacgcgtgcggcatcaggcagaggaaggcgcggcgggcgatgatggcctccggactaccagcgtcccccaacgccgccggccccaaggcggccgcacatagcggcgccacaaacgcagccgccgcagctgccatggaggagacggccgagtccgccaccgtcgccccgcccccggcgccgacgacgaggggtggtactctcgtcgacagcatcgggctcagctggagcaagacccatgccgccgccaccgcctcctgcagcttccggccgtcaccggtggctcccggcttcgcggcggcggtgcaggacgagatcactgacgccgccatgctgctcatgacgctgtcctgcgggcttgtccggagctgagaaagaaaagctatacttcatctctgcatgcatccatcgatcgatcgattggcaccaagctagagagaccaatcgatggagatggagagaggtgcaggctttttgcagctagtgcgttagcctgttcttgctcgctcgatcgatcgtacactgccccccagttggaatgtctcttggcgtcttgtttcctgttcgagtcttgtgatctctgttactttgtgcactgtactagagagtgagagagagagtgaggtagaaacatcaagaggagattagaggagaaagaataattaagagaaaagtgtgagctagctaggtaagatttactgtactgtgagttcaatttggagtaagctttttgggctgcttcacggctaattatgccactggctgctatatatgt

SEQ ID NO: 19496 - DNA, 1660 bp, Oryza sativa
  ref <308>: DATABASE ACCESSION NUMBER: AK069852
  ref <309>: DATABASE ENTRY DATE: 2001-12-06
gattcactgtttctccttcaccattcgcctcctcctcctctcgagggagagaagaaaaaagctaacgccgccgcaagaatccaagaaggagaagagagagaatttgatctcttcctctccttccccgaggctctgaggcgaggtaggttgtcgcgggatcaataatggtggccatcgaggcggcggcggcggcggcggcggcggagaggggcccgatccgggcggtggcggaggcggaggcggaggcggaggcgaaggtggtggatgtggaggggaaggaggaggaggaggaggcggccaaggtggaggaggaggaggaggaggagagggagtacaagagcgacatgaggaagctggaggagctcatgtccaagctgaacccgcgcgcgcaggagttcgtgccatcgtcgcgccgcgcgccgccggcggcggcggcgcaggcggcgggcgggctgtccgccgacgcgccggtgttcgtctccgccgccgagtacttcggcggggccggcgccggagccgggcagctgcaggtgggcggcggcggcgggagggactccagcagcgacggatccagcaacggcggcgggcagccgcagaatcgccggagaaggagtggattcaaccagggaaggaggaggacgggaggccggacacgacgcgccgatagggaggatagtgtgcggaggaccgtctatgtctctgacattgatcagcaagtgactgaacagaagcttgccgaagtgttttctaactgtggacaagtggtagattgccgtatctgtggtgatccacactcagtcttgcgttttgctttcattgaatttgctgatgatgccggtgcaagggccgcactaacactaggaggaaccatgcttggttactaccctgttagagttttgccttccagaacagctattctgcctgtgaatcctaaatttcttcctcggacggaagatgaaaaagagatggtctcaaggactgtatattgtactaacatagataagaaggttacagaagaagatgtaaagattttctttcagcagctttgtgggaaggtttctcggctgaggctccttggtgattatgtgcactcgacgtgcattgcatttgttgagtttgctcaagcagaaagcgccattctagccctgaactatagtggaatggttcttggcacacttcctatcagggtgagcccttccaagacacccgtgcgtccgcggtcgcctcgcgtgatgtcaaactgagtccgggttgttcctgaagcttgaggctgtcaccaatggcaggcagagcttgaaactctagtcatggcgtttagaaatgctgtcgcttcgcggaatcggtaactgccgtttctgagagtatcatctcatcatctcttaggtccaagtagaaggccgacctgctgatgttcgtctgttcagagacccatctgtaggttgggagaggctacattttcgtttcttttgttcagtatgctatgttcagtatcctataacagcctttgcaggcaattccgacaataatatctacgtattttctgtctcattcacactgttcatgtgaatatgtgatagttgaaattccatatctgacggtgaacttagggttttatttttcattactagtgaaattgaaatgattaatgtgaaaattcctc

SEQ ID NO: 19497 - DNA, 1101 bp, Oryza sativa
  ref <308>: DATABASE ACCESSION NUMBER: AK069853
  ref <309>: DATABASE ENTRY DATE: 2001-12-06
gatcattcacaaataactaacacccatcagcaacaatggcatcctcttgtctccttctggcctgtgtcgtggcagcggccatggtgtctgcagtgtcatgtgggccgcccaaggtgccgcctggccccaacatcactgcggcctacggcaaacagtggctggaagctaggggtacctggtacggcaagccaaagggtgccggccccgacgacaacggcggcgcttgtgggtacaaggacattgacaaggctcccttcctcggcatgaactcatgtggcaatgaccctatcttcaaggatggcaagggctgcggctcctgctttgaggtcaagtgttccaagccagaggcctgctccgacaagcccgtcatcatccacatcaccgacatgaacactgagcctatcgccgcctaccacttcgacctctccggccatgcttttggtgccatggctaaggaaggcaaggatgaggaactccgcaaggcgggaattatcgatatgcagtttcgtcgcgtccgctgcaagtaccctggtgagactaaggtcaccttccacgttgagaagggctccaaccccaactactttgcagtgcttgtcaagtacgtcggtggtgacggtgatgtcgtgaaggtggaacttaaggagaaaggctctgaggagtggaagccactcaacgagtcatggggtgctatctggaggatagacactcccaagccactcaagggccccttctccctccgtgtcaccaccgagtctgaccagaagcttgtcgccaacgacgtcatccccgataattggaaggccaacgctctctacaaatcagagatccaagtcgactaagcctgcatggaattcttccgttgtctagctacctatgcacacaggggacggaaaaaaatgtattttaaatttaaaaaatagagctaggtttgtggagtgagcagaaagtctatcggtctatggtgtctgctctcctacctgggcccatgatcgagtcttcaattctcgatcagaaaattttgatattaaattatttgacgctttcaattctaagggattgtcaacgtgaaattcaattccttaaaaataatagggagtatct

SEQ ID NO: 19498 - DNA, 1959 bp, Oryza sativa
  ref <308>: DATABASE ACCESSION NUMBER: AK069854
  ref <309>: DATABASE ENTRY DATE: 2001-12-06
gactggatcctgattggcgttgcggccaatcaggatcctgctggatcctgattggatcctgattggcgttgcggccgtgtctctactgttgttgttgttgtgttttttttttcttttttacctttttttgccgccttggttttgatgcggagtctggatgtttctacttttggatggggtttttttaccttacccgaccgaattcgtgggtggattggatgcggttcatggaagggaacgggatcttggtcggctactcggatggggggtttgccggccggttgggatttcgggaaccggatcgaggaagaggcggaggagaattgatccgcggcggcggcggcggaggaggaggagagaatatgtggtgattttcatctgagcccggttgcagaagtccaactgtatcggagaatcttactcggttcgtactacagtcccccacgctggtattcaaggaatcttctctggatggaccagttcttggttggtcccggttctttcatgtccagttccccatggtggttcagttggcagttgtgccctagttgttgtaggagtaattgtcggtggctttaaatggttcatgctcgtcagttcttccgagcattccgaggtgagcgagcatggagtcgaggccggggggaaccaacctcgtggagccgagggggcagggcgcgctgccgtccggcataccgatccagcagccgtggtggacgacctccgccggggtcggggcggtgtcgcccgccgtcgtggcgccggggagcggtgcggggatcagcctgtcgggcagggatggcggcggcgacgacgcggcagaggagagcagcgatgactcacgaagatcaggggagaccaaagatggaagcactgatcaagaaaagcatcatgcaacatcgcagatgactgctttggcatcagactatttaacaccattttcacagctggaactaaaccaaccaattgcttcggcagcataccagtaccctgactcttactatatgggcatggttggtccctatggacctcaagctatgtccgcacagactcatttccagctacctggattaactcactctcgtatgccgttgcctcttgaaatatctgaggagcctgtttatgtaaatgctaagcaatatcatggaattttaagacggaggcagtcacgtgcgaaggctgaacttgagaaaaaagttgttaaatcaagaaagccctatcttcatgagtctcgtcatcaacatgctatgcgaagggcaagaggaacgggtggacgcttcctgaacacaaagaaaaatgaagatggtgctcccagtgagaaagccgaaccaaacaaaggagagcagaactccgggtatcgccggatccctcctgacttacagctcctacagaaggaaacatgaagtagcggctcgaaacctagaacagtggcttctgtccaccggcattcactcttgagggtggattcttgctccagaattgtgctgccatctttcaaatgatcttcatcgtgcaaagtaattatatgtacattcctctgaatgatctatgcaccaattgttgatcctggcagggtaataatctggatgtattgagtccatcacagtgcgaatgtcacgggtagatctgctgttttcaggcaattcattcttggctttctatcccacccgttgttgttgcaagttaagctagcagtacttgtctcagtgtccgtgagacgtttgtgtaagattaggttaaactagaagttgtaatgctgtattaagtgtttgtatttctaatatgaaccgtaacaaggccagagcagaactcgttatacatacaaaaattgatggccaggtcagtgttaccgtattattatgcaatggcagaagcttgcataaggcgtggtgccactcgttgctttgctgtatgtttttgagtttcattcgatttattttcactgttgagtttgtgggt

SEQ ID NO: 19499 - DNA, 1602 bp, Oryza sativa
  ref <308>: DATABASE ACCESSION NUMBER: AK069855
  ref <309>: DATABASE ENTRY DATE: 2001-12-06
gcccgtccactcctcgtcagctcctctccaccgtcgctctcttcgccttcggcgcaggcctcctcgcctacggcgtccacctctcctacgcccacgtcgagccccagcgggcgcgcacgctcgcccgcgaccagttcgtccgcgattacctcaaaaggaagtacgacaagtagcacggcctccccccctccccccaacgagatccccttcccgctcaatttcttgggaggggtgggggagcgatggctttggcccccgcgagctcgggcagtgggccggtggttacggaggtggagatgaacgccggcgccgaccagggtgccaccggcaccgtgcgtgccaccgtcgtgcaggcctgcaccgtgttctacgacacccctgcgactctcgataaagcagagaaactggtagctgaagcagctggatatggttcacagatagttctatttccagaagtctttgttggtggttaccctcatggatctacctttggactgactattggcaatcgatctgccaagggaaaggaagacttccataaatatcatgcagctgctatagatgtgcctggtccagaggtgacccgcttagctgcattggctggaaaatacaagattttcttggtgatgggggtggttgaaagggtagggtacacactatataatacagtgctcttctttgatcctctggggaaatacctcgggaaacaccgcaaggtcatgcctactggactggaacgagtgttttgggggtttggggatggatctactatacctgtttatgatactccaatagggaagattggtgccgtcatttgctgggaaaacagaatgccacttctcaggacagcaatgtacgctaaaggtgttcagatatactgtgctccaactgctgatttctcgcctagttggcaggcctccatgacgcatattgccgttgaagggggatgctttgtactttctgcaaaccagttttgtcgcagaaagaactatccaccagcgcctgaatatacttttggtggccttgatgaagagccatccccagaatctgttatttggcctggaggaagttccatcgtctcaccatctggaacagttctggcaggtccaaactatgaaggcgagggcctcctcacagctgacttggaccttggagaaattgctcgagctaagtttgatttcgacgtcgtgggacactatgcacgacccgaggtgctgagcctgaccgtgaaaaccgaatcaaagctgcccgtttcttttacttctgctgcagagaaaaattctgctgcaaagagtgacggtatatctaggacctgatggccattaatcttccatcgcggtgtgcaataaaattgtcagctggccagtgttggtatcacatgaataatctgtctttagtttcttgtaaagatttggagacgatgcttccctgataaacaattggtgcctatagtgctgtaatactcgtctgaaaatcgtgtcatgtttcttcctcttattcgttagtgaagacgtcccaactcccaaatgtagattgcgataacacagtactcagtattcaatttccaacaaatcatacagtattctacattccatttctacc

SEQ ID NO: 19500 - DNA, 3712 bp, Oryza sativa
  ref <308>: DATABASE ACCESSION NUMBER: AK069856
  ref <309>: DATABASE ENTRY DATE: 2001-12-06
gcttggcccatgtctatcgtcttgtccgtctcctttcccttccataccaagcgtccgcctgtctgccgttgccttcgcccgtaccacagtacggaaatttcggcgtggtcgccgtcatcgctgtcgcctcgccgcccgtccagaaagcgcggtgccgctgccgcggcgtcccagcaccatggccgaggagccgactcttccgcgtctgccagccgtctcgtggcactcggggacgcagaccttcggcaacacgcgcaagcgcctccggggggacggggcgtcgacgggatcgccgcttttctccaactcgagcgacccggccgtcttctcgagtgacgacgacccgagcctggagaattacaccgaggggcgccatcgcaagaagcgatacgtaggctcctggttccagcagcatccggcctcgggcgactcggccttcagtgaggaggcccgtcccaagcccaagggcaagcggaccttccagcgccagctcgacagcggcgtgtggatgggcagcgacgcatcgaccgacctcgatgatgccgtccccgagatgggccagcccgttggctcgcgcttgccgcagctgaacgtcgccgccgtccctgcagtgcagctgctttcgccggccgagaaggaagcccggcgggtgattgcgaggagtgtcgatgaaggcgttgaagatgtcgatctcatcggactggggcttgcgcatgtctccaatgaaacgattgagcctcttgccgggctctcgtgtattcccctggttgacgaggacgtgccttttgagcacaaggatcccgctttgaagctttacctggccaacaacccgttgatacgcgcgccaggcgctctgttcaatctcgagttcctgtcggttctgagtctgcgcaataccaagattgacgagcttccacccgccatcgggaacttgcggaatctcacaacgctcaatgtctcgcttaatcaactacggtatctgcccgccgaactgttggaattgatatcacaccgcgggaaactacgctctctgcatctagtgccgaatcctttccacgagccgaagagctttagcccacttgaagacgtagcgcaggttgaagatgaagccgcaccgccatcgcccgaggtcaaaccccttcaatggcagctcagaatctccggtcgctcacccgtgcagttttccaacagccacggtgatgtggtctcccagttccggttgccttggccgcccgccgacgacgatcactcgtcgcccctgctggtcgagatggacgacctcgcgttggcgccattgctcccacgctcgtcgcgcgggaacaactcgtcggtagcagagcccagccgcgtgccctcgctcatggagcttgcgctccagtcgtgctcgcgcacaggcttgaggcgttctgctctccccagccttctcgctgctggaggacaaccacacctagccaagctcacgcagtgtattctagaccagggcgaagccaacgcaaacgcaggaaccgtgccttgttccacttgtggcagacgtatgatcgtgccgttggcccagtggttggaatggtgggcattgagtcccacaaatacgcaggagggaggggtgaacaacacggcccgcgaaggcatcatggcccgcgtgccatttttgaagcgagcttgctcgtcgagatgcttgccgaagcccacggcccggggggctgtacatgacaggatcagcacttaggcctcgggcctccgtgatggtctccaggggttgacgcatgggaggctcctcatcgcttgtagccagctgaccaatcgccccgagctcagtgatttgccacaagagacgatccgagaccgaaagaagaactgttcgcggcagcagacgcgtgtcgatgtcgaggtggaatggttgttctttctttgaggccagtcgcgttgtactgcctatctgcctggcgtggtcgtcctctcaaaaattgcagcgcgctgtatgtactatcagttgagttcgaaacgaattacctacctccgaaagagcggaattccctcgcgaaaccggatctgctgcttcgacgatatacgaagggtgacgtcccggacgaacaccttggccagctcctatcaactattggcccgaagagcatgcgagtcgagcaactgaacaaaacggtccatgcacattcagggccagtggacgagtgcgccaagtatgctggaggtgccagatcttgaagaaaggagccatccagccgtcaccccagcccaaatggccacccagcccgaggaccatacgtgttgcgccgcccaggtgggcgggaaccactcaatccgagaacagggtaccggctttccgggtcgggcctgcatgaaggcacggcgcattttcgccaatggcgggaccgggaatgggctacgctgcaaacccctcggcgagacggagccgagccaacaacaaataccggcggataccacagagctttcgggcggggcggtcgtttgatgtacggttggatggcggcagtaccacgcacgtatctcgataactcacatacagccggtccctacggcatgcggcagcgccaagcagccggcgtcttcgacgagccgccgccgagccgccgttctaggttccacggcatcttgcttttgttcccgtgttccgaggctaccctgacggctcttggcctcgtggcctgggtatcttccagtgttgtgcttgctcgcaagaggcagtgctacgattgtatcctccccgagagggcgggtgcgtattacatgagaaagtactttagggattcccgtcgcctcaaaatcagaccacgagcggatggaagtgtgtccaggggctccaaacggggcccggggtgagtagtcacatgcccgccaccactttgcaaggtggcaaggaaggccagggcaacccgtactaccatacccttcagttcccaggcactcttcgactgaagccatctgctgttgttcgcctagctcatgactcgtcacaactcccgacagccagcgtctccagatggggggccaccacatggtgagcccatgccttcccttggcaagtgaccttttcgtccccattcaagccgaatgcgttgccctcttttccgtccccatgctgtggcccatcttgcttttgttcccagactcgagtgtgaaggaacttgggcgtcggaagacacaaggatgctgcttgacaatgctcgcccactggcagggcacatccaaggcaggcctgttcggtcgaggcagggccgcgtgggggtctggtgggccattctgctaagagggcacaggcccctgatggcgatgagtacagcaacgacgaggtgttggcagataaccgggcccagcccctgaaagacagaaaggggcggtcagatggggtagccccgggtacgccgggcagcccaatcaacgagggacaagggccgggaagaggaaagggagggggggcagccgaccacagcgccgtggcgtttgggcgggatgcatggggtgtgcccgtccatcatgctcgctgggcggccttcgcatgacgggaatgttgctcgcggatggacagcaagccatggtgaaatatgttggccctcactctggtcgcaccatatcatggaacgccacatggacatgggccagggcaccgcgtctcttggccatgggcccggcaccgccactcgaacgggggacggttggttgtaatgaatactgaacc

SEQ ID NO: 19501 - DNA, 1243 bp, Oryza sativa
  misc_feature (565)..(565): "n"=any one base of a, t, c, or g
  ref <308>: DATABASE ACCESSION NUMBER: AK069857
  ref <309>: DATABASE ENTRY DATE: 2001-12-06
gatagtttggagctcccagtttacgagaggaggagaagaagaaccgcacgacaccccaccccacctcccgatcgccaagaaccacaatccccaatccacccaataactctaattcctcccccgattcgccctcgaccaagaaccactcggatcgatcaaagccgccacctttccaccaaatccccaatctttttttttttcttcttcttttcttgcaattgatgcgcttcgccatcgggatttgaggggaggaagaagaaggggatggcgtgcagggggttcttcgagtgggtcctgaagctgctcaacttggtggtgatggtggtcgggctggccatgatggggtacggcgcctacctcctcgtggcgtggctccagctgctgccttcgccgccgccgctgccgcctgcgccggcggtggctcccggcggcggcggaggcggcgagatggtgcggctcgggaggccgctgctgctcctcctcgacgtgtcgtccttgcccgatgggacggcggagaggctctccgctgcatggtttatttacgcgtttattggtgttggtgtantactctttattacatcccatctttggttgtgctggagcatcgaggggcgggtgctgcttatccttttattcgttcctcattattctgttcatactggtagagcttgctgcaggaggtttcattttcttcaaccatagctggaaagatgtaattccagttgataaaactggtaactttgacatgatgtacagctttttgaaggagaattggagaatcgcaaagtgggttgcacttggagctgtactatttgaggcagtgctgttcactgtagctctcatagtgcagtcaggcaatcaagcagactatgacagtgatgacgagtacattgccccaaggtcttcaacccggcagccgttggtgaacaagcaacctgttgctgaccctagggtgcccaaccttgactaccgtccaatccgaaacgatgcgtggagccaaagaatgagagaaaagtatggggtggacacctttgatccaaacaggttccaacaggcgacaatatctcccgcagaacaaagaaaccgatgcgcaatcctctgaaactcggttggtatcagtcggtagcggctctaatttacacccaactgtacaatagcatcgatcggttcccgcataatgtatacctgcttgatgtctttgaaccaatgttgttcagttgtttaggatgtggagagcctgtcc

SEQ ID NO: 19502 - DNA, 1074 bp, Oryza sativa
  ref <308>: DATABASE ACCESSION NUMBER: AK069858
  ref <309>: DATABASE ENTRY DATE: 2001-12-06
gaccaaccacgttgtctcccgttgcatttgcatgcggccatggcgatgaaggcgccggcgtcgtccaactcctacctcctcctcgccccgctcgcgctgctcctcctcgccgccgtcgtcttcctgctcccttctctcaacggcgcccgcgtcggctccgatggcggcctcggcgtcctctgcgcccgccgcagcgctggcgccgaggactacaccgtcgcggcgccggcggcgccgaaggaggaggagaagcccgagctgagcctgctcgtcggcgtcctgacgatgccgaagcggtacgagcgccgcgacatcgtgcggctggcgtacgcgctgcagccggcggcggcgcgggcgcgggtggacgtccgcttcgtgttctgccgcgtggccgacccggtggacgcgcagctggtggcgctggaggccgcgcgccacggcgacgtcgtggtgctcggcggctgcgaggagaacatgaaccacggcaagacgcacgcgtacctctcctccgtgccgcgcctgttcgcgtcgtccccctacgactacgtcatgaagaccgacgacgacacgtacctccgcgtggcggcgctcgccgacgagctccgcggcaagccccgcgacgacgtctacctcggctacggctacgccatgggcggccagccgatgccgttcatgcacggcatggggtacgtcgtgtcgtgggacgtcgcgacgtgggtgtccacggcggaggagatcctcgcgcgcaacgacacggaggggcccgaggacctcatggtcgggaagtggctcaacctcgccggacgcggccggaatcgctacgacctcaagccgcggatgtacgacctcagctgggacatggacaacttccggccggacaccgtcgccgtgcacatgctcaaggacaaccgccggtgggcggcggcgttcagctacttcaacgtcaccgccgggatcaacctgcaccacctctcaccatgatcgatcgatcgatcgatcacctcttcgatgatccataattgttgtttgttaatttcttccccgtttgattaattctaattaactaatcgttcg

SEQ ID NO: 19503 - DNA, 1844 bp, Oryza sativa
  ref <308>: DATABASE ACCESSION NUMBER: AK069859
  ref <309>: DATABASE ENTRY DATE: 2001-12-06
gggcggttttctccgtgccgccacttcccgaccgccgccgccgccgcccacgagaacgagcggccgccgcaacccgcggtccccttgcttcctactcccttcccctgctcttccttgcttgtttccacgtggtcgtctaatgggcaagcggctcgccggcgccgagaaagaggtgctcgttgagatcgtcaggttcacccagaagaacgggctcaagggcgccgaggggggatggaaggatttcttggctcggaacgacaagaagttcggagcttccgtgagtgaccccaagaagcggtccaaggatgtgctgcttgctttcctgctaaccttctccaaagatttccagaagtacttcggaaaattgataaggcgtctgaacgaacgaagtgcttttgagcagttcctgaaggaatttcctgacaagatttctcctcagctgaagcttgttcaactgacagcagaacacccggagtacaggaaaaattataatttcccatcttacaaagagggatggaaagtgctgcgtgaaggcaaaattaccaattttatgaagtcaactatgttggcaattgactgtgagatggtcctttgccatgatggtacggaagccttggtccgagtatgtgttgtcaacagcaatctagaggtgaagttagatgaacttgtaaaccccttaaaagctgttgcagactataggacaagcattactggtttgtctaagaaggatttaaaaggagtcacatgctcattagttgatgttcagaaatcgttgaagaagctcttgtccaaaggaaagatcttgattggtcatagcctatcaaaagatttacatgctcttaagtttgactactctcgggttattgatacagcatacatctttaagtatgcaaatttgcctactactgcatcagcctctttaaacagcctgtgcaagtctgttttgggctatgctgttcgagaagaaggggagccacataactgcttgaaggatgcagaagctgcgatgaatctagttctcgccaagcttaagcatggatttaatgatcccattgaaattgcaagagatagtgtacctgaatctgatatgatgaagttgcttgctcacaaaattccagtctacctgccttgtcaggagctgctcaaattattttctggaaatcccagtattgatgagaagattgattcaagggttcggggtgattattattctacatgtatttcatttggagacagagatgaggtagagaaggcatttgatgaactggatggccaagaggccaaggactctagcgggcgacttcaaaaaaatgtgctgctgaaacgcgacaatggggatgtggcaagcttctatgtacgaaagatggcgtatggcgctcaactaaacaagtcagaactttcaaacaagagaccgccacctaccgagcatgtagaaccaacaaaagaagataatgatggggataagcaaaaaaagcgaaaaactggtaaaaagcatgagaagaagaaagcaaagatatcagtggctgaatgaagatctttggagggatgattttgagatgcagagagattggatgaatgaagctggagaaggatgttgagaccattcggctaggagcagttttgatctcaccatgagtcatgagaggaacaattttgatctctagacgctcttcttgttcagcggtttgtgcgctttagattgctaggcattaactgtagaaagttgttagggctcattttattcctccattttatcgactgttgatcacgagtattagagagggtccaggaggatattcttaacgtaaattcactgcaaactctttgaaatgtgatgagatctt

SEQ ID NO: 19504 - DNA, 911 bp, Oryza sativa
  ref <308>: DATABASE ACCESSION NUMBER: AK069860
  ref <309>: DATABASE ENTRY DATE: 2001-12-06
gattctgatcatgcggctatcctagtactctcgagcaccttcttctctctagtctctaccgatggccgtttcccccggacagcagccacgttctatgtagtatccaccacggcgaggttgctactggtgcagctcaaaccgagccgatcgagggacacacgactattaataccgactgcgcgtgtgttctgctcaagccgtggacagcgtttgatcgatcttctgcttaactgctttctacttttttggtagccatccgttatctcgacacagctccgaaaggttcggcgagatcgatggcaaccatgcctgctcctgtagcgacatgcttcgtccctgccacatcgggcgtcaggtgcagggcattctccacgccgatcaccaattatagcgcacggggcgtcgtcgctgatcccccgaagctgctgagtcgtccggggaacctgcagctaacgtcgggcggcgcgcggttctccggcaggttcagggcgtccgcggcggccgtgcacaaggtgaagctcatcgggccggacggcgcggagagcgagctcgaggtgcccgaggacacctacgtcctcgacgccgccgaggaggccggcctggagctgccttactcgtgccgggccggctcgtgctccacgtgcgccggcaagctggcctccggcgaggtcgaccagtcggacgggtcgttcctggccgacgagcagatcgagcaggggtacgtgctcacgtgcatctcgtaccccaagtcggactgcgtcatctacacccacaaggaagaggaggtgcactagatagagtccatgtcgatcgcgggtcgtgattcctgatcctgatgtaaatcaaaatgttgttgttccaatatggcacgttatatggaagtctatgaactagtagtaagtcgtattgtg

SEQ ID NO: 19505 - DNA, 1753 bp, Oryza sativa
  ref <308>: DATABASE ACCESSION NUMBER: AK099114
  ref <309>: DATABASE ENTRY DATE: 2002-08-28
gactccgctgacccttttgttcctcgaacccaccctccccctcccggattcaaaccgtcgacgccgtcgccgcgtgactctcctccgcggcggcctgagcctgaccacccccaccctcactcgcctcgtcgccggaaaattgcattcgcgccgctcgccgctccccccccctcttggaggccccggagctagctgcttggggggatcctcctccgctcggcgggcggcgatctcgcggcggtcccgaggaggtggcgaggtcctggctgcgacgagatgccgtgataccagcagtgatgcgcggatcggagcatgggtgtgagccctccagggtgtacctgtaggcggcgggcgaggagcgggagttgcggccatggcggtttacatcgctcgggaggctaccaagctatggaggaaggtgtgtgcggagatagcggtggagctgcagcttcttttcgagaagtggcgcttgctccttgccggattggtgttcagtacattcatggactggctgctcgaggagtacattacttgcatcgacctgggccactgctccaggacttgggattcatggctcttccggaacttggacaggacaaaggatatgttagtgagagcgtgttcacattcatcttcatttccttcctgttgtggagttttcacccttttatttatcatagcaaacgtttctacactgttctactctggcgcagggtgctggcctttttagttgcttcacaatttttgcggattattactttctattccactcagctcccaggtccaaattatcactgtcgggagggctcaaagatggccactcttccaccgccccataatgtacttgaagtgctcctgatcaactttcctcgtggagtgctttttggttgtggcgatctgattttttcatctcacatgatctttacacttgttttcgtgcgtacatatcataaatatggatccaaaaggttgattaagattcttgcttggctgatggctataattcagagtcttcttataattgcttctcgaaaacactacagcgtggatgttgttgttgcttggtatactgtcaatttggttgtattctttattgacaataagctaccagaaatgccagatcgcacaaatggatcatctttgctcccagttacagcgaaagataaagatggcagaacaaaggaagagctccataaactagagaaggattgcaagatgaaggaagagttccataaattgttaaatggaaacactgtcgattctactgatcggcggcaacgtgtgcagatgaacggaaaacatggcgaggacatcaaccacacactctcagatgccactcccaatggcacatgatcagctgcttttcatcaggcggcttgtctagttgtctttcacattgacaggggaatctgctaggagacaaagaatgcttggtttcctctgtatgatgactggcttctcaggtgcctctgcccctgcattttgtctgtccgccatggcaatatgttcacggatgaatgagacagagccaggtgccatagcaccagcattgctatggactgcaaaggaatcagagtctcaactctcaagtctcccagcgacttttctcaggctgccattacagttttgcacccttgtatcgaatctctagttctcttccctcaatttcttaggttatggaatgaacactttcaggttgatttgagaagcatagcttctcccgctgtatatatattgtcacattgatgaactt

SEQ ID NO: 19506 - DNA, 1205 bp, Oryza sativa
  ref <308>: DATABASE ACCESSION NUMBER: AK069861
  ref <309>: DATABASE ENTRY DATE: 2001-12-06
gacgcacgcatctctccccccatcgcccatcgccaactcctgatccaatccctcctctcggcacccatcgcccccatccccaatccccgaccatcctctcactagatcccaatccctcctctgtcgcccctatccccaatccctcctctagctgcggttcttcgattcggcagtcggagatggcacgacggtcgaagatggcgaggtggcggtcggagatggcgcggcggcggttggagatggctacagcgtgcatggccagaaggcgcacactcaagcggagggtggcggaagcggcggcgaaagccgcagcgtaagtggagtctacagaggaccacgttcagcgacaagtagaatactggaggcgtgggttttgggtgtctctcaaaggcaagaacaaggatgaaagtagtgtggactcaccacatccatgtggtggaaggtgacgaggaggcgggtggcatggtggtggtgtggttggcgccgacggcatctacttcaccaccgagttggagcaacaagatggtagtgacgtctccgatgtggagcaacatcccgacggcggcgcccctcccgactccgagttacaagtgggtggtggagggcaccgtgtggagcggtgctcggcactaaggacatctacttcgtccccaagtcagagctgcaaggtggtagcgatgtccctgacttcgaagagcaagtgggtgctggggtgcctaacggagagcagcagctgaacaacggcctcttcaccgacttggacgatcaacagatggatgacgttgaagagccgattgatgtagaggagatggccatcctaggagatgatgatgacacagtggctggcgacgagggcatcgacgaatttgctgaaattcgtgaaggtatgttgaggcttttactcccagcctacttcaccatacgtcactaaggatatgcattgtcggagtagtagtactaccagtacaagtattagtagcagtagtattagtattgagtaggagtagtatttgtagcaatgttaggtgactaattaggagatcatggctaaaaatatggaatgctcttttggctgaactactatgatgtggatggatggtctgaacatgtaacaaatgaaaatggagtagcatatgtgcccttctctctctgtaagcatgggatgattgatcaatttgtttaattaattaagacctttcatgctt

SEQ ID NO: 19507 - DNA, 3784 bp, Oryza sativa
  ref <308>: DATABASE ACCESSION NUMBER: AK099115
  ref <309>: DATABASE ENTRY DATE: 2002-08-28
ggttgcatttccgaagcttccaaatccgaacccacccggcgcctcctctcccctcctccaacgtctcctcgatcgcgagatcccccgcctctactactactagtctccacagatttcgtatcccccaaaaaatcccaacgcttcaaacccagcgagtcgcgccgccgcctcgtctccgatcgcggcgcacgcgcagatcgctagccctgcctgcagcatggcgtcggcggcggcggagggggaggaggccccgatcgcggcgttcgcggtgtccaaggggggagtcgtgctgaagaacatcttcctcaacgcgcccccgtcgccgctgcctgtggaggaggcggcgcgggggcggggtggggaggaggaggatccgccggtgatgttcgggcggcacccggagtgccacgtcctcgtcgaccaccccagcgtcagcaggttccacctcgaggtccgctcccgccgccgccagcggcggatcaccgtcaccgacctctcctccgtgcatgggacttggatctcgggacgaaggatcccaccgaacactccggtggagctgacagccggtgatgtactgcggcttgggagctcgaggagggaataccggcttcactggctgtcgctcccggaagcatttgacatggaggatctgctgccaccgctgctggaggaggataaggaggagcttagtacttgtcaggaggcaagcaagcagttggagcctgatcaaaaggagtcagcggatactgagactcatcaggagacaagccaacaagttgtgtcagaacaaattgattttcatgctaatgtgattccctcagcaccacctatacctgagttcgctgatttatttgctctggaagaatcttcagttccagaatttgatgacagcagagagggaaggattgagggaaatttgattgaagagtaccatgttatatattctgttgaatcttcgattacacaaccaatgcttgccacagtggaagatgctggaagatcagtcaagtcaggcgaaaaggacacttcaaatgccaggaggtccaagttgaagtcagtcaaaaccctccgcattgagactggcagaagcaaggaaagaattactcctttgagttacagctatcagaaagaagaaaaccaaaatgagaatcctatatgttctcagaactgtgggatagaatgtgaagcctgcatggttttgtttaataattcttatgtcggagaagctgaagaaaaggaaaagatgaatatcttggacagaattatgatggaggagaatcaggaacagacaaatcatcttcaatccaaagaatttgtgcattatgttgcccctctgaatttggactatgaaacattttcagataatgaaaactgcgtgctgagtgttgctaaggagacagagcataatgatttcaactctgtgaattgtatctcacaagattcagtttgtgaaaatccacagaagatatcagaattattgcattttgtttcccctctggttttcaaaggcggtgacttcactgacagcaaaatcctatagctttgtgcttctgtacataaggagttgtctgggcccatcttagaaaatccattcatgcaagacatatctgatgaaaatacaaacagcaacaaagacacagggcatgaaggtttaacccttcttaacttggatgcaactctcacaagcaatgagaattttgctcaaagtaagatttttgtggctcctgaggactctgagagtgaaggcacaatcagtgagaatctatttgaaatttcgaacatgaaaggaaatgaagaaaatgaagagaacagtccatgggacaaggagaacatcaccccctttgtctcaggagatataatagtggagagaagtcagctaaggttgaagcccactaccatttcccaagaattgatggattccatttcccctcttaatttggaacataacgacttttcagatgatgaaagttccatattgagcattggagaacagatgaattcaaatgaacttatcgccaagaatcttatcccgctaacttcagttgatgcaaatatgcagaagagccatgcagggtttatgacaattgcacatctagatttcaaagatagcatccttacagacgaggaaacctcagtgctttctcctgaaaagtatgatactatatcccctgtgagacaaggaaacctgttcccagacaaagagaatgtgacaccagcctccagggatctgaagcccatcattggtaggaaggttcttggaccaagggtggataattcgctgtctgtagaatgcacttcaaaaaggaggatccatagacaagaacccaatgaattatcagcaaagtccaaagtttgtcacgcagtagatgatgatgttttctattctgataaggaaaatttgacacctatatcttcaggaggcattaaagcaaggagatgtcttccaaagagcctcacagtggatgctgaccaagatcaagaggccttctactctgacaaagagaacttgacgccagtatcttctgcttctcggaaaacaaaggatttgtctgaaaaccgtgcacgaatggaaagtactatcacaaagaaaagggtggttgataggctccccttccagacactcttgtcgaattctcccttaagacacactagttcacttgatagtacccaggttaatcctagagcagttgatgtggcaatgaagttggagggtgaactgaataatgttccacacaaaggacaagagtctgaaaagaccaaagaaggaatgaaagtctggaccatggtaactgatatggaatgtcttcttgatgatgaatctaggaagtccatcatgctgctaagaggcttaaaaggaactcaattggtcataccaatgattgtgatcagggagcttgagtgcttgaaaaagcgggagagattgttcagaatgttatcaaaggccacctccatgctccaatggatcaatgagtgcatggaaaaggagagctggtggatccatgttcagagttcaaccgagatgctgccagtagcaccaactccacctgcaacccctacagcgctatgcaacaatggagaaagagaaatctctgccggcaccttcaatccgatagccttgttctccccgagaagcttctcagatatcgtctccccgaaaacagaagatcgcgttcttgactgcgccctccttttcaacaaactaaaaggaaaccagaacatcgtcatcctgtccaacagcgtcacgcttaagatcaaagctatggcagagggattcccttgcgagggagcaaaggaattcagggagaccctggtgaacccgtgctccagcaggttcatgtgggcggccagcgcgccgagaggttcagcctggtcgtgcctggacgagactaccctggaggagaactactacaacagccaccatggagccaggaggaggatcccaaggcccatggagcccgccaagggcctgaagctgatcctgctgcacaattctcactatgggcaggcgacgaacttcgtcgagaatcggccattggctccaatggcctcgtggtgaactgacgatggcacgatgccattgggctcagttaggccttgtgtgcctttgtatatagatattggatttcttcttcttcttggtatgtgattagagtaacaccgctggacttgtgaggtggattttgagggcggtggctacatttctgttggtatgatttccatgcctaatgaaagtctgaaagaaactagtatgacctgtgaaagttggaacatggaatggctgttt

SEQ ID NO: 19508 - DNA, 1944 bp, Oryza sativa
  ref <308>: DATABASE ACCESSION NUMBER: AK069862
  ref <309>: DATABASE ENTRY DATE: 2001-12-06
ggtgcgtgcgtgcgtgcgaccgacctgaaaatccaaagcactcgcgtcgccgcggcctctccctccctcctccgatcgccgacgatggcgcgcgccgccgccgccaccgccgcggcgatcgctccgcatctggttccggtgattcggggcgccactccgttcgctcccgccgccgccaccgccgcggcgatctctctgcatctggttccggtgattcggggcgccactccgttctcttccgccgtcgccgctgccgccgccgccgcctccaccccggcacggtcatcctccgccctcacccagacgctctctttcccgatccaagctaccaggtccgccgccacctccaccccaccatgggcttcctccgcactcgcccagccccgctatttctccacaagagctaccaggttagcaagcaagaaaatgatatttatctgaagcaaacagtttgttcttgcatggttgttttggcacatcaagaaaatatgccgtttgctagtttgacgaagataaaaataggaggatgggaggaagcttactggaagctcaatctcagaattgaccatttgaatgctgtgatgagggatgggcaaggtatgcaagtgcatcgggaggtgctcaaggtcgtgtccggtggtgtctgtatattttttattgtggtcactattcgtcatctgaaggagacgtttgcccgtcgccgtgctggactcccctctgtgatatctgatgggcacaagtgctagtggagagggcaaaagtgactaggagaagacaaggctacgaacggaggtgcagactaaaaggcggcgtgtattgcgagtgtgaagagggactgtgaaaacaagtgctgcgggagttgtatcgaacgaatttgagaagtaacggcattagatgggttggttaccagtgtagtatttttgttgccacggtgaaaagcaagtttggaggcccgctagagatgcatatgtttgtggcattgaaaaggtttctatggcgcccaacaaattcctttgcaacatgctcgtcgttcgcagaatccctcgtagacacgttgctgatcgagcggactagtgtatccgggcatttacctgttgaggtgttgtcgccgccgccgccgctgaagaaggcgatgcgttcgtcggcggcggcggcgccgcggctggcgaatatcaacgggcctctgaccttgaatctcagtgagcagttgcagggttcctgctcatagcgctggagcatcagtgaatactaccattgaacaccccggaccatttcatgtcatacctcttggtgagtccttattggcctgcaaatgaagaattgtttgaagaattcagtaatgcattttccacgattttagaggtggaagaagagggataatttgttgaagtttgacaatgtttttcttcctgacgaagcagtcgtggaagaagagacggacgaggccggggccattgccggggtcgcggaggatggcggcgcggacgacgttgcggacgaggtcctccgccctggggcaagtatagttgtagtatccgacctgcagctgcgcctccgacaaggacaacgacgcaatggagaagaacaggatcgcccacgctatgatcaccggcgagccgtgacgacgaacaccgcgtgctgcgctgcacatctttcactgctataccgtgtgtagctttgacgatcgcagtgaaactgaccgatgcgtcggtgttgatcgatgcagtgtgtaggagtagtagtgtagtggtgcagcaaattaaagcaggagctaggcgtgacggtgatttatatacgtggatcgatggtggatgtgcgtgccggggtgaagtgattagtgacagatggagaggggagcagagttgacctggaaggtactcgtacctcggtaaactggagacgtcacgttgattacatggctttcccacccgttgccgcgacccc

SEQ ID NO: 19509 - DNA, 1049 bp, Oryza sativa
  ref <308>: DATABASE ACCESSION NUMBER: AK069863
  ref <309>: DATABASE ENTRY DATE: 2001-12-06
ggtcacgcacacagcagttgagctctttttccactacgcactagtagtagcactctggtattctcccatggcgactgcgaccgaggaggttgccgctgcggctgctgccgccggcgaggcgccgccgccgccgccgccagcggtggtagaggaggcgaaggaggctttggaggcaccgaagccggaggaggcgccgaaggctgaggagggggaggagaagaaggcggagggtgagaaggagaaggagaaggcgaagaaggagaggaaaccgagggcgaggaagccccgatcggcggggccacaccacccgccctacttcgagatgatcaaggaggcgatcatggcgctggacgggaacggcaaggcgggatcgagcccgtacgcgatcgccaagtacatgggggagcagcacatgggggttctcccggcgaactaccggaaggtgctcgccgtgcagctgcggaacttcgccgccaagggccggctcgtgaaggtgaaggcctcgttcaagctgtcggctgccgaggagaagaaggcgacggcggcgaaggcggccaggtccaaggcggccaagggcgtcgtcggcggcgccaagaggaagaggaccccgcgcccctccgccgccgccgccaagaagcccgcgtcgtcggcggaggcgaagaaggcggttccccccgcccgcccagcccgcgccaagagggcgaggaaggccgcccccgcgaagccgatgcagccgcccaaatccatccgctccgccatctccaagaaggccaacaaggccagcgcctgatcatcgccgccgtctcgccgcccgtcgccgccgcgcgctgtatccctgtatagcctaggtgttgtcgcttacctagtagtagttcgccatcgtcgtctcgtctgcttcgatcgatcgagcgctctgtgtccggtgtgtgtgttgcgttgtagataaggtttgggtttctttttgcaagggaggaagaagctactgtagcatatcgccaagaagctgtagtaataagatgatctggcgctcgcagctttgccttatgacc

SEQ ID NO: 19510 - DNA, 3515 bp, Oryza sativa
  ref <308>: DATABASE ACCESSION NUMBER: AK069864
  ref <309>: DATABASE ENTRY DATE: 2001-12-06
gatccgagtcgccaaaccgcggttcggttcgccgcgaccgcgcgaccccctttccttcgcccccttctccccctctcttctctcctctctcttcgcaccgctccttcccccctcctcgagctgctggtatctccaccgcgaggagaggcggatgagcgacgccatcctcccgggtgctttccgcctcgcggagggggcgtgcctcccacgcctcgctcgatccgatgaagctgctggggggcgcgcgatgcggagcccgtggcggtgggggggattttttttggtttgttcagctgcctgcttcgagctcgcaacattgcggccaggtgctggaaaggtgatgcctcatattctcgttacttgttaggtgtaaggccagcaggcagcagctctgttcaggacaccactttctactatatggctgcctttcatagtgtaaagccacgacatggaagcctggaagaatttaatgagtgttcgttagatatcttattattcatttcaagattgtcatctttcatcccaccctctttatgctgcacttgaatgggtgcgttcggaagctctactcgtttagtataatcttcaagtgataatagatcattcctatcccttttttgcgatgctgcttgttcatctgcttactgttagccatttctgcatttgcatatatcctgatagcaatattctagaggaaatgtaacgcccagaagcctagttttgtcactgacatatattctcatattgatccatcattacgtacgttttgttgacttgtgttatatttctaacttaaaagcttggcaaaaatacttgattgtgcatgcagaattgagcgtgctgaacaattctgagaaaggattgcttccaaggaggatagattaacatcatatcactggtcagaaagacaagattccatgaaggttcacacaggcctcaggtgctactccccactctcccctcagtatttacatttcacacattatgtacagtcatccaacagttgccatgcgcccaaatttgcctgcaccgccaacagatgatcctatctcatccttgcacctccctgcagcgctcacatccattctgctaccaccattgccacctccaccaccacgaccctttcctctgcgtggactagcacacttcctgcagatgaacttctcagggacatcatcaaaatcactaatccctgaacacctggtgtgttgccaaactccacaaacatcacatgcaagcatcctctcgccatcatcgtccttggctccacaggtgcagtcgaccgtccagttctccaaccccctttccatcctgaattgcacaattcttcggttatccccagtgcaccttcctcttaccctcacgagctggcttgagccaagcacatgcttcacgagggttgtgtcactaaaatttgggaagtcagggagctgttcaacctggtagctttggaacatgaggtatgtttcttgaaaggcccttgtagcctgtattttcagttcagcaagggtagcacttgctggtaaaagcactagttccaccggtggtgcagtgtagtcttttgggtgatcaagaagttcaatggaacacctcacagaaagtaggaatgggttcaaaggagcccgtggggtgtgctgatcgtaatgtttgatgaactgcttgcagtcgagaatctttgctgctgcactgtgtgatgatgcacctataacctctggctgtgaagccaacatggtttctgggttcagcaaagcgttatagaggaacttcagatcgtgcagaagatgatcaacagaaggcccaaacgcagccgcatcaactgactggttggagttatcttccagcctgcttgtcagcagatataggaggagggtcgtgatagtttataacaaagttagccaaataggagcaacattctgaacatagggctcacctgtattcaattgcactcgtctcagcattgcagcggacagctatgaaatggccatcgtccatcagttttccacccagtcctcgaagagaatagtcaagtagctcctgtgaatcaacagccttcgatgcagctccccgaagtgcacgccatgatacccactgtccaggctgaacaacccgtaggaccttgagcattgcagtttctgcccgatcaatatcttcctttgtccacttgcagagcacattagatgcaacttctttgtgttcatcagttgtgggttttgatgtctcgttcttcttgcgtgcttgatgaagcaggtgcattatgaaccggaagaggtcccgaacagtcacaagctggcgatcagagagtgcccagtacagagcaatcgtgttctgcagaggggtccgaatgggctggcgatgtgagaagtacaacgcgagttgtataccggaaagcgtatccactgcctcttggtaagtatctgaggttagtgcaaagctaccagcgccaaacttgtatccccattcaccataccaaggatggccacttgtgatggcatgcagaagcctgtattccattccatgcttcttggatatgtccatgacagttactttcctgcagtgaggttagtgaaattttcagggttatggcatgctgaataaccctctttttgtaggaacgacacatgaaccaaaacatatcgatcaatttatacctcacatgtagcaccttgcacaagcgatcccagaaactcattatgtcacggcccgtgagacatcttgagccaccttcacggccatttaccctcagaaggtggccataaccatttgcatgcaccacagcgtgcagcaggtgggtgttgtcgtccagatgcatgtacccgcactcctccagctcctcgccatccatatcaaagttgcataggaggcatctggaaaacattgcatccaaagttagcacgaaccacaattagcatagggcagcatcattcgatcaccaaatctctcacaagtttaatctttgcatctaggcacgataagaacaactcgacaactacaccacgatatgaaataaactaggcacattatcatccttccgcccgaaaccaatcgtggtgttacagttgactatatttatcttctctgaaactaacggtgcttgttcttcccaccttgattctccagcgactgtgggagtcccgcagcggaggcagcagctgtggcgcttgccgcacacctggttgttgtcgttctcgatgatgaaatggtaccgcttcccacagaccgggtgaccactccatcctgcaaccaaacaaatggcatcgcgcaagattacatcactgcttctgtaggattgaatttttttcttctcttttgcaaaaggattgtgacagcaatcaaatgtggaaattgtacatcaaaagcaacaggccaacaatacttgcataggctaacagtcacagaagggggcgagaagattcaagagaaattgctgttggaaacagacacggcgtcatttgcccctttcaccccgttatttcccaaaaaaaaattcacaacatttattctgtaacatttttcgg

SEQ ID NO: 19511 - DNA, 1329 bp, Oryza sativa
  ref <308>: DATABASE ACCESSION NUMBER: AK069865
  ref <309>: DATABASE ENTRY DATE: 2001-12-06
gcacgagctcgcgagcggagattttcccccacgatttttgctgttcatccgtgtgggggaggagagattccgcgtcgattggtggtcggatcggagcgaggagaagcccccgtgttcttggctttttttcccccgatcgaatccggtggaaagcgagcaataaaaaccacttcttttctttttcgtttctggttttctttttcttgttgggtttctcttcctcctgctcgagtttgatctcttgattcgtgaggagtgtggcgaagatgagcgcgagtttcctcgagatccagccttcggagctctcattcccctttgaactactgaagcagagctcatgctccatgcaactcaccaataagaccgaccattatgttgcatttaaggtcaaaacaaccaacccaaagcaatactgtgtgcgccctaatattggcgtcgtattgccggggtctacatgtgatgttacagtgacgatgcaagcacagagggaggcacctccggatatgcagtgcaaggataagttccttgttcaaagtgttgcagctgagaatggtgcaacaactcaagatattagtgcagaaatgttcaataaggtggcaggaaaggttgttgaggaattcagctacgtgtagtctatgtgccaacgactacatcctccgcaaatgcctgaagactctgaacaaggaagttctgctcggccatttgcacaagaaaatggtatccataattcaacaatgccacaacctgtttttagatcatctgctgaaccaacaaaggagaggcccacagagccatcgtccatgatctccaaactaaatgaggagaatagggttgctattcagcaaaaccagaagttacgacatgagctggagctcctacggaaagaaagcagcaaaagcagtggcggtttctccctcaccttcttggccatcgttggtcttctcggcatcatcgtgggctacatcctcaagaagacatagaagaggtagaggttcccaacaaaagttatactcccaggaaaggatacccctcatattggtatgccgcgcatcgtgtttttttccctcctaaaaggagcacctgtcctaacttgtaacaacaatactcctcctagatgccatggtttgtgtacattatggtggttttacgcttcgctgcggttttttttttttttttacattgactaggcttgatttttaagagttttaactggtgcaactgtttgacattctccataatcttttattctttctttctgatcaatttatcatcatactgttaaactttaaatttctcttccagtcacattggcaggcagtgcttgatctc

SEQ ID NO: 19512 - DNA, 1097 bp, Oryza sativa
  ref <308>: DATABASE ACCESSION NUMBER: AK069866
  ref <309>: DATABASE ENTRY DATE: 2001-12-06
gaagccgctcgccgggttcgaggccgtgctcctggcgctgtacgcgcacgccgcggcgcagcggggctccggggaggccgagaccgtgtcgctgccgaacctggccaaccccagcgtgtaccacgacgcgaaggtgccgcccaagaccaaggccgccgagctcgacgtcgccgtgctctcccccgctctggagccccacggcaccatgcgcgccacgcgccgcgcccggattgtcggcgccgtgctggagctctaccacggcaagctcgccatcatgccgctctcctccaagatggaattctgcgagttctgcgtcgcctggaccgggaaccgcagcaagctggacgacaagccgcgcgtcgcggctgcctccgagcctgccgccgccgaggagaagttgcggagggtgccattgccatgggagctgttccagccggtgctgcggatcgtggcacactgcctgctgggcccgacgaactccgacgagctgaagacgcaggccacccgcgccgcggagtgcatgtactggagagccgcggagaccatggacgcgcgctcggtgctcgccaccaggagcctcgtccggctgtcccagatgacggaggagccgatccctgagccgtccttctccggcgccgtcgagacgaacatggcggagctggaggccatgagggctaacatccttagcaacaagaactgaactgaactgaacgcagttgaattagtcgtcaggattcaggaatttgatcagacactcacactgcaacacgaattacaagttaagttacaacgcacactgcaagcctgcaaaagttagcagtgttggcgcttttgttagtcaggtacctagcacaagtcttctctctaatgtgagaaattgagagattgatcagtagatggtgtacaggtctcttctctctgatgtgagaaaccgagagattgatcggtagatgtctagatgttgtgttattgtgttactggccacagaatattcagtctggatgtttctttgatcacaaaatattcagtctggatgtttaacagacaagtattcatttggtttcatgaatggaagtactattgcattttgatggagt

SEQ ID NO: 19513 - DNA, 1521 bp, Oryza sativa
  ref <308>: DATABASE ACCESSION NUMBER: AK069867
  ref <309>: DATABASE ENTRY DATE: 2001-12-06
gaagcatcatcaccaagtaaaaagagaaaaagaacccataaatttgaagaattttagcttcattcaagaactcgatcgaggagggccaagaaaggtgtgagaccttgatttggtcgccatgtcgagccccatgcatgttcgcaaggcgatccacttcgtctccatgaaggccaagctccagagcttcggcggcctccgcctcctcctcgtcggctgcctcgccgcgctgctgctgctgttcgccgtcaggacgctgtcgttcacgacgtcgtcggcgacggcgacggcggcgagggaggcggcggaggcgggctgcgggaagctcccggcggcggtggcgcaggcgatggtgcactacgcgacggcgaacgtgacgccgcagcagacggcggcggagatcggggtgtcgctgcgggtgctgcagctgcgggcgccgtgcaacttcctggtgttcggcctgggcctcgacagcgccatgtgggcggcgctcaaccacggcggccgcaccgtgttcctcgaggaggacgcgtcctggatcgcctccgtcaaagcgggccacccggggctcgagtcctaccacgtcgcctacgacacccgcgtcaccgacgccgatgagctcatcgccctccgccacgagccggcctgcacgtcccagccggacctcgccgccgccgccgccgcgtcgtgccgcctcgccctccgcgggctcccgccggtgttccacgaggtggagtgggacctcatcatggtggacgcgccgacggggtggacgccggagtcgccggggaggatgggggcgatctacaccgcgggcatggcggcgcgcgccaggacgcccggggcgggcgccaccgaggtgttcgtccacgacgtcgaccgccacgtcgaggacaccttctccaaggcgttcctctgcgacggctacctcgtcgagcaggtggggcgcatccgccgcttcgtcatccccagccaccgcgacaaggacggcacgccgttctgcccttgatgagagatgagcttcgccttcgccttcgccgcgcacatggacaccgtgatgacaccattgccatcgtcgtcttcttcatcttcttcatcttcttcttcacatatgacaccaccattgctgccgtcatcgtcttcttgaattcacatgtcttttgtgatgatcaaggataagtaggatgatgagtgcacctttgggatcatgcaccaatggaggcggtggcgcgatgcgtgtgagccgtcggatcgagaacggacggttcggatcggaccgtggagatattgttattatatatagtttcttttttttttcaaatgcagctttttctttgttgttttttttatggacggtgggtgagatggatatgcaggcgaattataattcttggctatttttcatagattatcgttgtgtttctttttaattcataattgagatatcatcttcagtgggtgactgatgagtggtgccatttgagattcctatctactgaagcaataatgctaagatagaaactt

SEQ ID NO: 19514 - DNA, 1730 bp, Oryza sativa
  ref <308>: DATABASE ACCESSION NUMBER: AK069868
  ref <309>: DATABASE ENTRY DATE: 2001-12-06
gtcacacacacacattcaattcacatacaaaaactaagctagctaagctaagctaagcgagattatcacagtagctagctagctagctgaattaattagcatgggattcacggtgacgaggacgagcaggtcgctggtggcgccgtcgtcgccgacgccggcggagacgctgccgctgtcggtgatcgaccgcgtggcggggctgcgccacctggtgcggtcgctgcacgtcttcgaggccggcggccgcaacggcggcggcgagccggcgagggtggtgatcagggaggcgctggggaaggcgctggtggagtaccacccgttcgccgggaggttcgtggagggcgacggcggcggcgaggtggcggtggcgtgcaccggcgagggggcgtggttcgtggaggcgacggcggcgtgcagcctggaggaggtgaagctgctggaccacccgatggtgatccccaaggaggagctcctgccggagccggcgcccgacgtccagccgctcgacatccctctcatgatgcaggtgacggagttcacgtgtggcgggttcgtggtggggctcatctcggtgcacaccatcgccgacggcctcggcgccggccagttcatcaacgccgtcgcggactacgcgcgcggcctcgccaagccgcgggtgtcgccggtgtgggcgcgcgacgccatcccggacccgcccaggatgccggcgccgccaccgcggctggagctgctcgacctccgctacttcaccgtcgacctcagcccggaccacatcgccaaggtcaagtccgccttcttcgagtccaccggccaccgctgctccgccttcgacgtctgcgtcgccaagacatggcaggcccgcacccgcgccctcgtcgccgccgccgccgccgccggagacgacgaccaggagcgccgcaccgtgcgcgtctgcttcttcgccaacacgcgccacctgatgctcaagggggacggcgcggcggcggcggcgacggggttctacggcaactgcttctacccggtggcggcggtggcgagcggcggcgaggtggccggcgccgacatcgtcgacgtggtgcgcatcgtccgggacgcgaaggcgaggctcgccgccgacgtggcgcggtgggcggtgggcgggttcgaggaggacccctacgagctgaccttcacctacgactccctcttcgtctccgactggacgcggctcggcttcctagacgccgactatggctggggcacgccgtcgcacgtcgtgccgttctcctaccacccgttcatggccgtcgccgtcatcggcgcgccgccggcgcccaagctcggcgcgcgcgtcatgaccatgtgcgtcgaggaggcgcacttgccggagttcagggaccagatgaacgccttcgccgccgccaactagctacacatgcttatactatcatatcatgcacactagttaattatattaattacagtaattataatccttattagtattaattaatcatcaagagggacagtgcaattaattaagcattgtctcatgcaactctgatcgatcgatcgatcggtgtgtgtacgtaattcggctggttaataatggatttgcaacttccttcccccgcagtagacatatctagttaattgcgttgtgtaagagaaattatttttccttctaatatattgacttgtaattgtgttgcgcgttcacgaaaaataatggatttgcaagtagtatt

SEQ ID NO: 19515 - DNA, 970 bp, Oryza sativa
  ref <308>: DATABASE ACCESSION NUMBER: AK069869
  ref <309>: DATABASE ENTRY DATE: 2001-12-06
gatagggcatctcatatgttgatccatctgcctcctgctatgctagaaaatgctatctgcatgcattcctgggcatgaacccatgagtgaattccttttgattaagtttagaagcatccaggaaaaacggaatatagatggtccaagatcgccgccaaattaccagggagaacagacaacgagatcaagaaccattggaacacgcacatcaagaagaagctcatcaagatgggcatcgacccagccacacatcagcctctgcccaacaccaaggtggttagccaaacaagaacctccacgctgtccactgccacaaccgaatcagccaagtcaaatggtatggcatatccgttcgatcccgagggaggctgcagcagggacatgtcagtgcccacagactcgatggagcagtcaagcaggaacaccagcagtcatggcctggacccattggtgaactggctgttggaggcagagcttccagctgacgagccatggctaaattttactagcagcaatgaagatgacttcagtggcatcgttaagcagtcagcatgggatggaagcacaacagactggctgcttgactaccaagacttcagcatggacgattcgagcttgattgatggtgcaagggttcagaattcagatggattgaacttttagactgaaggggcatacaaattgtgcatggctggtaggtgcagaagattgtgaaaagagagcaaggtgcactgtgtcccaagctgtggatgataacaagaccagttctcccaggtgccttgacagacacaagcacaagatatattcagaacatagaatagtgatgttccacccttaaaaccaagggctttgtgtttatagaacctatatttctcatagatgaaaggttgtagaactagaaacccttatagacacgtttgcatgtatacatgcttctgttcagaaatatgagaggtcatctccattctcc

SEQ ID NO: 19516 - DNA, 1079 bp, Oryza sativa
  ref <308>: DATABASE ACCESSION NUMBER: AK069870
  ref <309>: DATABASE ENTRY DATE: 2001-12-06
ggaccgagactcctccatttcagcggcgcacgcggagagcacgcgacgcgagttcgtcgacgaacaaggctagtgcagtagttgttgctgcggagatggcggcgaacctggaggacgtgccgtcgatggagctgatgacggagctgctccgccgcatgaagtgcagctccaagcccgacaagcgcgtcatcctcgtcggtccacctggctgcggaaagggaacacagtcaccgctgattaaggatgaattttgcttgtgccatttagccactggtgatatgttgagggctgcagtggctgctaaaactccacttgggattaaggctaaagaagctatggacaagggagagcttgtttctgatgacttggttgttgggattattgatgaagccatgaagaaaacttcatgccagaaaggttttatccttgatggtttccctagaactgttgttcaagcacagaagcttgatgaaatgttggccaaacaaggtactaagattgacaaggttctaaattttgcaattgatgatgcaatactggaagaacgaattaccggtcgttggatccacccatcaagtggtagatcttatcatacaaaatttgctcctcctaagactcctggacttgatgatgttactggagaacccttaattcaaaggaaagatgacacagctgcagtattgaagtcaaggcttgaagccttccacgtacaaactaagcctgtgattgactactacaccaagaagggcatagtcgcaaatctgcatgccgaaaaaccaccaaaggaagtgactgttgaggtccagaaagccctatcataaactgccagttcttcagcctataaacatgacatgtgccgaaaaccccttacactgggttttctagatgtttaaactgctgccaacaccatgtggttcattttgatttgctgtatggcgcaattgctccattttatcacagttttcgcttcacagtctgaaatttgtcaaaataatttgttggaatgaggaaagaagttttgtataccaacaccgatataattacatcaagtcaatcttgacagggtattccttctgttc

SEQ ID NO: 19517 - DNA, 841 bp, Oryza sativa
  ref <308>: DATABASE ACCESSION NUMBER: AK069871
  ref <309>: DATABASE ENTRY DATE: 2001-12-06
ggggtgcatcgatggtccagaagaggggtgtcgccggcgtgagccttgccgccggatccagtgtatccggcgccacctccccccccccgacgtccctcctgccatggtccggtagctccggcatgcagtgcgtccgtgctatcttactccagctcctcgaggtcccgcaatgcccagatctaggggagacgagagtgggacgaacgacgatggtaagcggggctgcagagcccttcctctcgcagctttcctgttgtcggacgacgtccacgacgaaggcgaatttgctgggggccgattgatccccaccacaacatctttgctggttcctagcggttcaagagctgctatagccgttgaccttggtggttccgagcagaggatggctgcctggcaatctggaagctgctctccatccgccgcccgcccctacaacccgagatgcaggccttgtgcgattgagatgcttgatttggatctgctgctttatgcctttttaggcttgatctttgcatctgtttgggatgatccaagaaaccgtttggtcgttttggccagcagaaaatttccggcagctgagggaagaagcgatctgcatcctgtgcttgtgatgagagggacatgttcatctgaagcatctgcatcttaccatctgttatctatgttttgtattttgagtttttttttaccaaggtcgtctcttttgtttcgtagcagacaatggtgaagacgcacctgtagtagttcttcatatttttctgttcttaaggtcttcgtcaactagtatttcatttcatgtttccgtgatatgaaacgtggagttcctcctataccttgactt

SEQ ID NO: 19518 - DNA, 1323 bp, Oryza sativa
  ref <308>: DATABASE ACCESSION NUMBER: AK069872
  ref <309>: DATABASE ENTRY DATE: 2001-12-06
gctcttccccgccgccgccgccgatgtcgccggcaccgcaggccgcttcgccggcggaggatcggcggggcgggagggcaccggtccccccctacgtgaaggcggcggcggggtcggtcggcggcgtgatggaggcgtgctgcctgcagccgatcgacgtcatcaagacgcggctgcagctagaccgctcgggggcgtaccggggcatcgcgcactgcggcaccaccgtcgtgcgctccgagggcgtgcgcgcgctctggaaggggctcacgcccttcgccacccacctcacgctcaagtacgcgctccgcctcggctccaacgccgtgctgcagtccgcgttcaaggaccccggcacgggcaaggtctccgcgcacggccgcctcgcctccgggttcggcgccggcgtcctcgaggccctcctcatcgtcacccccttcgaggtggttaaaatcaggttgcagcaacaaaaaggtctaagccctgacctgctgagatataaggggccaatacattgtgctaggacgattgttactgaggagggtctttttggcctgtgggctggagcattaccaaccgtcatgcgtaatggcacaaaccaagccgcaatgttcactgccaagaatacatttgatattgttctctggaagaagcatgaaggagatgggaaggttctccagccatggcagtcaatgatttcaggttttcttgcaggaactgcaggtccgatctgcactggacccttcgatgtcgtgaagactagactgatggcccaggggagaactggtgacatcaagtacaagggtatggtccacgcgatacgcacaatatacactgaagagggtctcagagccctttggaaaggtttgcttccgaggcttatgaggattccacctggtcaggctataatgtgggcggtggctgatcaggtgatgggcctctatgagagatcatatctgcagccggctcatatgtaatccccgtacttaagtgatgaactcaaatttgttcagttcatcactttggatcggtggtagagggacaaggcgtcaaaaactcaaaatcgttgatcggaaaagtatctgttcaattacctagacattagattgttcatagccaagagttgagtactggccggagcaatgaactgatgtattctaagcaatcaataatggtgaaacgccctattggattttgatacaagtgtgctgatgaccgcaatgtatgtaatggagtagtaaattgcaatagcgtagacctgcctgttttgcttctgtgatcaactgttcttttagatgcagaatgctcaactgttcatgtgcg

SEQ ID NO: 19519 - DNA, 1057 bp, Oryza sativa
  ref <308>: DATABASE ACCESSION NUMBER: AK069873
  ref <309>: DATABASE ENTRY DATE: 2001-12-06
gatggggatcggggagataaggatagggcgccggccgccgggaaagggcggctaaggggtatggggagcggcgtcattggtgagggagcgggagcgagagcgggatagggaacgggagcgtgagaggcaaaaggaccgagagagggagaagaaagattatgattccaagcatgagaggtatgatgatggtggtgctaagaagaatggctccaaggcaagtaggggagaggaggatggttactcatacaagagagatacagagatcaatgcatctgcaacaaaagagaagtacaataacaccgagaaggaccttgatagacatagccgaagaaaagatgtttctgaagataaagataagtggcctgctgaaaatagagatggtgatgatagaaaaacactttccagatatgatcatagtaaagttaggagctctaaggagcaaaggtttgatgatgataaatataaagaaaagtacaaggatgattatgaaagggataaaagacagcaagatgacaagtgtctggatgagcggttgacccgtgatcatgaaagtgatagagctgattataagagttctaaagacggacacagaacttccgagagccactacagaaaggatgtaattcaagaaccagatcattatgatgattatggtagtaggtacaaggaaagtagagggagaaaaaggcctcctgaggaaaatgatgaccaatatgatttgaagcctccaagtgcacgggagcaacgtggcagtgctgataagtcttctgggagtgggcgacttgatgccctggttgagagaatgaggtctgaccatagacatccagaaaatgtcgattctagtccgaataaagtccatccaagaagttcacctggcccaaatacttatcatgacaaagatcaaaattggcacggatctaaattgacagatcatgctaagagagaaataccatatgacgagagaaatattcgaccaaggacttcttctgggagagaacggacacctgcttctagactgcgtgatagggatgcagacaaccggccttcagaaaggctg

SEQ ID NO: 19520 - DNA, 908 bp, Oryza sativa
  ref <308>: DATABASE ACCESSION NUMBER: AK099116
  ref <309>: DATABASE ENTRY DATE: 2002-08-28
gctctttccccaatctcgcgcgacgcggcggaaccctagcccccaccgcgattcgctcgccggagagggagagggagggaagggaggctaggggaccccctcgccggcggcggagatggaggtgaagctgtggaacgacaagcgggagcgggagctcctggagagcctcgccgacctgtacgccatcatcaaggcgaaggagaagctggagcgcgcctacgtccgcgacctcgtctccgccgccgactacgaggccgagtgcctcaagctcatctcccagttcaactccctctcctcctcgctcgccggcgtcgtcaccatcccccggttcgtcgaggcctaccgcctcgactgccccgccgccctcaaccgcctcgttcagtccggcgtccccgccaccgtcgagctccgcgccgcggcgtcctcgtccgcgccggcctcctccgcggcgtccgcggccgccatcgcccagtgcgtccagagctttattaccgccatggatgccgtcaagctcaacatgctcgccaacgaccaggtccgccccttgctccacgacctctcgacctccatggggaagctgggccccgtcctgccgccggacttcgaagggaaggtcaaggtgagcgagtggctcgccaagctaaataagatgggggccggggatgagctcaccgagcaacaggcaaggcagctcaacttcgatctggattcggcgtacagtgcgttcatggcatcactgcccagcaccggcctatgagcaagcctcatcctggttctgagttggtttcttctttttatttttctcatgtgtttttctatggatcaccgctgcagtgttatagccttataggtatgtgtaacttgaattgtgctatattatttgtcaataatagtgccaattttgtggt

SEQ ID NO: 19521 - DNA, 1230 bp, Oryza sativa
  ref <308>: DATABASE ACCESSION NUMBER: AK069874
  ref <309>: DATABASE ENTRY DATE: 2001-12-06
ggcgcgtcgagaaagggaagagagtgggtgagaccgtgagagagggggatggagatggaggcgtccgccgccgagggcggagccgcggcggcggcgcggacgctgcggtgggcggggcgcgcggggcacctcgggggattcccgcgcgccgcggtgatcgccgccgtcggggcggtcgccaaggcgtacgcgtcgctgctcaacaccaccaccgtccacaacgccgatgccctcctccgcctcgtctcctcgcggccccccggcacgccgctcctcaccgtcagcaaccacatgtcaacgatggatgacccacttatgtggggattcaagggttttccaactacagatgccaaacttcaaagatgggtgttgacagcagaggacatctgcttcaggaatgtgttcatgtcttacatatttcgacttgggaaatgtgtgccgatcacacgaggtgctggaatttatcaggatcatatgactgaagcccttgaagtgcttagcactggagactgggaaaaatagctcaagatgatcagccaatcagacgtctgaagtggggaactgccaatcttatcgtccgagcaccagtaactccaattgttttgcctattgtgcattctggctttgaaaaggtcatgccagagaaatcattttttgggcgtcgaccgccagtgcctctttggaacaaggagatacatatcatcgttggagagccagtggagtttgatctgccaagcttgaagcaggcagcaagaacagtacctcaggattcatcttttgaaaggaagggttggccaagcatcatgccagacggactagatgaagcggctcagagatggctttaccagaagatatcagataagatccaatcagttatggagacattgcggaagagacttctcgacctgaagcaacattgatatttggctgtttacttgcaatccaaggaggcacctcctttttttgaacaataccttcttgaaatggtagaatatatagcttcattgaacagtttcagatgatgcaaagacgattgagagtaggcagtggacgctacatctgttgaggtgaaaatttgagacgacggtgagagatagaactcagcatgttagattacgaggcatttctttttcagtaggtcaagaatatttgtcaagcgcctacttttctttttattgtttggaatggtttgccatgtttacgaggcatgaataaagtcatcgcctattc

SEQ ID NO: 19522 - DNA, 1258 bp, Oryza sativa
  ref <308>: DATABASE ACCESSION NUMBER: AK099117
  ref <309>: DATABASE ENTRY DATE: 2002-08-28
ttgaggaaaaaggtggaaaaccaccgcccacgcgggacgcgccgccgccgccgctcgccgccgcaccctcacgcgcagaggaggagcccccccgccggagcacctccacctgtttactctgagtgacatgtccccctcgccgctgctcgcccggccgccggcgccgtcgagcccgagcacgtacccgtccctcccgcctcgccggtgcgccccggctgtagcttccgcggcgctccgcgtggctccagccaccgcctcccgagccccattctccaggctggtgaccaagcggaatttcgctgcgtctgatattagagaagactactccactccgattgacgtcgttgccgatgtgaaaaccgagaagattgtggtgttgggagggagtggattcgttggctctgctatctgcaaagctgctgtctctaagggtattgaggttgtgagcctcagcaggtcagggagaccatcttactctgatccttgggttgatcaagttacttggctagcaggagatgttttctatgcaagatgggatgaagtgttagttggtgccactgctgttgtgtctacccttggaggattcggtaatgaagaacagatgaaaaggataaacggtgaggcaaatgtaacagcagtagatgctgcaaaagaatttggaatccccaaattcattttaatttctgttcatgattacaatcttccatcctttcttcttaactcgggttacttcactggtaagagaaaggctgaatctgaagtcctctccaaatacccaacctcaggtgttgtactgaggcctggtttcatttatggtaaaaggaaagtagatggttttgagataccactcgatgttgtaggacaaccattagaaaagctactttcctctgttgaaaatttcacaaaaccgctgagttcattgccagcttctgacttactccttgcacccccagtgagtgtggatgatgttgcctatgctgtgatcaatggagttatagatgacagcttctttggtgtcttcacgattgagcaaatcaaggaagccgcggcgaaagtaagagtgtaaactgggagtctttattgccaagatggaagattcaaacatgcggctccttattaagagatatccctgttctgtcttgcactcttgcagtcttagatcatacattcaatggttaaagttaaattcaaaactttgtacagtgtatgaatgtggtgcttgttccctccaagcagagaggaagaatgggctttgatg

SEQ ID NO: 19523 - DNA, 1472 bp, Oryza sativa
  ref <308>: DATABASE ACCESSION NUMBER: AK069875
  ref <309>: DATABASE ENTRY DATE: 2001-12-06
gattctcctcactatttggtgcagcgacccccacccacccatcaattccttcttccttcgtctcctcctcttctccctgcacactcgttgctagctagctcacccataaataccacgccattggccacctccaatctccaagctagttctcactcacacatccctctcctccctccgccgccgccgccgccggagctaaggaagacgacgacgcataggtagataatcgtcggcggccatggctaaggaggcgttcgtgaacgggttcctgagcgtgttcatgcacgtggggctaacgctggtgctgctcgtctacctccccatcgccttcgcctgccgcgccctgggcaggctgctcgtcaggcccttcgtctccggcgaggacctccgcggcaaggtcgtgctcgtcaccggcgcctcctccggcatcggcgagcatctagtgtacgagtacgcgaagaagggggcgtgcgtggcgctgacggcgaggacggagatcgccctgcgcgcagtggcgaagacggcgcgcgacctcggcgcgccggacgtgctcgtcgtgccggcggacatcaccaaggtcgacgacgccaagcgcgccgtcgaggaggccgtcgcccacttcggcaaattgaatcacctggtggccaacgcagggatctggtccagttgcttcttcgaagaaattaccaacataaccgccttccacaacgtgattgatctcaacttctggggcgccgtgtacccgacctacttcgcgttgccgtacctgaaagccagccgtggcaacatcgtcgtcacctcctctgtcgccggcagggtcccgacggccaggatgagcttctacaacgcgagtaagggcgcggtgatcaggttctacgaaaccctaagggctgagctgggctcacatgtccgtgtcaccattctcaccccgggctatgtcgtctccaacctcaccatgggcaaaggcatccagaaggacggccatgtcggcattgacgaggaggctcgcgacatcaatgtggggccgctgccggtggggaagacggagacgctggcgaaggtggtggtggcggcggtgcggcggggcgactactacgtgacatggcccgggtggtactggccgttccacatggtgatgtgcacggcgccggagctcgtcgactggttctcccggaccttctacgtctccaagtccagcgaccacgatggcgacgccctcagcaagaagatcctcgaggccgtcggcggcaagaagttcctctaccccaagaccatccgcagccatgccatcgccgctagctaatataatgctcatatatcacactgattgatcgatccatccaagctatagttgcaacctacctatatatatataaactttttttatacatgatgatatcatgatcttttgataatgatgattggtttgttttagcataagaaatacttcagttaaagaggattgggagatg

SEQ ID NO: 19524 - DNA, 1993 bp, Oryza sativa
  ref <308>: DATABASE ACCESSION NUMBER: AK069876
  ref <309>: DATABASE ENTRY DATE: 2001-12-06
gatgtggagtggacaaggaaatgggcattgacttccacgcccaccttgttgcctccgctgcggcgtcgttgcctcgcctcccccaccaatcggatcggcgcgtcgcctataaaatttcctcccaactcctaactgcccactccgatttgacgccatctgctcgtctgcctcctccccgatttcctctcctctctctctctccctctctccatccctcccggcgtccaatctgttctgcttctcgctgcgcccccggaattgtggtgaggttttgtgagggtgtgggggaggaggaggatggcggaggaggtgtatgtcgcgtcgatcgaccagggcacgacgagcacgcggttcatcgtctacgaccgccacgccaagcccgtcgcgtcgcatcagctcgagttcaagcagcactacccggaggctggatgggttgagcatgatcctatggagattatggagagtgtgaagatatgcatggcgaaggcacctgacaaagctgcagctgatggtcataatatggatgttggactgaaggccattggtattacaaatcagagggaaaccactgttatgtggagcaaatccacaggccttcctctatacaatgccattgtatggatggatgctcgcacaagccccatttgcaggagattggaaagtgatctttctggtggtagaacccactttgtcgagacatgtggattgccaatcagtacctatttcagtgctttgaaggtgttatggttgatcgaaaatgtggatgccgtcaagaatgcagtccgagctggtgatgccttatttggcacaattgacacctggttaatctggaacctcacaggaggcattggcgggacagatcgtgatggaaataaagtatttgggcaccatgtcacagactgctccaatgcatctcgcacaatgcttatgaacctgaaggcacttgactgggacaaaccaacacttgagacgttaggaattcctgctgagatattgcccaaaattatcagtaactcggagagaattggtgtggttgccaatgggtttcccttggcgggcgtccctattgctgggtgcctaggagaccagcatgctgcaatgcttgggcagctgtgccagaaaggtgaagccaaaagcacctacggaactggtgccttcattcttctcaacacaggggaggagcctacccaatcctcccatggtcttcttagcacgattgcttataagcttggcccaagcgcacccactaattatgctctagaaggctccatcgcaattgctggtgccgcagttcagtggttgagagacagccttggaatcattagcacagcagctgatattgaaaagttggctgatactgtgcaggattcaggtggaatatactttgttccagcattcaatgggttgtttgcaccatggtggagggatgatgcaagaggcatatgtataggaatcacacggttcactaacaaggggcacattgctcgagcagtgctcgagagtatgtgctttcaggtgaatgatgtcctcagctccatgcacaaggatgctggggaggcaggagaagtgaagagtgcagaaggggagttcctgctgcgcgttgatggtggtgctactgtcaacaatcttctcatgcagatccaggctgatttattgggtagccctgttgtcagacctgctgacatcgagacaactgcccttggagctgcgtatgcagctggattagctgttggagtctggtcgaaggaacaaattttcgctggtttgcacaaggagaacaccagagtcttccgcccgaaattggatgaggcccacaggaggaagagagcagactcctggtacaaggccgtttcaagatcatttgatttggctgacctttctctttagaatgacgagggatttgtgaattacttctggattgtataaggtgcttagcacttgttatgtccatgaataagttggtcaatggaacatccttcaaaagaattagttg

SEQ ID NO: 19525 - DNA, 768 bp, Oryza sativa
  ref <308>: DATABASE ACCESSION NUMBER: AK069877
  ref <309>: DATABASE ENTRY DATE: 2001-12-06
ttggggcgagaagccaagaaatcatctctccatccattgctcgcagatggacaagatgatgcggagccagggcggcggcggtgtcgccggcgagtaccagtactactaccatggcggcaccggcgccggcggcctcgtcgaccaggagatggccgtggcggcgccggcgacgtccgacgacgacggagtggtgctcctcatggagcttcttgatggcgaggaggagatgggggacgactactcgccgtcgccggcggcaacgaccgacggcgacggcgacgccgatcagctgagccgcgtgatccggtcgctcgaggccgagatcggcggtggcggcgccaccggggcggtggcggcggcgacggcgacgagggacagcgacgagagcatggccgccgccgggccggcgagcgacgacgacggcgcagcagcagctgggatcagacggctggaggacatgttttccgacgacctcgacggctacggcggcggggcgttcgggtacggctggccgccggagttggcgttgccggcggcggcgagctggtgcgtgtacgacgacgagcatttgtactatggagatggctccattgatgagcaagtgtacagccccttgtgggagcaataaatatgaataaatcgatgaattgttgtagaaattagggaaataggttgatgtgcatagagtaaattatgaaaatccgtggatatatatcacagtgttagcatttctccagaaaaaattgaaaaaaaaatatttgtaccaat

SEQ ID NO: 19526 - DNA, 1646 bp, Oryza sativa
  ref <308>: DATABASE ACCESSION NUMBER: AK069878
  ref <309>: DATABASE ENTRY DATE: 2001-12-06
gacgcgcatcgctccgatcagccggaggtcgccgtcgctgggaccgccggtatccactccccgccgctagatccgatccactccccgccgccggtagccggggcggcggcagggatggcgtgttcgctgttgctgaccatcctccccgaggagcttgtggtggagatcctaatccgcctcaccgacctcgccgacctcgcccgcgccgcctccgcctgcaagcccctccgccgcctcatcacctcccgcgccttcctcgcccgcctccacgcgctccacgccaagcccctcctcggactcctcctgctggagagagaccgctgcggcttcctccccgccgctaccgccgtcgccgccgccgtcgcccgcgcgtccgacttcgccttctccttcctccccgaccacgccgccgggtggcgcctccgcgacgtccgccacggcctcgccctcctatcatcatcatcatcgtcatcatacctctcccccctcggcgaccgcggcttcttccccgacgtcgtcgtctgcgaccccatgcgccggcgacacgtgcgggttccccctatccccgacgacctcacggccggcgtccggcggatcgccgtcgagcacttcgactacctgctcgctcccgccggccgagacggctcgtcgttccgggtggtgtgcaggcccaagctgccgaagcagtgcgacgtcaccgtcttcgtcttctcctcaggcgccgcgttctggcgagccgccgtgctggacgcctgcgccgccaccgagaagttgttcctcccccaatccgtgcacggctacgtctactggcggacgcattcctccggcacattgctcatgctggacactcgcgacatggatttcttctttgttaacattcagaccaacaagtgtgtcattggggaggcagaggaagtaggcaggcttgcggtgttcaacaccattgttgatgttggtgtccacaaggtggagatcctctccaaggcaattaggggcggtgccgacgaaccgtggcggcacgacaggactatcccattgctccctggttacaaatggagggctgcaagaatggctgaggggtacttactcctacatgggattgtaggtaacaactcctggtctactcctggtattcagctacagcatttcacactggacctcaagacgcttaagcttgagagtctgtgtgactcgatatcccgaggaaggcatcatcatcctcaattcgacttgtacagaagcttcccgccaccattatcgctttcaagcatatgacaataacttgccaagggggactgagcaacttcggttgtcaagctgtatctgatgccttaaggaggatgccatggaagaggaagaccagctgctatactgccgttgttggtatcatatttatgtactaccgtactagctagttcgatcagctgttccatttgaattccacagtggtttaacttctgaagccatgctactctttttttgcccttctgctgcattctggaactaaacagagtagtcggtctgcaaagcaaggcattcaagctccccagccactgatgtaggatgcacttcagtgtatgctcgttgttgttaagttcatagttatccttaatctgatgtcatcagtataaacatgtttttccatc

SEQ ID NO: 19527 - DNA, 1663 bp, Oryza sativa
  ref <308>: DATABASE ACCESSION NUMBER: AK069879
  ref <309>: DATABASE ENTRY DATE: 2001-12-06
tgaggagcaaaaattccggtggaaacacgtccgtcgcccgtgacgaggtggaaacccaaaacctcgtcggcggcttccccaatcccctccctccgccgccgccgtctcggtctcgccggataaggaggaggaggagaggagatcgccggcgagtccctcccgaatgaacatactcgagaggatacgcggaggcggcgacagggcggccgtgggggaggggccgcgggagccggagccatgggtggagatttcggagtccatctctcggctctgcagcttcgacgccggcagagtctctgtaaaagttatccaagattcgagaccaatacatgataagatgatcgattctttcttgaacaaattttttccatcaggctatccatacagtgtgaatgagggttacctaacttacaccaaattccgagcgctccagcatttttctagtgctatgctgcatgtgctatcaacccagtctttgttgttcgctgcaggtttgcgacctacccctgcacaagcaactgctgtaagttggattctaaaagatggaatgcagcacgcaggaaagctcatatgtagtggcatgggggcaagaatggattcagagccaaagagttggaggatacttgctgatgttctctatgattttggtactgccttagaagtcatttcacctttgtgcccacaactttttcttgaagtagcaggcttcggaaactttgcaaagggaatggctgttgttgcagcaagagcgacaaggctaccaatctattcttcttttgccaaggaaggtaaccttagtgacttatttgctaaaggggaagccatctcaacacttttcaatgtcatgggaataggtgctggcattggattagcatctacggtgtgctcaacaactcaagggaagttaattgcaggcccattgctttctgttgtacatatatatggagttgtgcaagagatgagggcaactcctgtaaacacacttaatccgcaaagaacagcaatgattgttgctgattttatcaagagtggaaaggtttccagcccagctgagctaagatatcgagaagatcttctttttcctaaccgattaatagaagaagcaggaagtgtgaaaattggacaaccagtccgcagagttcttagcccacagcgtatcgaacagctgaaagcaactttctcaaaggagaaatttttgcttagtcgaaaagacaacagtgcatacatggttcttgagcagagtgcaacgggagaagatgcactgaggggatggctagttgctgcctttgcttcagaaatggaaagatcaggtgttggttcaggtgatacagttctaaatgtagcctacgagaggatggagaatgtgttccccatgtttgtggcagaagttaagagtagaggctggtacacagatcaatttttagacggaaatcggagtcgaattgcatatgcaaatcccatcagcggtagtgctttatgacaacaattttcggagttgaagagatgagcagataacttatttttcactttgcattgtttgtaaaacatttgttttaatgaaataggcccatcgtgtcttgagtatagacatggtaaatgtatcactgaatcgagtgaatgctttctgacggccagaatttaaatcgatagcaactgctagttc

SEQ ID NO: 19528 - DNA, 1579 bp, Oryza sativa
  ref <308>: DATABASE ACCESSION NUMBER: AK069880
  ref <309>: DATABASE ENTRY DATE: 2001-12-06
gagatgagatgaagcccaccaccggcaccgccgccgccgccgccgtcgatcgccgctggcttctccccctcgccatcggctccgccctctccctcctcctcctcgtcctcctcaccaccttccccctccccttccccttcccctcctccgccgcctcccgccctcccaaccccaccctcttcgtcgagcacaagctcgccccctccccgccatccaccgctaccccccctcgcttcgcctacctcatctccggctccgcgggcgacgccgccgcgctccgccgcgtcctcctcgcgctctaccaccccaggaacctctacatcctccacctcgatgccgaggcgccagactccgaccgggccaacctcgccgccgacctcgccgaccaccctgtcatcgccgccgccgccaacgtccacgtcatccaacgggccaacctcgtcacctaccgtggccccaccatggtcgccaacaccctccacgccgccgccgccttcctctacaccaaccaacacccgcacttggagtgggactggttcatcaacctctccgcctccgactacccgctcctcacgcaggatgatctgatccatgtgttctccaagctgcctcgcggtctcaacttcatcgaccacaccagcaacattgggtggaaggagtatcagagggccaagccggtcatcattgaccctggcctctacatgaagaagaaggccgatgtcttctggatcccgcagcgccggagtgtccccactgccttcaagctcttcaccgggtctgcttggatggccctgtctaagccgtttgtcgaatactgcatatggggctgggacaaccttccaaggactgtactcatgtactacgccaatttcatctcttcaccagaaggctacttccacactgtggtctgcaatgctgaggagtttaaaaataccacggtgaaccatgacctgcattacatatcatgggacaaccctccgaagcagcatccgcactacctcacaattgaagacttggacaggatggttgctagcgatgcaccatttgctcggaagtttcatgcagatgacccggttctagacaagatagatgcggagatcctgttgcgtggcccagacatgctcactcctggaggatggtgtggagggacacgagaaaatggaagtgacccttgctcagtcatcggcaataccactcaccttcagcctggtcgaggagctgtacggctgcagcggctcatgacgtcgctcctgtcagaggagaagtttcacccaaggcagtgcaagtgatgtgtttctgactgaagaaggctctgtggatggagagtgctcctggtgatatatggctgttctgacccatatttcaccgttttgtcgggcagcttcctttttttttgaggtttttttttgagggaggcagcttccattttaacctgtgcaatataagttttaggagcacgccactacatcgatcagtttgttgtatgctgatattgtgtcatcccttagtacaaacacgagatgaatgtatcatccacggtctgaagtgaaaattgaatggaaaattaaagttggtgacc

SEQ ID NO: 19529 - DNA, 1289 bp, Oryza sativa
  ref <308>: DATABASE ACCESSION NUMBER: AK069881
  ref <309>: DATABASE ENTRY DATE: 2001-12-06
tttccatccgagttatctctctctctttcttctctctccaccatgaccggccaccaccattgccaccggccgatctcctcttccacagccctacatcccaaaaccttgcgccattagctcggcctcgatgaggtgattccattttttcccctttcccctctccctctaccttgagataaaccgccaccgccacctcccaaattggccgagccaagctcttgccgtcgccgttccggcctcctcgcttgtttccttcgctggccgactggttccctggatgcgcgtcgctcgggaacatatttttccgccgacgtcgcagcctctcgaccaccggagcaccggcgcccctcctctccctctcctctgtgttcggctggaagaagaagcagaaggagagaggatacgggaggaagaagaagagaaaaagaaaagaaaagaatctccctgacagagtctattttattctggatggcaacctgtggtatttcgagcatcggataatcaggttgcctatctcggatttatttgcattggagcaaggacggaagaaaggtggaagagaggggttgctaaagataagatgcaggacatccagctcgcgcgctgttcttcgcagcaccatggctcggaggcggcggtgacggcgagaggtgattctgcaggtggcttggagatgtgcccggctctgtatctcgctgcctccaaagggcgagccgaggaggtcatggcgctccttcttcagccacggcatggtggtgttgcgcagggacatcttgatcaagtcaatgacgtcgtcctctcggcggtgatggcgagggcaaccggctcgttcgccacttcatcacaaattcacaattgacgacacccactgcggcaactccatgcatggtttcgtttcggcaagaaacttaattaccggtaaggagattgaggttgaggatgatgacacggaggctgtacacatcggtcttgtcactcatcttcttgaactgcacattatgccatcagaaaatgttagtggcactatcagtatcatgtatatagatgcagattctcagtttatatagatgaaacccaagaaatgtagcgtgaatttggagcaaatttgttcagagagacagaaaggtactagataatattagtaaagcattgttgttaaacaaaagtctgccatttactttatccgctgttcacatattggccagaatatgatatgttaatttgttcaactgaacttgacagtcttttactgaaatatacaggcccggccctggggcagggcgagcagt

SEQ ID NO: 19530 - DNA, 2796 bp, Oryza sativa
  ref <308>: DATABASE ACCESSION NUMBER: AK069882
  ref <309>: DATABASE ENTRY DATE: 2001-12-06
gaatcaccacccaaacgaacgaacgaacgaccgaccagagagaggagatctccaccctcctcaacaccgcacatcccgccgcgttggaggctgcagctgcagggccaccgtctcctccgccgcacgttcgccagccgttggcattcggccggcgagccggcgagccggctggcatgggtggatcggccgtgaattgcgccgtgcagaacgtgtccctggacacgctcttcctcatcgtcatccagggcgccgccgtcatcgtgctcggcaagttcatccacctctccctccggcgccacaacctgcccagcgccatctcccagatcgtcgccggtgtcgccgtcagcagcctgggcctgcacgacatggtcgtccacgtcgaggtccagaacgtggaggacacctacgggtggtacgtctccgaggcccgcatcttctacatgttctacgtcggcctcgacgccgacctcgccgcgctctggaacgacgcgcaccgctgcaccgtcgtcacgtacgccagcgtcgccacctgcctgctcctcgccgccttcgtctccggcggcatctacggcagcatgatgcacaccccggtcaggtcccccgagctgctctccgccgtgctcatgctcacgctggccaacaccgcctccgtcgacgtctccaggatggccgccgagctcgacctcacggccacgggcggcggccggctcgccgtctccacggcgatcgccaccaacatcatctgcatcgtcggggagggggtgttctcgtgcatgaagctggcgtcgagcaggacgccggggtacagcgcgtcggagcggctggggatgggcgtgctcgcgctgctcaaggtgggcgtcaccatggcgctgctccggccggtggcagcgtacatgaaccggcgcaacgccgggcgccaccgcatcgggaactgggagctggtgctgctgctcgtcgccgtctccttcgtcggcaacttcccggagcacgccgggttcgacggggtgccggcgagcctcctgctggggctggcgttcccgagggaagggcccgtggcgaggagcgtcatggacgccatcgcctacccgctccacgccctggcgctgcccttctacttcggcgccatgggcatgaggatcaacttcggcgccatgtccggcgccatcgtcgtgcccgccgtcctcctcacgctgctcggcctcttcggcaagtgcgctggcaccatggccgccgccaggtacctcaagatgccgctcgccgacgccatccgcctcggcgtcctgctcaacatcaagggccacgtcaacatgatcgacatgagcttcgctagctcggaagggatatgggcggagcaggcgctcatggcgatggtcgtcggcagcatcataagcaccgtcgtcgccgggccggtgttcgccgtgctgttccggaaggagaaggaggcgtacgcgtgcagcgaccaggcgctcgaacacatggcgccggacaaggagttgcgcatgctcgcctgcgtgcacggcgcgcgcggcgcgccggcgatgctcagcctcctcgagctcctggcgacgacgccccgcgcgcagcccaccatccacgtcctccacctgttcgacgccagccgcaagcacgtcggcccgaagcgctaccaccagcgggtccaggacagcgacaagcacattgaccgccgcatcgacgacgccacgcaggtgaactgggcagtcgacgtgttcacctccgtcaccggcctcgccatccgccagttcgacgtcggcgaccgcggcgccgccatgaagaacgcgaagaacatccaccgccgcttggaggaagtccgcgccgggctcctgttgttgccgtaccacaaggagcagcgctacgacggcaagatggtctgccggcgagacgaccgctgcgagctcaaccgcaaggtgctcgagctcgccccgtgcaccgtcggcgtcttcgccgaccgcccgttctggaggggcggcgccagcttccggctgccgaccaagatatcaacgagcgaggagacgacggcggcgaggaaccaaggcgaccagaaggcggggacccagatcgccgccgtcttcctcggcggccccgacgaccgggaggcggtggcgttcgcgtgccgcctcgccaagaacgacggcgccatcaggctgaccgtcatccgcctcgtgctaggcgtcgccaccaacgatgaccaccgcatcccgacgacgagcgccgccaatcacatcggcatctacgacgacgacgacgaggacggcggcgaggaggaggtgctgtccgtggtggttcaagacgacgaccccgacgagcggtgcgtgtcggagctgcggcgcgagtacgtggcgaaggagcgcgcggagtacgtggagagggcggtgagcggggcggtggacgtggcggcggcgttgcgcgcgacggcgggggcgttcgcgctcgtggtggtggggcgcggcgggcggcagccgccggagctggaggtggggctcgaggggtgggtccagatgatcgagtacccggaggtgggcccggtcggggagatgctcgcgtcggaggagtcgctggagatgggctccgtgctcgtcgtgcagcagaggacggcgccgccgccgccgtttcatctcaacattccgccggcgatctgacacgctacatacaaaacgtacaaaaaaaattaaatcagtgtaaggattattatagctgtgtatatttagagcgtggtagaagactagatcaaattttgtattcagtaaaattcggggaaaaagaaacgacgaaatagtt

SEQ ID NO: 19531 - DNA, 3100 bp, Oryza sativa
  ref <308>: DATABASE ACCESSION NUMBER: AK069883
  ref <309>: DATABASE ENTRY DATE: 2001-12-06
gtcctcctgtctctgcctctgctcggctagtctagtgtactactctatcttctcctcctctctttctcctacccaaatccatccacccaacatcttttttctcagccgtcgtctcatctcgccttcgtagcgttgcgtcgcgccgcgtctaccctttccaggtaacctggataagacggtggaggagctatcaaatgtttatagaggagctcaagaaaccaatagaaagctctatcaggaactgttcccaattcagattatgcaaatgtgtggatggttactgaaggttgttcgttgggaaaacttaaattgtgtgcacatggaagctcatggcaatcgtcgcagcagtccaacataccttgttatgctgtggatgatttcggtagctagcctattgataacatgtcgtggcagtatccagaagcaagttctctttccagggttcactgccgcgcaaatggattacattgataacgatgggatatttctgctttctaatggctctgtctttggctttggttttgtcacgagcaatgtctcagacaacacgttctacattcttgcagtggttcacatggccactactaccacagtctggtctgccaatcctaactctcctgtcacccattcagatgacttttttttcgacaaggatggcaatgccttcctgcagtcaggaggaggctccaatgtatgggctgccaatatctccgggaaagggactgccacctctatgcaactactggactctggcaatcttgtagtgcttgggaaagatgcctcttctcctctctggcaaagtttcagccatccgacagacactcttctgtctggtcagaatttcatcgaagggatgacgctgatgagcaagtccaacacagtacagaacatgacctatacacttcagatcaaatctgggaacatgatgttatacgccggcttcgagacacctcaaccatactggtctgcacagcaggatagcaggataattgtcaacaagaacggtgacagcatctactctgcaaacctcagttcagcttcttggtccttctatgatcaatcagggtcccttctatcacaacttgtcatcgcgcaagaaaatgccaatgccacattgtctgctgtccttggtagtgatggattgatagctttctatatgctgcagggtggaaatggcaagagtaaattctcgatcacagttccggcagactcttgtgacatgccagcctactgcagtccttacaccatttgcagtagtgggacaggttgccaatgccctttggccctcggctcgtttgcaaactgcaatcctggtgttacatcagcatgcaaatcgaacgaggagtttccgctggttcaactggatagtggagttggatatgtaggcactaacttcttccctcctgcggctaagacgaaccttacgggttgtaagagtgcctgtacaggcaactgctcttgtgttgctgtgttctttgatcaatcttcaggcaattgtttccttttcaaccagatcggaagcttgcagcacaaaggtgggaatacaactcgtttcgcatcttttatcaaggtatcaagcagaggaaaaggtgggagtgatagtggcagtgggaagcacaataccattattattgtcattatgctcggaactttggctatcataggcgtccttatttatattggtttctggatctacaagaggaagaggcatcctccaccatcacaagacgacgctggttcatcggaagatgatggatttctgcaaacaatatccggagcaccagtgcggttcacttacagggagctccaggatgcgacaagcaacttctgtaacaagcttggtcagggagggtttggatctgtgtatcttggtacactcccagacggcagtcgtattgctgtgaagaagctggagggcataggccaaggaaagaaagagttccgctctgaggtaacgatcattggtagtatccaccacatccatcttgtcaaactccgaggcttttgtactgagggaccacacaggcttcttgcctacgagtacatggcgaatgggtcgctggataagtggattttccattctaaagaagatgatcacctgctcgactgggatacaaggtttaacattgcgcttggaacggcaaagggattggcatacctccatcaggactgcgattcgaagattgtacactgtgacattaagcctgagaatgttctacttgacgacaacttcatcgcaaaggtatctgattttggccttgccaagttgatgaccagggagcagagccatgttttcactacgctcagaggcacgcgcgggtaccttgcacctgagtggctcaccaactatgccatctcagagaagagtgatgtgtacagctacggcatggttttgcttgagataatcggtgggaggaagagctacgatccctcggagatctccgagaaggctcacttcccttcctttgcattcaagaagctggaggaaggcgatctccaggacatcttcgacgccaagctgaagtacaatgacaaggatgggcgggtcgagaccgcgatcaaggtcgcgctctggtgcatccaggatgatttctaccagagaccatccatgtcaaaggttgtgcagatgctcgaaggcgtctgcgaggtgctccagccaccggtgtcgtcgcagatcgggtacaggctctacgcaaacgccttcaaatcgagcagcgaggaggggacttcatcagggatgtcggactacaacagtgatgctctgctttcagctgtgaggctttctggtcccagatgatgtgaagaatcccatgtacagtgccttgtctagttaggttgcaaagtgtgcaaattttgctgtagtttccagtgttttggtgatcatttgcttcacactattgtacatatcttcttggtcatttctggtggtagtttatacatatcttgctgattatttatggtggtagtttatcggtgccattctttttttgttgcccttttgcttatacataaggtctccaaaacctttgacaattaccttttgtagttatgtcttggtaaaaataataggaaatgcaatgatacaaaagcctttttcatc

SEQ ID NO: 19532 - DNA, 1717 bp, Oryza sativa
  ref <308>: DATABASE ACCESSION NUMBER: AK069884
  ref <309>: DATABASE ENTRY DATE: 2001-12-06
gagtttctctctcttctcttctcttctctctctcagtctcactctcccaatccgcctcggcccgagcgcgcgcgcgctttccccccctcgccgccggcgacgagctcgaggcggcggtgcgctcgcctacctccggagggcggagcggggggatggagcccatgagcgtggacggcggcgggggatgcggcggcctggacacgcagatcgagcagctgatgcagtgtcgcccgctcgccgagcaggaggttaaagcactgtgcgagaaggccaaggagatattgatggaggaaagcaatgttcagcctgtcaaaagcccagtaacgatttgtggtgatattcacggacaattccatgatcttgtagaactttttcggatcggtgggaagtgcccagatactaattatttatttatgggggattatgtggatcgtggctattactctgttgagactgttactcttttggtagcgctgaaggtgcgtcacccacatcggattacaatccttcgcggaaatcacgagagccggcagatcacacaggtttatggattctacgacgaatgtttacgaaagtatggcaatgcaaatgtatggaagatattcacggatttatttgactattttccactgacagcactggtggaatctgaaattttctgcctgcatggtggtttatctccatcaattgagaaccttgatagtgtgcgtagcttagatcgtgtccaagaggttccgcatgagggaccaatgtgtgatcttctatggtctgatccagatgaccgctgtggttggggcatatctcctcgtggtgctggctacacttttgggcaggatatatccgagcaattcaatcacaccaacaatctcaaacttgtagctcgggctcatcaactagttatggaaggatataattgggctcatgaacaaaaagttgttactatattcagtgctccaaattattgttaccgatgtgggaatatggcatccattttggaagttgatgactgcaacagccatacttttattcagttcgaaccagctcctaggagaggtgagcctgacgtgacacggaggacgcccgattatttcctttgagttaatggtgctaccatttgtcaccttgtactgcgaatttgcgatagtcaaatgctggtcagtgatactttgctggactgtgaaacctgcgcataggccaaccaacaataacaagggaacatcagatcccttcgtaaaacttgaccctccattggtcaatgcaagagatgctgctatcctgaaacaaagtgtcatgctcatgcagcgatgcctgagtttttcaggtgataaaaaaggcccatccatcctcaccctctcctttttaggcatttttacagaggaaatctagtggcaagactgaacttctatttgtattttgtagcgtaagcttgtatcgatagtcttgtaatttgtatcatcaatggcaaggcaacctaatcatctttcggtgtagtattccgaattttgggggtggttaccctgatgtgctacagtgcagtgttccatggcacctttttctctagttggatgtttttcttcgcatgtatctgacattctggttttcaaatttcgcactactctactagtactccatactgttctagacatgtacttgatcaaagccaaaaacttggtcaaccgatgttctctctgctaaattatattctgaattatgtgcc

SEQ ID NO: 19533 - DNA, 1334 bp, Oryza sativa
  misc_feature (723)..(723): "n"=any one base of a, t, c, or g
  misc_feature (747)..(747): "n"=any one base of a, t, c, or g
  ref <308>: DATABASE ACCESSION NUMBER: AK069885
  ref <309>: DATABASE ENTRY DATE: 2001-12-06
gtatttttcttgtttattctgatcgtccacaagtaatgccattggtattgcagtagcaatgattgatttatgccactgaatattttttttgccgaactttctattatcactgagggaattgcttgttttagatctaaatagttttccgtataaagacatgttaaacttcttgatcatcatgcatttatgatgcatcctttcccaatagtttctttccctcctctattttacttgctactgtatatgtgaagctctggacgtgtctgagatgtatctttattgcgctcttcatatgcgctcgtagataactaactatctagataagatatactgggcttgtattttgggatccgatcttttaaacaatgtattgtgctgtggcctttggattcatattactacttgttgtgcatttatggcaggaagaagaaggcagttcacaagactaccaccactgatgacaagaggcttcaaagcaccttgaaaagagtaggagtgaacaacattcctggtatcgaagaggtcaatatcttcaaggatgatgtggttatccaatttcagaatccaaaagtgcaagcatccattggtgcaaatacatgggtagtgagtggaacaccacagacgaagagtaagtcattgcttaagatcttgcgcactgattgttgtgtagcctcatgtttagtggttaacatgaatgaataggttgaaatatcttctcttgtntgtgttgaattacatccggcaaanaatcttgagatgaacaaaccctttaaacgcaaatttgcatctgcgtcgttgaccctatgttattcttcaatcctgcataatggtgttctcatctttggctttctaattttgacagagctgcaagatctgcttccaacaatcatcaaccagttgggacctgataacctggacaacctcaggaggcttgctgagcagttccagaagcaggtacccggtgctgaggctggtgccagcgcaggtaacgctcaggacgacgacgatgatgtccctgagcttgtccctggagagacgttcgaggaggctgcagaggagaaggagcctgaggagaagaaggaagcggaggtggaagagaagaaagagtcgtcctagttttgttcatcgccgtcgtctattattgttgtgaagggttgttggttcaatgttaccccctaccatgcctgggacgtgctctcctatggactccgacctgccttactcgtttccatgtgggccggttttgtcttgtacgaggatttggtccaatccaacggtggaattgagttttacgacagttaaattatgcttccaattcgcaaatgttttatacc

SEQ ID NO: 19534 - DNA, 1180 bp, Oryza sativa
  ref <308>: DATABASE ACCESSION NUMBER: AK069886
  ref <309>: DATABASE ENTRY DATE: 2001-12-06
gtagggagggagggaggagaggtggcatgaaggacttggtgtcgtgcttcagcgagcacgccgtccggatctctgacgtcgcgtgctccggcagcgcgaatgccggcgacggtgtcggcagcgggtgttgctgcggcgggggtcggtgatggtggcggcgcggggagggcggcggtgagcgcggtgacgagcgtgtaccggtcgcggctctcggcgtccgggaaggatttggtcatcgacgtgacatggtcgcgggcgcccgacgggccggcgctgtcggtcgccgtgcacgacgccgcggccgcgtcgaggctccgcggcggcggcggcggggccgcgggcgcggcgccgaggcacctgcacaggaggaaagggagcgggacgttcaccgccggcagctgcgtggtgggcgtgttctgggacttcgcggcggcgcggtacgcggcggggcccgagccggtgtccgggtactacgtcgccgtcgtggccgacgccgagttcgtgctcctgctcggggacatgagccgcgggtacgtggagcggctgcacggcgggataccgatcgccgggtcacggatggcgcggcggcgggagcggttcgtcgggtgcgggtgctggtccacgagggcgcggttcctggagtccggcgccgagcacgacatcgtcgtcgcgctggacggcgacgcggaggcgtgggtgaccgtcgacggccggaaggtggtgcagctccggcggctgcggtggaacttccgcggcagccacaccctcttcctcgacggcggcgcgccggtggacatgacgtgggacctccacggctggctcttccacgcggccgacccctcgccggcctcctcctgcgccgccgtcttcacgttccagacgcgcggcgcgtcggagacgaagttctggatagaggacgacggcgacggcgacgacgatctggaacaatctcagccaccggctgcgccgcgcggcccgaaacagaagctgggcggcggcggcggcggcggcgctccgtcggggcagggattctgcttactgatccgaggtttcaggggcgcatccaagatcgcttgatctgtataaatgccatgagagattcgccattctttttcacttcttcttcttgcttgcgttgcttgggattgtagtatcaaaattcgacaatgggtttggtgct

SEQ ID NO: 19535 - DNA, 1370 bp, Oryza sativa
  ref <308>: DATABASE ACCESSION NUMBER: AK069887
  ref <309>: DATABASE ENTRY DATE: 2001-12-06
gctcccattcccgccatctctgcatcttcttcttcttcctcttccttctgatcacctctcctccaagaagctttcgtttctctcatctgtcaatcatgtcggcctactgcggcaagtacaaggatgagttgatcaggaacgcggcgtacattgggacgccggggaagggcatcctcgccgccgacgagtcgacgggcacgatcgggaagcggctggcgagcatcggcgtggagaatgtcgaggagaaccgccgcgcgctccgggagctcctgttcacggcgcccggcgcgctggactgcctcagcggcgtcatcctgttcgaggagacgctctaccagagcacccgcgacgggacgccgttcgtcgacgtgctcgccgccgccggcgttctggccgggatcaaggtcgacaagggcaccgtcgagctcgccggcaccgaccgcgagacgacgacacaggggcacgacggcctcggcgagcgctgcaggcggtactacgccgccggcgcgcggttcgccaagtggcgcgccgtgctcagcatcggcagggcgtcgtccaggccgtcgcagctcgccgtcgacgccaacgcgcagggcctcgcgcggtacgccatcatctgccaggagaacgggctggtccccatcgtcgagccggagatcctcgtcgacggcgagcacggcatcgaggcttgcgccgaggtgacggagcgcgtcctcgccgcgtgctacaaggcgctgagcgaccaccacgtcctcctcgagggcaccctcctcaagcccaacatggtgacgccgggctccgacgccgccagggcgccgccggaggtggtcgccgagcacaccgtccgcgcgctcctccgcaccgtgccgccggcggtgccggccatcgtgttcctgtccggcgggcagagcgaggaggaggcgacgaggaacctgaacgccatgaaccaggtggcgagcaggggcaagaagccatggtcgctgaccttctccttcggccgcgcgctgcagcagagcacgctcaaggcgtgggccggcaaggcggagaacgtcggcaaggcgcaggcggcgctgctcgcccgctgcagggccaactcccaggcgacgctcggcgcgtacgccggcgacgccgccgccggcgagggcgtctccgagaacctccacgtcaaggactacaagtactgaggctttatgacgaattgatatttttgttttataatgtagtgtaacaataagctgcgtttgcttctatgctctcgcaatgtcgcgtatttgattttgatttttgcttggtcttgtttagcgagtgttttgttttggttctgaattttgaaatgaattcaaagtgattttgtctgctgtttaacagtg

SEQ ID NO: 19536 - DNA, 1320 bp, Oryza sativa
  ref <308>: DATABASE ACCESSION NUMBER: AK069888
  ref <309>: DATABASE ENTRY DATE: 2001-12-06
ggttcgttaatcctcgccccctctttctctctaatctccgccaaggcgatggcggattcgaaggggagcggcggcgccgccggcgacaagcccggcgccgacgcgagccccgccacgaatccggccccgccagctgccgccgtggccgtcgccgctgcggccgcggacgccggaggggacgacgacgtggccgcggccgcggaggcgcggcggccgttcacggcgctcagccaggtcgacgccgacctcgccctggcccgcgtgctccaggagcaggagcgggcgtacatgatgcttcgcatgggcggaggcgtcggcgagggcagcgattacgggagctcggatgccgggagctacgagtacgacgacgaggccgaggaggactacgaggaggagctggagcaccacctccgcgtccaccaccacgagcacgccgttggggagggtcgtggcgagggagagcgagatggggagggggctgagggaagcgagttcgaggaggaggggttcgacgaggagtatgatgaggaggaagtcgagccagagctagaccccgcggagtacgaggacgatgaggcttatgcacgagctctgcaggatgccgaggagcgcgaagtagccgcgcgacttatggctctcgcggggatcagcgattggagacctgtggagcctgtagaggagcatgcgaatgatccacaggatgcgtggcaagaggttgacccagatgagtattcttatgaggaattagttgcattgggagaagcggttggtacaggacacagaggcctctctgctgctacacttgcttctctaccttcagtaacttacaaggcagaaggtgtccaagatggcaacacagagcaatgtgttatttgtcgtgtggaatttgaggatggtgaatctttgattgcactcccctgcaagcattcataccatcctgagtgcataaaccaatggcttcaaataaataaggtttgcccgatgtgcagcgcggaagtttccacatcggacagcaaccaggcatgaccaatctttgctgccattatggggcttgatgggagcaaatagcgggcatcatatggtcgcatcttgtaatgttggggagaaggcagataaaactttcggacacatgcgagggaccagcactatgatcttttgcgttcttcagtcctctcctggcttagctccactgtactctgtttgcccgtgccgctatgctctgcattccctgtgggggcctcatggctgttgtatgatccataaatgtacaatggttatattattatattatatattgctagccattcttttactacctcg

SEQ ID NO: 19537 - DNA, 2974 bp, Oryza sativa
  ref <308>: DATABASE ACCESSION NUMBER: AK069889
  ref <309>: DATABASE ENTRY DATE: 2001-12-06
gattgaattttttttttaaaaaaaagagaggccgccccaaatggaggaggtcgccgtcgtcgccgtctccgtcgccgcccaccaactccgccgccctcctcctctccgcctccgatgccattaaccctacgcgcacgggcctcctggtcgccgcaggcctccgtgatgccgacgtggtggaagcgctccaagtcggcgttccagcgctcctccgccgtctcctccgccccggcctcgccggcgagggcctccacctcgtcgtgcgcggcgcccggccgccgcagcgccgccggcaggtgcgccgatgacgccgggggcctcctcctcgcgcggcgcaggcagctcacgcggcagcggaagctgcgccacgtcgacgacatcggcgtcgggctcgagagcctcggcctcgtcgtcgcgaactcctcgcctccccccagaggccgcgcctccacgtccgcggccgtcggccaccccgtctcgatcccgatcgcgaggtccgcgagctccgccgagttcagagccgtgcaccagccgccgccgagggccgccacggcggcgtcgcccgtgctgctcccgctgccgctgccgtctcccaagccggtggaatcggacacgtcggagccggatgttggtggcgagagggcgacgagggtgacaagccagattgttcaaaattttcctgataataataataatcttcctgacaatagttcaaagcgtactaccacctctagtcaccacaggaaggtgttccgagagaagttccaagataagagttcaactgaaactgccaactttcggttgaacattcctgctaaaagtgctccaagcagtgggttttcaagccccgtgtgcagccctcgaagattcagcaatgccgaatatacgacaccaactgctcaaggtccccaagcgtggtccgctccatctgtccgctcggtagattctatggcaacttcatctccgcggatttcacctgaaatatatacaggggttacagagcaatcaactttttctaactcattgagaagtcctattctaatgtcgaagaattccagtgcccctccatcacctctgcacccaaaattattcccagaaaataatatgtcacgtattgaaggcaatgggaatgtcagtttccacccattaccacgccctcctggagctataaactcaatgcagacaagcattgttaaccagtctgctccaaaagttgaaatgccctcagtggctggtcagtggcaaaagggaagactcctcggtagcggcacatttggctgtgtatatgaagctaccaatcggcaaactggagctctttgtgcaatgaaagaagtcaacataattcctgatgatgcgaaatctgccgagtctttgaagcagttagagcaggaaataaagttcctaagccaattcaagcacgaaaacatagtgcagtattatggaagtgacacttttgaagatcgcttctacatttacctggaatatgttcacccaggttcaattaataagtatgtcaaacaacattatggagcaatgacggaatcagttgtccgcaacttcacccgccatattcttaggggtttagcgtttttgcatggccaaaagattatgcatagggatatcaaaggagcaaacctgctagttgatgttagtggtgtagtcaaattagctgactttggaatggccaagcatttaagtactgcagcccccaatctttcactgaagggaacaccatactggatggccccagagatggttcaggctacacttaataaagatgtgggttatgatcttgctgttgatatctggagtcttggttgtaccattatcgagatgtttaatggaaaacctccctggagtgatcttgaagggcctgctgcaatgtttagagttttgcataaagacccaccaattcctgacaatttatctcatgagggcaaagattttctgcaattctgtttcaagaggaatccagcagagagaccaactgcaagtgagctgttggagcatccatttatccggaattcaagtcattacaacaaacatggttccatacattcatttgcggggattaaatccaatgataataataatggaaatggttcaagagacaaagcagcctcgaagagtgattcctgcgtgaaaggaaaaattactgtaggtgagccaaccaatgctaggccttccgaatcgtcagcttttcgattgactccactatcaatccaggaagttgcacctaacttctcctctagacccttaggtctaacctccaatcctagtccatcagccaatttagtgaacactgtatattttccgattgcaaactctcagcgtagtcctttgccaagacctaatgaaaaggaggctctgttctaaagatatcaagcatgccatggggagtgtgatttccatctcggatcatgttcatgtgcacaactttgaatgcgaactcggtcctaactgtatttatagaattaaagcagagaaagaataggaagatataagaaggaagataaatcttgtgaatcttggatgttgcgctgttatatcagctacacagcaataagataaatggtggaagacatcccagaagagacataccttgcactaacaatcatgtgatggaagacataaaagttttgcagcagccatctttaactaagttaaccatttttgtgcaatagttgcactatatgaatttgtacagcttacatgttcttgtaaaatagtgattgcctatttggacatgcgactaaatgttgctgaatgtgacggatccatgaaagcatgggatcttcattgttttgggatattctgatggcattttttttttgtaacatacaatcaggaataactgtagataagttgaaagtcccttattctaatctcatctaacaggttccactgctgtgtaatcatatttttgttgtatttttgtacaaaatggtgtgattataaatactagtatttaccc

SEQ ID NO: 19538 - DNA, 2126 bp, Oryza sativa
  ref <308>: DATABASE ACCESSION NUMBER: AK069890
  ref <309>: DATABASE ENTRY DATE: 2001-12-06
agctctctctctctctcgccaaaagctttggttgcttgctcgcttcacccaaacaaactcatcgatccgggcaaaaacacgcgcaaatcgctgtgctacacctcctcgcgttcgctcgctacagcgcaccacatccacacacacgctcccagccccagcgatcgatggagtgagacgcatcaggttgcttccggcgacggccattgccgcctccctctccctccctccgcccgcgcgccgccacacccccccatcgcttcttcctttcgtcatgcgtacaagccatccccacatcaccaccaccacctcgcctgacaacagcagcaggagcgacgctccacaaaaccaccccccaaatccctccgtcccgtagcgcctactacccccgcctcctgcattcttctccttgcttctccgtaacctcgcgctttcttggccgcttcgcccgcgacgcaacgggggggagaggccttcctccgtttccttggataggataaagctcgcggatctccgctcaatccagttcttcattctcctctcccggttctgttcttggttcttggaaagccggtggggtgcgggtggctcgtggcgatcagtgctcgctcgtttgatccatcctagttgctgagacgtttcgtttcttgatcttggtgttactttccccaaaaatccaatacaaagatccggtggaggtctgatctgtgagcgacgcctgcccggtttccttccggcaatggggaacagcagcagcagcggcagccaccggcctccccggccggcgagctcggagtcggcgctgccgcccgcggcggcggcggcggaggagctgagctcgtacgaggcggcgtgccgatcagacccggagctgcgcacgttcgacaccacgctgcagcggcgcacgagccgcgccatctcgacgctggcggtgggcgtggaggtgcgttcgctgtccctcgagtccctccgcgaggtcaccggctgcctcctcgacatgaaccaggaggtggtgcgcgtcatcctcgactgcaagaaggacatctggaagagccccgagctgttcgacctcgtcgaggactacttcgagagcagcctccacaccctcgacttctgcaccgcactcgacaagtgcctcaagcgcgcccgcgactcccagctcctcctgcacgtcgcgctccagcggttcgacgacgaggaggacaacgacgccgccgccgccggccaggaggacgccgctccctccgcccggtacgcgcgcacgctccacgagctgcgccagttcaaggcggccggggaccccttcaccgaggagttcttcagcgccttccaggccgtgtaccggcagcagctgaccatgctggagaagctgcagcagcgcaaacaccggctcgacaagaaggtcagggcgatcaaggcgtggcgccgtgtgtcgagcatcatcttcgccaccaccttcgcggccgtgctcatctgctcggtggttgccgcggccatcgctgccccaccagtcgcggcggcattggccgcagctgcttccattccggtgggatctatggggaagtgggtcgattctctactgaaagggtatcaggacgctctccgtggacagaaggaggtggtgagcgcaatgcaggtggggacgttcattgccatcaaggatttggacagtatcagggtgctcatcaaccgggtggagttggagatcagctcgatgatcgactgcgtagagttcgctgagcgagatgaggaggcggtcaagtttggggttgaggagatcaagaagaagctggaggtcttcatgaagagtgtagaggatctaggagagcaggcagatcggtgtagccgggatattcgtcgggcaaggaccgtcgtgctacagagaatcatccggcatcctagctgagaaaaaaaaggaaaaagagagaggaaggatgcaaggaatttggtgatggcgatgcacttgaaagggtctatgacctagacaagcaagcaaacgatgtgatcagtggcctaaagcaacaaataatgctgtcagacttctgtgagccatcactattactgactttatttatcacctgtcctgatctccatagtttatcaatgtgtttggcgttctgtttttcgtt

SEQ ID NO: 19539 - DNA, 2388 bp, Oryza sativa
  ref <308>: DATABASE ACCESSION NUMBER: AK069891
  ref <309>: DATABASE ENTRY DATE: 2001-12-06
ctctctgagaaagaaagaagattatatatattaacaatggccatcggagcgttcgtcgaaggaggcggcagtgggtacagcgggcgcgtgactccgttcgtggtgctgtcgtgcatcgtcgccggcagcggtggcatcctcttcggctacgacctcggcatctcaggtggggtaacgtcgatggagccgttcctgaagaagttcttcccggacgtgtaccatcagatgaagggggacaagaagaaggtgagcaactactgccgctttgacagcgagctcctcaccgtcttcacctcctccctctacatcgccggcctcgtcgccactctcgtcgcctcctccgtcaccaggcgcttcggccgccgtgcctccatactcatcggcggctccgtcttcgtcgccggctccgtcttcggcggcgccgctgtcaacatctacatgctcatcctcaacagggtcctgctcggcattggactcggcttcaccaaccagtcgatcccgctgtatctgtcggagatggcgcctccgcagcaccgtggcgccatcaacaacgggttcgagctgtgcatcagcatcggcatcctcatcgctaacctcatcaactacggcgtggacaagatcgagggcgggtgggggtggaggatctccctgtccatggccgccgtccccgcggcgttcctcaccgtgggcgcgctgttcctgccggagacgcccagcttcgtgatccagcgcagcggcgacgtggactcggctcgggcgttgctgcagcggctgcgcggcacggcggcggtgcacaaggagctggaggacctggtgatggcgagcgaggtgtccaagacgatcaggcacccgctgcggaacatgctccggcgtcggtacaggccgcagctggtgatcgcggtgctggtgcccctgttcaaccaggtgaccgggatcaacgtgataaacttctacgcgccggtgatgttccggacgatcgggctgcgggagagcgcgtcgctgatgtcggcggtggtgacgcgggtgtgcgcgacggcggcgaacgtggtggcgatggcggtggtggacaggctggggaggaggaggctgctgctggtgggaggggtgcagatgctggtgtcgcaggtgatggtgggggcgatcctggcgggcaagttcagggagcacggggaggagatggagaaggagtacgcgtacctggtgctgagcgtcatgtgcgtcttcgtcgcgggcttcgcctggtcgtgggggcccctcacctacctggtccccgccgagatctgccctctggaggtgcggtcggcggggcagagcatcgtcatcgccgtcatcttcctcctcaccttcctcatcggccagaccttcctcgccatgctctgccacctcaagttcgccaccttcttcctcttcgccgcctgcctctgcgtcatgacgctcttcgtcttcttcttcctccctgagaccaagcagctgcccatggagcagatggatcagctctggaggacgcattggttctggaagaggatcgtcggcgactccccccaacaacaagtagtcgagctacaccaccaccaccaaagatcatcatcagaataaacaaactaaatcactaaacacgccttccacctaagtatatacgcatcataccctatataatataatatgcatgtattaattaactgatgatcgactgtatgcataatgcatgtacactactactacatatatacaacagcaacagtcagccagccgcccacaataagatcagcccagctcaattgcaccttaattagttaattaagaggctgatcacaaaataattactccatatgtgcaaccatttgtggcctcacgccttgttaactctctgtaacagtattactatgcatatatataatttgcataatggaagatgtttcctctataaagttgtccgtatttaaattggttggacatcacccatatccaatcaacatgagtctaagttaactattatacaccccctctcagcctagccaacccaacccaattggctcaccccatcacacacactgtcccgcgcgcatttgtatccatctgctttttattccttttcctttttttctttgcttattagtcaacgctattttgatatataatcaacgtcactaattattaatttgtagaccgacactatcgagggagtagatctcgaccatggtatttgtagagtatgagaatcgttggtgccaaggtatacacgagattaaggtaagagagactggagacaaggacttttatataagttcagtccccttaacttacaattaatagttctacttctattggctgaagctggtgttgccttcatgtatcaatatcttactaatacaatatttgggatgacct

SEQ ID NO: 19540 - DNA, 1296 bp, Oryza sativa
  misc_feature (732)..(732): "n"=any one base of a, t, c, or g
  ref <308>: DATABASE ACCESSION NUMBER: AK069892
  ref <309>: DATABASE ENTRY DATE: 2001-12-06
gagcttaattatagccttcctcctcctcctttcctccctctcgaggcccaggtgttcgtccgtgtcctcttctccactccacacacgcacacgcacaagccaagcagcaagcagcggcgccgatgagaggaggagtagctgggcccaccgccggcgagccgccggggacggaggcggaggcggaggaggtggaggagagctcagctggggacgacgaggagctggagctcgggctcagccttggctccaagaaacagcagcagcagcagcatgcgccgtgccgaatcctgacggccagggacctgcagccggcggcggcgctgtcaccggactcctccgtgtcgtcgtcatcccccgcggcggcggcggcggcgggggggaagagggctgagggccccaccgccaccacctcgcctgggacggttgcttccggccatccacacagctttggagtggtgggatggccaccgatccgacagttcaggatgaacagcctgttcaatcaggctaaagaaaacacatctgaaaccgacaccaagaagaccgccaccaatgaatctgatgtgcagaaggacaaggaggagggcgaaaagaaggacgggttgctggatgggtgaaggtgaaacatgatggagaggtcattggaaggaaggtgggatctcatgcgcaccgctcatacaagacccttgcattagcccttgaactcatgtcacgaagccgtccattggcctntgcgcttctcataatacaaactcgctgaaactactagacaactctgccgaataccagctcacctacgaggacagggatggtgactggatgctcgttggagatgttccttgggaaatgtttgtcagctctgtgaagaggttgaggatcatgaggacatcagatgcgaatggtcttggtcagcgataccagggaattcacagaaccattgcttcaacaagaggcagatcctgagagcgtgtgacaaggaaaagagctataccgctggtgaagcttggagcgtgcttgatggttaattacttgtccagttaaaatagcagaaggctagtaagaaagagccacagggctcacccggttctgttatatttttgcctttgtggtgcctgtttttgtttgcactgtcgatctgcaagagcatatggtcgccttgctctgcttgcatgtacaagtatgtctttctagtagtttttatggtgtttgatgatgatccttgtgcctacctgattactactgactcttgcacagcctcacaaatctctatgaattagccctggagtttcattgatt

SEQ ID NO: 19541 - DNA, 1528 bp, Oryza sativa
  ref <308>: DATABASE ACCESSION NUMBER: AK069893
  ref <309>: DATABASE ENTRY DATE: 2001-12-06
gttctccctcccttgttaattcctcctcctcgtcgtcgtcaacctcccgatcgagttcccaccccagccaacgacccaaccccagcttctcctcctcctcctttcaaatcacacccttcgtcctcggaattctctgcgctgcagcaccagcatctcgcaagtcaaaccatccttatttattctggttttcttgccttgctgctgctgctgctgcggttgattttgatcttggaagaggaggaggaggaggggttgggttggtgggggtagcagcagcagcagagccgccggtgatggaggaacggcaggcggtcaacccggcctgccccaacgccgccaaccccttccaccgctgcgccgactactgccccgtccctgctcccgccgccgccaccgccaagccgcccccaccgccgccgtcttcccgaccggcgcagaacgggaccgcggcgccgcagaacgggacggccgcggcgcagaacggaatcgcggagcagaacgggagcacgcacagcgacggcgagctgcaggcgaagccgcgccgccgcgacagggccggcggatccgggggcctccccttctacgtcttcctgcgcgagggagccgacggcgacggcaagaaggtggacccgcgatgccccaacgcgcccaacccgttccacgtctgcaccgagcactgcgccgccaagatggccgaggtcagccgctcgtcggagggcgggaagtcccccatgtccctcttctcccgccactcgcgccgctcctcctcctctgaagatggcagcgtgagatcggggagcagcaagaaggtggatcctaagtgcccaaatgctggcaatccattccatgaatgcactgagcattgtgctgccaagatgaaggaggtgggtcagcagaataagactgttaagaagtcgtcctcacgcaagaaagggggaaaggagatctctgttgtgcagaactggaaggtggatccgaggtgcccaaatgcgtccaacccattccatatacgcgcccaatactgctttgatcatttgaatgaaacgggtcagaaagatacaagcaaaccagactcaaggaagggcaaagctgttgtgaaagcagagcaaacaggagaaatcaatcctgattgtgtgaatgcgtccaatccctaccacaagtgtggggaacattgtaagagaaagggtgacaggtagataaggctggcgatacaaggtttcctctccagatgatgatggtgaaaaaaaaagtatatcccgacaatagtcctgtaggtttcaatagaagctgtgtttccatcggctccgctttttattgtggctgcagcatcacaatctttgctgtattatcatgtactttctacacactttcttaccgccattcactcctataaaagagtcccatattctagatctagtagtataatttattccgtgaagattgtaaaaatagaagcgtgttgtttctttttttcccccttctttttgtaagataattgcctgcttatataagttataattttgtcacc

SEQ ID NO: 19542 - DNA, 2524 bp, Oryza sativa
  ref <308>: DATABASE ACCESSION NUMBER: AK069894
  ref <309>: DATABASE ENTRY DATE: 2001-12-06
ggcaagcaagatcctccccatgttgacatcttccctaacacgccccccaccccctcccttcgtgtggaacggtcggtccctcgatctctctccaaataccaccggtctaccaccgccgccactttctactactccgatctctctctgctcccgtcccgcctccatgcacgacaccggtctctcagcccgcgccgccggcgcctcctcctcctcctctccctacgctggcgcatcctccgccacctccgtcggcgacgacgacgacgagtccaagatccgaaaggcgaaccccgcgttcgtggccgccgcctacgcccgcctccactcttcccaccgagccgctgcctccttcctcctcctcctcgccgtcgccgccaccgccttcctcatcggccgcgcccgcccccgcgccgactgcccgccgccgcggctcgacgcgcgctttctcgctctcccggacgcggccgcggcctccgacttcggcgccctcggggtaccctggtgtaagccctcacgccgctgttgattcttgtgagatagatccggacatccggttcttttctgcgaagtaatcaccctttcgcaactaatctcctccctgtttgaaaatgattctgctcatgcagatattcctcatcgttagtgtcttagacacctaacaccataggttgtaggctagctttatgtgagcgcaatgcatattcacctgaaatcttgaattgtatttgacagaatagcttgatagcttgttcgatgagtgatgaccacattatatgtgcaaatgtattatagttatttgctcctaactgatctctgttggtttatacttgttcagatttgttcctcggtcattgttccactgctgctagatacgaatgagaacatggccatggcaatctattattctgtttcttgaacaatgactgctgctagataggagtgcgaacattgcggtggcaatctattattctgtttcttgaagtcctgtaacaattgaccatcttagttgccaccagtgtacttatatttatgtttgtagctgttggtagacatgattatgtttctctacgtagtgctgagtttttcttggggtatattttgttattatttcacaagaacctctatactggggtaatttgtttgaaatatcacttttgactgtatggaatatcattgtcctttttcttcactaaaggcagatcaaaaactggaaagatagtggagtggacttcaaaggatctacttcgtggactggaagaatttgtaccaatatatgaaacacgacctatcaagaacaacatgtatggaatgggctttgaccacagttttggcctttggtttgtggctcgctggcttaagccagatctgatgattgagagtggtgcattcaaggggcactctacatgggttttgcgtcaggccatgccaaatactaagattatatcactctcacccagacaccctgagaaatatctgaagaaggggcctgcatatgttgatgggaactgcacttatcttgctgggaaggattttattgacttcggaagtgttgattgggggaagctattgaggaatcatggcatttctgatctcagcagagtgcttgttttctttgatgatcaccaaagtgagttgaagaggttaaaacaggcttcaatagttggattccgacatatcatatttgaggacaattatgacactggtacaggcgatcattactccttaagacagatctgcgatcaggaacacatcagaggtggtggacatagctgcttttgggatagtgacgaagcaagattaaggtcgagacgaaagagtttttgggagaaagctgtggaaacagatgagctttgtggaaaggatgatgcatggtggggagttagaggttatatgcgtgacaatttcaaccatagcaacaaagccatctcatacaaagagcatttccagaacagcagacttgttgaatccgtgttggatttgtattgggagctacctccagttgctggtccatccttaacccaccaaacaagatatgacccagcccgtgcatctgatcctatcatcgaagatggtcgttttggcatgtttcaacgaattggtctagcgagattggatgcctcagttttcaatggctacactcagatgtcatatgttcagatatcaggctcaatgttgagcagagaggatgcttaaagattttattccgtagggttaatttttcttctgatactgactaaacaggttgacaggctttttctataatgtcgcaggttggcatacacacgactatattctcgtagtacagcttgtgtgactatgcaaatgttatcaaaccaatgatgagccttgctattctgaggcatatcagcaactcactggattggatttgagtgcattccattacaactaatgtgacagccttttcttttttactattaatctagacaaaccatccttacccacatatgtattgaagaacatgtatgaatcacagctttttttttaaaaaagaaaagaagtaact

SEQ ID NO: 19543 - DNA, 1285 bp, Oryza sativa
  ref <308>: DATABASE ACCESSION NUMBER: AK069895
  ref <309>: DATABASE ENTRY DATE: 2001-12-06
gtctgcaagttgggaggagggcgtcttccccgttcttccggcggcggagacctcgccggcggcgagaaatggagcggcgatcgagcgttcgcttcgcgccatccgagattgcaaggatggagaagttggttacacataaaaaggaacaagtcttggatgaaattttctgccggaagctcgcagaagaatttaattgttctccaggccgagttggaagtaaagcactacaggctgtgcaggttcaagaatggttccgtcaaaagttccctgcatcaactgttatacctccttgtttgcctactggctctgaagaaaaggctttagcctcccaagcaagtgcacgggtttctgaagaaaagcctccatcatctgaagaaaatgctttagctgttgatacaagcatttcaaatgatataggcgaggtttcgccggatttacctatagacaacatagataagcttcctgaaattgaagacatgcagttcgaggctaggtcttcaaaggattttgcttggtatgatatcgccactttcttagcatacaggaagttaagttctggtgaatttgaagtccgagtgagatttcaaggatttggggctgaagaggatgaatggatcaatgtccggaaggctatccgcctgcaatccatcccgttggaatcatcagaatgcaaactcatcagggaaggagaccttgtcctctgtttcaaggagagcaatgatgaagcattgcatttcgatgcgcatgttctggaaatccagcggaaacaacatgatataagggggtgcagatgtgtcttccttgtcgaatacgaccatgatggaacccaggagagggtgaacctgagaagattgtcccggcggccaaagcactcctgatggcttgtgtcaaactgtcaaatacacatctgcctcttgcctcttgccgtatgcgctaatgctgaactaacaggaactccgaacctagttaggggctaaactttttgcttggttcagaactcattgatgagtacagtaacccccccccccccccggtgatggtacatttcaaccctctttggcaaattccgaacctagttaggggctgttcgtggggctgcttgatggccaaattttgtgcagtaatttgggaggaaaagagggggattagtcaagactgaactgaagagcatattacctccaagaactaacaggattggactttttaaatgcgttgtgttgggtgtgagattccacatttccatggaaaattcgtaatgctcagcgttctcggcttgggtgatttt

SEQ ID NO: 19544 - DNA, 887 bp, Oryza sativa
  ref <308>: DATABASE ACCESSION NUMBER: AK069896
  ref <309>: DATABASE ENTRY DATE: 2001-12-06
ggtcgctgccactcctgcctgctagcatcgccgcccctcccgcttgctcgtgccgcctccgccacccctcccgcccgattgttcctctgatctagcctactcacgcccgtcgcccccaatggctgcaactggcgggaaaccctagcgccggccagccatcacttggtggtggctgtggcggtgatgaagccgattgtttgccccctctgatgagttgtcttttcgcttgatgaacttttatttgttacttgtgtttgttattggaattagatctgtcctgactccaaaattgttgtaagttttggttatgtcaggattgatcctggcaatgcgtttagaattgttgttaagggcgctaagtacgtagcagacctagagtatgagatgctagaaatggcagaacaaaggtttgatttgtgggttgatagatgcaagggctattctcttgccaatttgcgtgatgatatggcaagcaagataatttgggggtgagccaacaaattgcagtgtggggcttggataatgcactggtggtggatggaagatggaaactaacaaagaccttgaacatatgatgaagtccaggtgggatgtgaatatgctagaaattgggtattgaagtggttgataaagagggttatggttctattcagagtgttgtagtaaacaaatctaatgcacgttgtgggtcaagtttggttgttgccactaaaatggtgaatgcagatccatttcttgtttgtccacctgatcatgctggaaatttagaacatgcagcaaatgtgataggccagagcaagatggtgatgcctatgttttggtggatgagtgtaacaccttgaaattttgagtaaataaaattcggagaccaaaaattcctccaaagt

SEQ ID NO: 19545 - DNA, 954 bp, Oryza sativa
  ref <308>: DATABASE ACCESSION NUMBER: AK069897
  ref <309>: DATABASE ENTRY DATE: 2001-12-06
ggcggaataataacctttttttttctttttccaagcgcccttcaaacccatctcctctcccctctccctcccaattcgatgcagccgcggtagcaattcgcatcgccccgccctcctcgccgcgcggattcgctcgccgcccccgccaccgcacccccatggacgcctccgccggatccggcaatgcctccggtggcgccggcgccggcgcgtccgcgtgctgctactactccctgctcggcatccggaagaacgcgtccgccaccgacgtgcgcgccgcctaccggaggctcgccatgaagtggcacccggaccggtgcgtgagcgaccccggcgaggccaatcggcggttccagcggatccaagaggcgtactccgttctgtccgacaaggggaagcgagccatgtacgacgccgggctgttcgatcccctcgacgacgacgaccaggatttctccgatttcatgcaggagatgctggtgatgatggataacgtgaaaaacgagaagccggacacactcgaggacctgcagaagatgctgcaagacatcgtcagcggcgacggcggaagccgcggcggcggcgtcggtggccgcgtgccgtcggacggcacacggaggacgcgcgtcgcgccctacccggcgcagtcgcgcaggtgaccggcgcgccggtgtacgagacgtgcacacgcctctaagtgatgaaaagagagacaagcagaagaagagaggaagcaaacgggaaagaaaaaccaataaaatttggcagaatttgtttcccttttttttaggtcatcagatgattgactccgtttagttcgctgggttgggttgggtcgggtgtgccgttcgattccggccgcgtcacccaagaattggtgcgtgcgtggccaaagattccaatatcttgtcgacatttcgtcctgaatttcactctcttgttgatgtgttcacc

SEQ ID NO: 19546 - DNA, 1334 bp, Oryza sativa
  ref <308>: DATABASE ACCESSION NUMBER: AK069898
  ref <309>: DATABASE ENTRY DATE: 2001-12-06
ggtgcaaatcaaatcacagcaatgcatgattcgcaaaaaagcctccccacactgcctacatgacgtcagcggttcttgccctcacctctcgattcttctccactcgagcagaagaccggaatcagctcccgtaccctgtttgttacccatggaagcgaaaattcccctccttactcctcacaccatggggagattccacctcgcccacagggttgtccatgcgccgctgaccagatcgaggtgctacaataatcttcctcaagaacatgttcagctgtactactcgcagagggccacaaatggcggccttctgatcgctgaagccaccggggtctcggagactgctcaagggtatccaaacacaccgggtatatggacaaaggagcaggtggaagcttggaggacggttgtggatgcagtgcatcagaagggtggtgttttcttctgccaaatctggcatgtagggagggcatctaccaatgattatcagcccaatggacaaacaccaattccttgtacagacaagaaaatcactcctacagttctcaaagatggaactgtcgaggaattctctgccccaaggaggctaagagaagatgagatcccccaaattgttgatgatttccgaattgctgctaggaattgcattgaagcaggctttgacggagttgaaatccactgcgcatttgggtacctaattgaacagttcatgaaagatggtgtcaacgacagaactgacaagtacggaggaagcatcgcaaaccgttgccgctttgctctagaggtaatccaagcagccatcgatgagatcggatcggacagagtaggtgtccgtctctcgccatactcaaactgcctggactgttgggactcagacccagatgcacttggcctctacatgatccaagccatgagcaagctgggcgttctctactgcagcatggttgagcctgaggtggtcaaagtagacggcaaggtgcagattccttacaagctatggcacttcaggaaagtgtttgctggcactttcatcgtcactggaggatacaacagagaagaaggcaatagagcagtgtctcagggttacacagacctggtagcatatggtaaatggttcttggcaaacccggatctgcctaggcggtttgagctgaatgcgcctctgaacaagtatgacagatcgacgttctacacttctgatccagttatcgggtacaccgattacccttttctcagtcctctgtgagtattgcatttgttttaattaagcgagaaattgcaatccattcctcagagctcttgacttggaatcacaataaaattaaattgatttg

SEQ ID NO: 19547 - DNA, 1676 bp, Oryza sativa
  ref <308>: DATABASE ACCESSION NUMBER: AK069899
  ref <309>: DATABASE ENTRY DATE: 2001-12-06
ggctcctcctcacatcgccagctcgtccgcttgccccgcaccgcaaccgcggcgcggaggaggagagctctcgcgccgcgcgtgcgcgcgcgcgtgcgggcgtgcgcgggcgatcgaatccgatcgccatgaccggcgccgacgagccgtccatcacccgctggaccttcgaggacttcgaggtctgctacgaggtgcgcctcggcatccgccgcgagcccgggggagatgaagacggcgacggcgacggcggcggaggtcgcggctacgcgccgcttggatccggctccgcgggcagcacccgcccctccgcggcgcacgccaacggcggcgccgacctggccgtcttcgagcagttcgagcggctggagaggaaggtggagctgcggaatggagcaattgaagctgggcctccgcagaaatccctacttccttcttttgaatctgcagaaatgcgcaatttagctgagacattgttgagggatatcattcgtgggagtccagatgtcaaatgggaaagcattaaaggtttggagaatgcaaagcgtcttctgaaagaagcagttgtgatgcctataaaataccccaagtacttcaaaggtctgctatcaccttggaaaggtatattgctttttggtccaccaggaacaggaaagacaatgctagcaaaagctgtggctactgagtgcaaaacaaccttcttcaatatttcagcctcatcaattgtcagtaaatggcgtggtgattcggagaaactagtgaaagtcttatttgagcttgcaaggcatcatgcaccatccaccatttttctcgatgagattgatgctattattagccaacgtggtgaagctcgtagtgaacatgaagccagtcggcgattgaagactgagctattaatacagatggatgggttaactaagacagatgatctcgtttttgttctagccgccacaaatttgccatgggaactggatgcagcaatgttgcgccgtttggagaaacgtattcttgttcccttaccagagcaagaagctagacatgccatgtttgaagagctcttgccatctgttcctggcacaatgaatatcccatatgatgttcttgtggagaaaactgaaggatattcaggctctgatatacgccttgtgtgcaaggaggcggcaatgcaaccccttagaaggttaatgtcggttcttgaaggaaggcaagaagaagtgcctgaggatgagttgcctgaagttggtccagtaacgacagaagacattgagcttgcactaaggaatacacggccatctgctcatcttcatgtacatagatacgaaaaattcaatcaagactatggcagtcatgtcctcagctaaaggtgagttgcaaaagcaaaggttatttgcacaacatagattgctgaatttcctccttgaagcttgaactgttccctagtattgtggaaatcctcctgacggaatcttgccgataagacttttcatttgcacctagtatggttgatagaatgctgaattaccgctgatgtatttacaactaatgagcattctctttacacaatatttgttcctgtaccatgtatattatcatttgtttgacggataataagctatttgggtaatccttgccctttcggaatatgagagaaacattgtacatttgtactgggtacc

SEQ ID NO: 19548 - DNA, 1017 bp, Oryza sativa
  ref <308>: DATABASE ACCESSION NUMBER: AK069900
  ref <309>: DATABASE ENTRY DATE: 2001-12-06
gatctcctccaaatccatagccctcctcctctcctctgtaatggcggggaaatccggcgcacgcacgaggaagcgcgtggaggcgacggattccgccgtcctgaagcgcgcgcgcgacggcagcgccttcacccgctgcgaggcttgcggcaagagcgtctccgtggtcctcatcgacatgcacaactgcagcctcgacgacaagatccgcatcagcctagaggctcaggtggtggagcaggccgtggaggtggcagcgagcaagaagaagagcggcaagaacaacaacaacaatggcgagggggccaaaaagggcaagcgcccacccactgcctttttcctcttcatgagtgacttcaggaaggagtacaaggcggagcaccctgacaacaagagcgtctccgctgtcgccaaggaaggaggggagaggtggaaatccatgtctgacgaggacaagaagccttacttggacaaggctgcagagctcaaggccgagtaccacaatggcgagcgcagcgacgagaacaatgttggtggcaacgcaggcgagcaggaggtagatcagccacccaagaaaggcactgatgaagacgaccaagaagatgaagatggtgcagaggaagagaagaacgagctagacgacgacatctaggccaccggtccaatggatggatggatggataattccttctctttttgtaaatggcggatccatcacattgctagtatgctagtgggagcagcagtatcgattgattctggtggtggtgatcttctagtactagaactactagtgcttgcagtgtgacctgcacatcaagtgaatgaatgaatgaatgattagacgacttaattatccctctttttttggattcgattggagtgcaacttcttccccattccattctcaagggcttccttcctttgctgctctctgtctctatatgttgcttccttggtgaattgactcatgacttgtatctgatttcatcaacttaattgaaacaacaaatgctg

SEQ ID NO: 19549 - DNA, 1999 bp, Oryza sativa
  ref <308>: DATABASE ACCESSION NUMBER: AK069901
  ref <309>: DATABASE ENTRY DATE: 2001-12-06
gagatctcagcaggtcgccgcagacctctccgtcggcggcgagagggtttcgatccacccgcagcgccatggccgagctcgcggcgggaggcgaccagcgcgccgcgctgctcgcggcggccaccctcttcccgccgccgcccgacggcgcgaggttctcgtacgggacggcggggttccgcgcggagggggccgccatgggccccgcggtgtgccgcgccggggtggtggcggcgctgcggtcggccaagctgggcggcgccgccgtgggggtggtcatcacagcctcgcacaacccggtccgcgacaacggcgtcaagatcgtcgacgcggacggcgggatgctgtcgcaggactgggagccgttcgccgacgcactcgccaatgcccccaaccccgacgccctcctccagatagtgcttcagtttgcaaaagatgaggatattaaacttggtggaagccactcggcacaagtgctgctggcaagagacacgaggccaactggagagtacctccttgatgtggcggtgaagggagtaaatgcggtaataggtgcagtagcagttgacatggggatcctcaccactccacagctgcattggatggtccgaagtaaaaacaaaggactgaagtcttctgagacggattatttttcacaagttattgattcattcaggtgtttattggagttagtcccagaagataaagaagctgatgtgataaacaatagactaattgtggatggagctaatggcattggtgggttgaaacttgaagaaataaaggcaaaaatctctggattagacattcatgtgaggaattcagggaagggagaagggatacttaatgagagttgtggtgcagactttgttcagaaggagaaagttgttcctcttggctttggtcctgaagatgtcggtttcaggtgtgcaagttttgatggcgacgctgaccggcttgtttatttccgtatcgtatcctctagtgacactaggattgatctcgttgatggtgacaagatattatcactattcgtgctgtttattagagagcaattagatattatcaatggaaaagacaataaaggaaatgaagtacttcctacacgttttggtgtaattcaaacagcttatgcaaatggtgcatcaacagattttctcaagaacattggtctcgaagttgtattcactccaactggagtgaaatatcttcacaaggaagccctaaaatatgatatcggtatctactttgaagccaatggacatgggacagtgctattctcagatcattttgtctcacaactggaatctttgaccagtgagttttcttcaaaggctgcaggttcttcacaacaccaagctgctatgagattgttggccacaagtcagctaattaatcaggcagttggagatgctttaagtggaatgcttttggtggaggctgttttgcaatacaagggctggtcgtttcagaattggtgtgacctgtacactgatctgcccagtagacaattgaaggttaaagttcaagatcgaaattctattgttacaacagatgcagaaagaagggtttgccagcctaatgggctgcaggaactgatagatggggagatatcaaattactctcatgggcgatgtttcgtgcggccatctggtaccgaggatgtggtgcgtgtatatgcagaggcatcttcagaggaagcagctgattgccttgcaaaacgagtggcgcagcatgttgagcgcattcttggataatttgccttccctttttttatctcttcattttccagaagtttaaagtgttcactttagctcaattgcctgacacatttgaagaatatcaaaatccatttgtttgtaatgcaacactacatgtttattcgaaattttcagattgtacatactgtgtgtagagccatcagttattgtaccaaaaaaatagtatgaacagattgagttccaacgcttctttttttaagaaaggaagttgtccgtgc

SEQ ID NO: 19550 - DNA, 1305 bp, Oryza sativa
  misc_feature (691)..(691): "n"=any one base of a, t, c, or g
  misc_feature (705)..(705): "n"=any one base of a, t, c, or g
  ref <308>: DATABASE ACCESSION NUMBER: AK069902
  ref <309>: DATABASE ENTRY DATE: 2001-12-06
gtgagatgtctcgggttaccctgcttgcatttctctttgtaattgcatttccttttgatgtggatgctcttacaattacatcgtctaggatgcctgtgactaggaaccaatatatgcttgatctgtacaagtaacttttgccggtaacatggatttgttcctagtagttttaagatcacaaaaggcgggttatggttcatttagttgttttaagatcacaaacagcaatttatggttcactaatttttacaagaaagcgaaagaggccttatttattatgtgctgattgtatttgtactatacatcttccaaaaagattgtatttttaaagataaattaaaattggctctaattctaattttgtgatcatcgtacaggtctttttttagttctgaacattgctcaatgcagatcatctttatttctgaatattaatcatcgtcaattcggatggcatattgttttaattgccttttccgaatgtatttcaattatttcttgctgttttgattatttttatttcagattacgtaggaaatatactttcattatactaatagttataccgccttttctcgataattaatagacacattgcttagtaatattttttttgtaaaatctagaaagtgagaacaagcgcgaatttttgcaatagaaattttagtacaaggagagattctcttctgtntgttttatttggcncaggttagtgtggatgtattgccatatcaggcaaggatggcttatctgagagccgcaaggatggtgaatatgtgctgacttatgaagacaaggatggagactggatgcttgttggcgatgttccatgggagatgtttgccaactcttgtcgcagactcaggatcatgaaaggttcagatgcaattggacttgctccaagggcagttgataagtccaaaaaccgcaactagaatggtttctgccccacagtcaaaagcaagatggagatcaaatgactgtagggaattttctgaaaaccaagaagtctaacagttttaagatggagtctgccttatggtctgtactacatggtttgctattgtgaaagttaaaaaaaaaggtgtcttgttatgttagcttcgccaaatctcctagggacataaactctatttgattgtgcccaagtctttgtacgtgtgttaatgctattcgtgtaaatggtttggacaccatgtgctactgctatgattgagcacccctacctactttgcaaaatgttgtcaatgaactgtttgttcgctacataaatgttcaatgaagcttgcaaatgtattgtccatc

SEQ ID NO: 19551 - DNA, 1043 bp, Oryza sativa
  ref <308>: DATABASE ACCESSION NUMBER: AK069903
  ref <309>: DATABASE ENTRY DATE: 2001-12-06
gctacttttacgacacctccccaccccccgtctccttctccctcgtctccagatccgtgggtcgaagcagcggcggcgcccgatccacggcggtcactccctccgccatgaatcccgagtacgactaccttttcaaacttctcctcattggtgattctggtgttgggaaatcgtgcttgcttctcagatttgcggatgactcatacctggacagctatatcagcacaattggagttgattttaaaatacggacagtagagcaggatgggaagaccatcaagcttcaaatctgggatactgctggacaagaacgtttcaggacgattacaagcagctattaccggggagctcatggaataattattgtatacgatgtgacagaccaagaaagcttcaacaatgtgaagcagtggttgaatgaaattgatcgttatgcaagtgacaatgtaaacaagctccttgttgggaacaagagcgacctaactgccaacaaagttgtgtcatctgaaacagctaaggcgtttgctgatgagatgggcatccccttcatggagacaagtgccaagaacgccactaatgtggagcaggccttcatggctatggccgcatccatcaaggacaggatggctagccaaccggccgcttcaaatgcaaggccaccgaccgtgcagatccgcgggcaacctgtcaaccagaagacgtcgtgctgctcgtcctaaagataaccaagtctttccttccatgtaaaattcgacgtatgttactactgtttgctcactacaacgtatttgtgatattcatttgaacgcccttgataccatcttttctttaatcagatggttaggcagctgcaaatatatatgtaaccttgctttgttgctctttgctcacgaatcgagaggagcaagcagaaccagtgtatttgattcttttcacgcttacatttttcccatttcattgcatacaagtattctgtgttgaggtttagttagaccggacagcggactgattacaacaattttacaacttgtcacaggtgttgg

SEQ ID NO: 19552 - DNA, 2407 bp, Oryza sativa
  ref <308>: DATABASE ACCESSION NUMBER: AK069904
  ref <309>: DATABASE ENTRY DATE: 2001-12-06
ggggggggcaccaccattcgcgcgttcgggtcacctgttcgtccaatggccgccgccgccgccgccgccgccgacgccgacgccgcgggagagcgcgccgcgggcgctggactcggcagccgttcggcggccgaggagcgctccctgctccacccgtccctgttctccgcctactccgacgaggacctcgtcgagcgcgcgttcgagccggcgcagaagatcgtcgtctccatctccagcgaccccgacgaccccgacgccgacgacgagcacctctactacggcggtcacgcgccgcccttctcgtggcgcaagctgtggctcttcacggggcccgggttcctgatgagcatcgcgttcctggacccgggcaacctggagggcgacctccaggccggcgcgaccgccggagacacgctgctctggctgctcttctgggccacggccatggggctgctcgtgcagctgctcgccgcgcgcctcggggtggccacggggaagcacctcgccgagctctgccgcgacgagtacccggactggacgcgccgcgcgctctggctcatggccgaggtctccatggtcagcgccgacatccaggaggtcatcgggagcgccattgccatcaagatcctcagcaacggcttcttgcccatctgggttggcgttgtcatcaccgcattggattggttgatgtgatggaaaaggactaaagtttggatccaaattttggatctaaacacagccctagtctccaacattatgaggccaaacgttgacttgtcgtatacgaatagaactgaaaatcgagttcacattcttgcatatgatctgaataaatgcatgtagcacctgtaacaactaatggtagtatttcttccttttcttcttcttcttcttcttttgtgaagaagaatcattgggtttgttccactacagttacgaaactcctttctaactttacttttcatcagctttttttttctttccctggaaaactatggggtgaggaagttggaagctgtatttgccgttctgatagcaacaatggccttgtcgtttgcttggatgttttttaaaactaagcctaacgggaaagacataattattggtattctggttcctaggctgagttcaagagtgataagccaagctgttgggcttgttggatgtgttatcacgccccacaatgttttccttcattctgctcttgtacaatcaagaaagatcgatccacacaaggaatatcaagtccgtgaagcgctgagtgtttgcaaaagggttttatggaaccaaagaagcaggtaacattggccttgagaatgctggacattttctacaagagaagtttggggaagattttttccctatcctttatatttggggaattgggctattagcagctggcacaagtagtaccataactggaacttacgctggacagtttataatgagtggattcctgaactggcggttgaaaaaatggatcagagcattgatcacgagaagctttgcgattgtgccaactataactgttgctgtatactttaacacatctgattctgcactcgatgttctgaatgagtggcttaatgtgcttcagtcaattcagatcccatttgcactcatcccattgataacattggtatccaaggagcaagtaatgggagtgtttaagataggtccgagaacgcaaattgcaacttgggcagtcgcatccgtgccgataataatcaatggctgcctcttgttggatttcttctcttcagaagtgaaaggcctattatccggcttagttctcttcgcagcggtgcttgcttatgtctcgttcctactgtatctcatcttccggggtattgccgtattttcatagcacaaacataccaacagtttgacatgataaagaagaggacatacatgactagatgaaaaacctccatttgtgatgatgcctggtgtaaaattgaggagatttacaggtttggggatgaccattttgtatctgtacagaggacggagatgattcagtttgttgggaagaagtgcagctgctgttgtgccgttataactggctgcagatggaaacactggggaggtttttttatccagtgttagttgtatatcctgaaactctttagtctgatgtgtgaattgatggattaatgagtagtgaaatagaaagacagaatggagcaaaggcacacagaccatctgctcctctgcatgttggtagattgaacacccagtgcaatgcagttaatcggccgaccgagcagcaggtgtcgaagctaaagtacggggatgtatataagcagataaccttttgttgcatttgattacagtattcagttactccgtgtaatgacgcatgtctgaaactaatgtgatcaaatgcaagattattcactct

SEQ ID NO: 19553 - DNA, 2096 bp, Oryza sativa
  ref <308>: DATABASE ACCESSION NUMBER: AK069905
  ref <309>: DATABASE ENTRY DATE: 2001-12-06
gaactgtccgacacgccgagaagaaaaaaaaaagaaaaaaaagcaacgaaccaacttttctcccaaggaaacttctccacttctctcctcgcttccgccgcctcctccgccgccgccgacatggacaccacgatcggctcggtgccgacggcctccgatgcggcggcgcctgcccccgcggcgaactccgcgccgagggaggccacgctggggcggcacctcgcgcggcggctggcggaggtcggggcgcgcgacgtgttcacggtgccgggggacttcaacctcacgctgctcgacgagctcgaggcggaggcgggggcggggcacggcggggtgcggctcgtcgggtgctgcaacgagctcaacgcggcgtacgccgccgacgggtacgcccgcgcgcgcggcggcggggtcggggcgtgcgccgtcacgttcaccgtcggtggcctcagcgccatcaacgccgtcgccggcgcgttcagcgagaacctccccgtggtgtgcatcgttgggggccccaacagcaacgactacgggagcaaccgcatcctgcatcacaccatcgggctgcctgatttcacgcaggagctcaggtgcttccagactgtcacttgctatcaggcggtggtgaacaacttggaggatgcacatgagcagattgatgctgccatctccactgcaataaaggagagcaagcctgtttacataagcatcagctgcaacctcccctctatcccacatcccacctttagccgccaccctgttcctttcttcctgtccccaagattatcaaaccagatgaacctggagacagcagtggaaactgctgcagctttcctgaacaaagcagtcaagccagtcctcgttggtggaccaaaaatgagggtggccaaagcatgcaaatccttcgtagagctggctgatgcctgtggttatcctgttgcggtcatgccttctgcaaagggtcttgtgccagagcaccatcctaggtttattggcacgtactggggtgctgtgagcactccattttgtgctgagatcgtcgagtcagctgatgcatatctatttgctggcccaatatttaatgactacagctcggttggatactcactacttctcaagaaggagaaggccatcatcgtccagccagaccgggtggtgataggtcatgggcctgcgtttgggtgtgttctgatgaaggacttcctgcatgcactttcagcacggctgaagaaaaacacggctgcatatgagaactatcgtcggatttatgtgcctccgggtgaacctcctttgtctgagcctggagagccattgagagtgaatgtacttttccagcatattcagaaaatgttgtcagccaactcggctgtcattgctgagactggagactcttggtttaattgccagaagctaaagctaccagagggctgtgggtacgaatttcaaatgcaatatggatcaattggttggtcggtaggtgcaactctgggatatgcaaaggctgctaaggataagcgagtcattgcttgcatcggagatggaagctttcaggtgacggcacaagaagtgtcgacaatgcttcgttgggggcagaaaagcatcatcttcctcataaacaatggagggtacaccatcgaggtggagatccatgacggtccttacaatgtcatcaagaattggaactacaccggtgtggtggaagcgttccataatggcgaggggaagtgctacacggcaaaggtccgaactgaggaggaactgaaggaagcaattgaagaagctcagggacctaagaaggattgcttgtgcttcatagaggtgattgtacacaaggatgacacaagtaaggagcttcttgagtggggctccagagtttctgctgcaaatagccgcccaccaaatcctcagtgagtacgtcagatatccgacttgccatgttttgattaggaaaatgtgaatttcagtggtcttcgaataagttgcgcatgtaattagccgctgttgtaagtgttgtaagtggttagaaatgatttcagactctcatacctgtattattgtcaataaatctgaaatcgatttttggttgcccttcc

SEQ ID NO: 19554 - DNA, 2449 bp, Oryza sativa
  ref <308>: DATABASE ACCESSION NUMBER: AK069906
  ref <309>: DATABASE ENTRY DATE: 2001-12-06
cttctgcaactctctgcactgtccccgcttccttccacggccacggcggcggccatcgccgccgtcggcgatctcgccctgctccatcccgctctcccgtttccaatcccccaaccggagcagaaatggccatctcctccgccctctccttcctctcctatcgcaagcgccctatcgttgtttccgtcttcctcttcctcctcctctcatccctcttcctcctcttcagccccgcacctgccgcgctccctttcttctccttcccctcctctcacctctcctcctcctcctcctctcctatcgccgccacgccgccacccctgactccagtttccgtccccgccaacgcatcttcaccggagaccccagttgacgcgtccggtgggagcaacgctggcgccaccgcacccaccagggacgctcctcagccagatcgcagtcggagcacgccccctgccgccgtcggagtgcgtggatcggcgggcaccaacggaaccagcaggggcgtctcggccggcggcgatggagcaggagcagcagcggcggcggcggcaggtgtggcggtgccgtcgtgggaggtgtgcgaggtggggaagggagtggtggccgcggactacataccgtgcctggacaacgtgaaggcggtgaaggcgttgaagtcgctgcgtcacatggagcaccgggagcgccactgcccgacggcgccgaggccgaggtgcctcgtgccgctgcccacggggtaccggtcacccttgccgtggccgcgcagccgtgacatgatttggtacaataatgtccctcatccaaagttagtggaatacaagaaggaccagaactgggttaggaagtctggcaattattttgttttccctggaggtggaactcaatttaaagctggtgtgactaaatacattcgatttattcaacagatcatgccaaacattgaatgggggacccatacaagaactgttctggatgttggatgcggtgttgccagctttggtggatacttgcttgacaggaatgtcattactatgtctgttgcacccaaagatgagcatgaagctcagatacagtttgctctcgaacgtggaattccagcattgttggcagtgattggaacacaaaaacttccattccctgataattcatttgatgtgatccattgtgcaaggtgtagggtccactggtatgctgatggtggaaaaccattattagagcttaatagagtgctcaggcctggaggatactacatctggtctgcaactcctgtatatcgtcgtggcaaaagagatgaagacgactggaatgcgatggttactctgaccaagtcaatttgctggaggacagtagtaaaatctaaggatgttaataggattggtgttgttatatatcagaagccaacctcaaattcttgctactttgagagaaaacagaatgaaccacccctatgccctagtagggaaggatcacattccccttggtatgcaccacttgatagttgcctcttgttacctgctgtgtcaagttcaggtgaaggaaacagctggcccatttcctggccagaaaggcttaacatcaaatactcaactatatctgacaacgcttctactcagttttctcaagaaaaatttgattctgacacaaagcactggaaggaccttgtttcagaagtatatttcaatgagtttgcagttaattggtctaccgttcgcaatgtcatggatatgaatgctggttttggaggatttgcggcgtcactcatccacaaacctttgtgggttatgaacgttgtaccttttgatcatccagaagccttgcctatcattttcaacagaggtttgattggggtatatcatgactggtgtgaatcttttaatacatatccccggacctatgatcttgttcacatgagttatctccttcagggcctcacaaataggtgtgatatcattgaagtagcagcagaaattgataggatacttagacctggaaaatggttcgtgttgcaagatactgagcaagtgattagaaaaatggatccagttcttcgctctttgcactacaggactgcaattgtgaagcaacaatttcttgtcgctacaaagggcttctggcgcccatacagtgcaggttctgagtcaagatgattcatgcttcgtcttctgttgctgttagtaaaaatcaaacaactgatttgattctttaaattctaattacatggattcttcgcatagcatagatgacacaaattagccccatatcaacggtgagttcattccctctgtttgtagttagcagtccatattaaccatcgggcttactgagttgattcttttgtttccgttttgttgtgtacaaattaaagaacttatggctacagcaatagccaataggttagcaataacagattgtggattttgaaagcatgtcttgattattcattggt

SEQ ID NO: 19555 - DNA, 955 bp, Oryza sativa
  ref <308>: DATABASE ACCESSION NUMBER: AK069907
  ref <309>: DATABASE ENTRY DATE: 2001-12-06
gagggaacagcgagggggcgggcgtgcgtgcgtcgtcgatcgtcgacagtcgtctcttgccaccatgtctttcaccggcacgcaggacaagtgcacggcgtgcgacaagaccgtccacttcatcgacctcctcaccgccgacggcgtcccgtaccacaagacctgcttcaagtgcagccactgcaaagggattctctcgatgtgcagctactcgtccatggacggcgtcctctactgcaagacccactttgagcagctcttcaaggagacggggagcttctccaagaagttcgcgccaggttgcagatctacagacaaggaactggcaagggccccaagcaagatatgttcagcgttttctggaactcaggataagtgtgcagcctgccagaaaacagtgtacccactagaaaagctaactttggaaggtgagtcataccacaagagctgcttcaagtgctctcatggaggctgcatcctgaccacctcctcctacgcggcgctcaacggggtgttgtactgcaagatacacttcgggcagctgttcatggagaaagggagctacaatcacatgaagaagaagagcgagtcccaggaggtgttgccggaagtggtgcccgaagagcaaccggcgccgccgccgccagacgaaaatagagaggacaactaggactacgaaacgagccaaacacatacggtgatacacggatctctggagtttctgtttactaattttgcaacggttgtttattccctcctctttttttgctcgtgatcctccctgtgtgcgagtagtctgtcaagctgtaagtgtacgccttcgtttcataggaggctcatgaaaatggcaggttgacaacaatggcatgcgactgactgccagcctcctgtgaaaaatctgtaatttctgtaactactacgaattgatcatacttcctagcaaccttatccttct

SEQ ID NO: 19556 - DNA, 2537 bp, Oryza sativa
  ref <308>: DATABASE ACCESSION NUMBER: AK069908
  ref <309>: DATABASE ENTRY DATE: 2001-12-06
gggtctcctcttcctagtactagctgcgccccccccccccccaaccccctcgggcgcccgcttcgctccggcgactccacccggccgcgccgccgggatccgcccccccgcaggccgcccctcgtcgtcgtcctcgctggttccccgccggccccggcgccttttccttctgatccagccagccgcgtcgcgcgcggcgccggggggcatcgaattcgaatccgcgccctcgccgtcgtcgtcgccgccgccgccgccggacaatccggcgcctgccccctccgtgctccccccggccagagggattgcgggactgatacggccgggatcttgctggaaatggggggttacgagtacgcgaccaatggttatcatcggggaatggaggatgactatgaagacgagtactacagtgaagatccatatgatgaggaaggggagggtgctggtcaagagtatgccgaggaggatgacgagccgccggagggacagcaagagttccttcaaattagagaacgattaaaggagcagattaggcgaaaggcgcaggctgctagtgctagcgctgctggccgctcatcttcctcacatgatagaaaacctcaatccacttttggatccttctttgggccatccaagccggtgatttcccagcgggtaattgaagaaagaaaatcactgaaagaactacagaacacagcgtcaatgtccagggatcgaaggccttctgcaaaggagataccatcatcatctaaagtgcaatctaaaacaaatggacatcaccacaaacagaagattgtaaatgaggcaaaaagaaaggctgaggcacttaaggataatcgagactattcatttctactgtcagatgatgctgacatttcaccttctccaatggagaaacctgtggctaggtcctccttgagtcagaagtctgatcgcgagtcgacacattcagctgtgaagagcagagcaccgacaggccaaactgctagattgtctaatggatatggattgaagaacacattgtccagtcagaggcatactgaaggtagggtagattccaacagaaaggtggctggtgcaaacagagaaagggttgtcttgcctgacaatggaagaatgcatagtgtggttagaaatggatccacccaggctactacaagcaaagctgcaagtcaaaagcttcctagcaaggctcctattgccaacaggcctcctataaagagtgtaagtgatcaatctcttagggcaaatcattcagcttcaaagcaacttttgtcacagaatgggagaccacaatcctcacagagtcagaggatgcagtcgacctcgcatggtcagaggccacatcaacctgtgcaaagtcagtggccgctgcagtcattgcagggccgaaggccacagcagtcaccacaaaatacaaggccacaactgatgtcgaagagtcagagaccgcagcaatcattacagagacagagaccacagctatcctcacaaaatgagagattggaatcctcggagaggcaaaggccaccttcacaaagctacaggccacagtcgtcgcaagggcagaggcctagttcagtacaaggccgccagtactccgagcaaagaagaatccaggcaaatgatagagtaaagtcggcagaaaggcagataaggcctccctcgaaacccatgccatcacgacaaataccttccaacggaatgcgtgatgcccatgcaaagaaaaagcaaccgatgaaacgaagatttaatgatcttagcgaagatgaggaagatccgttggcaatgatcaggagcatgtttaggtatgatcctagtaaatatgcaggcagagatgacgatgatagcgacatggaagcagattttgctactatagaaatggaagagcaaagaagcgcgagaattgcaaaggaggaggatgacgagcaacttcgcctgattgaggaggaagaaagacgtgagcaggagaggaagaggcgaaagatggcgcgtggccgatagtagcagctaagttgtacaaatgcttgagttacagcttgagcaaggcttgaactgcaattccacggtcgtacgggccatggtgcttgcagatgatagcacgctttacccccatttatttgccgtgcgatttctcaagagatctatcaagaaaaaaacggcagggatcaagcaaaacggcaggagaacgatgctccaacgtaatgtgaagtggtgtagcttgtgctgaaactgttagctgtgccaactacagatctttttgatgctgacgctgatcgtgcagaaacttctcccgtgagggtgtggtgatgccaacgtccctacaccttgtcactttgttgggttgtacatgatattcttcctcatgtagctgattcgttctgttggtcgagtactaaagatgccagaaatcaactggcgcctgtccgtgtttggattcgatttggatataccggtgttctaataaacaatgttttagacaattattactggactggttgaatgaattattgaagcgattatcggttagccgg

SEQ ID NO: 19557 - DNA, 2233 bp, Oryza sativa
  ref <308>: DATABASE ACCESSION NUMBER: AK069909
  ref <309>: DATABASE ENTRY DATE: 2001-12-06
gggttccggcgccgccgtgtactcgccttccggccgcggccggcgtcgcatatcatttcgcctccctctgtatcatcactccgctccaccccccacgtagaacatctggcgccaactccttctcgtcatgcccatgcggtgaaatcagtttcgtgggaaaaaaaaccaaggccactcctagctttggcatcgatcggcccggttgtttggggatcttgcgctcagtagcgaagccaccagtatggcgaggtatggcggccgccatacctgcccaccggctgatcgcctcatcgcatcggctgttcgcctcctctcgtcgacagttgactcgtctcctgccgcgtgccgcccgatctccgactccaggtccaggacaccgccggacgccgttgccacgctggacgccgccacagtaatcactccgagacaccattacccagattgcgccatggaagaggaagaaccatctaataatcgccgacgccgactgcgcccaatttcagaagctacccagattgggaaaaaaataaaagttgactgcagatcagtgtttttttggtctaatggctaagcgaatgaatccatgtcatgggaaactggtccccaagaacaaaagagccatattacagtttgatgacattcctgaggatgtggtgttcttgataatccggttgctttcgctgactaatgctgcgcgtgtcagcatggtgtcgcaaaagtggctacaatcttggaggctctatcctaatttagagttcacctcgaaggcgttgggtttgaataaacgggtgcacaaacaagggaggagggctaaatttgtcaggtgtgttaacaccatcataaggcaccacgctggaacagggattaactcattcaccttgaagcgcaacctcaacaatcacaagtacgcacactatattgaccgttggatttactttgcagtccgatctggtgcaaatgaactgactattgacctaagtccacgatggtatgctcatcctcgtgatgtcaaatacagctttccatcctctaatgttgctgctccagaaccaacctctatagagcatcttaagctttgctttatgaatttgaggcctttaccaacttttagtggcctaagaagcttgaagactcttgatttggcccttgtatgtataaccacagaagatttagagagcttgttgagttatacccctgctctacaacagttgaagctaaggcaatgtccaatgctggaatacttgaagatcactgatgtactagctaagcttgtctacattgatatcgttccctgcttgtggctgaagattttggagatccatgctcaaaatcttgttgcgattaatacttacaatatctgtcacctaaaaatagtactgagtgaagcattagtgttgaagggggcacacattgagttagttctgtcatcagatgttattgagtatgcttttactgatcttgcaccactcatgccagacctcgagtcattgttcctgagtggctgtactgagatgattatatccaggagacctccaagcaatagattccattgcctgaagcaattggagttaaaattgcaggatatatcgacgaaatatgatcttctatttcttgctaagtttgttgatgctgctccagtcctagaagctctcgtttttcatctggaagatatagaggagccattttgttacatggaaaaggaagcagagttgagaagtctggagaaacattgtccacataaaaacctcaagttggtcaaaatgactggattttcagcaggccgttcaagccttgagcttgctctgtatttcgtggagaactcaccagcactagaactcctgattcttgatcatcggcttgacagatctgtttgccgaatcacttttggtggtgacttggatgcgaaatgctcgaaaggatatgaacacactatctccaaatatgttagcaatgcgattcctcgccgtgttagattatcatattcctaatgtagcacaaacaagttgcacgtggtgcgagttgcagtgctaggactgctacagtagaaattaaaattgcaacgacagctgtataaattgtaagatgttttggtctctcaatctatgatgtgatcaggtaattaaatgacacatgagtgcagtaaaagtgcaagtatatagtagatcaatggcaatgggcaatgagatgtactacctccattttttttaatagatgacgccgttgactttttccc

SEQ ID NO: 19558 - DNA, 1631 bp, Oryza sativa
  ref <308>: DATABASE ACCESSION NUMBER: AK069910
  ref <309>: DATABASE ENTRY DATE: 2001-12-06
gggagcccaccgtcccccgatcccgaccgcgaccctccaatgctccgcagcacgcggccatggcgttcctcaaaaccctgaaccctctcctccgcagaagccccaccccgatcccgaacccccgctccctcctttccctcgacgccttcctcgccgcctcctcccccaccgccgcctcccacgccaccgcgcccgcgcccttcgccgccgcggcgcaccaccacgtccccatccgctcggggggcccgctgttcctctcctcgccgccatggatgctctcccagtccgccacgccgctcaccgccgcggccgccgctctccgcgccaggctccggagggcccgcgcgctcgccggcggcggcgcccaggctgtcgcggacgccgtagggtgggagcccaggcggatctccagagatgagagcgaggtggcggaggcggtgacgggtggaagggagaggttcctgaatctgcccaatctggtgtcgattggacgcatggcgtcggggccggttattggatggatgattgtgaatgaatggtatcttcctgcttttggcacattggctttgtctggtgcaagtgattggttagatggctttttagcgagaaagatgggcatcaattctgtgtttggatcttatctggacccattagctgataaggtgttgattggctgtgttgccatagcaatggttgaaaaagacctcttacatcctgggcttgttggcttggttgttgtaagagacttgctccttgtgggtggtgctgtctacaaacgagcttccagtctgggatggaagtggaacagttggtcagactttgttaacttagatgcaattcaccgtgagaaggtcaaacctctttttatcagcaaggtgaacacagttttccaattgatgttggttgctgctgctctcctccagccagaatttggcacagaggagactcagaattatattacagtgttgagctggcttgtagcttctacaacaattgcatccacagtaggttatggtatcaaatatcgtcagattagaccaagaagatgacggctgttgcgtgtgtttgtttcatcgctgatgagaacatcacgtctttgttgttgtttgtcaagcatttggagcaagacactgaaggaagaggccagacttctgaatgaatcagctgatgctttatatgttaggcctaggaacactagttagatttggaagttttttttcataatatcactgtttttttggctaagagctcagatcggatactagagggcgatgtagcagaactttgtctatagtttcgtccatatcggctctgatgtcgggtgttcaactgtacatatctgttttgtagtactgttttatagagagaatcacgactggtggaagctggctggttgatcggtgtttgtcttgcccatgcctctctctggatggcttagtttcataatttggtgttttatagagagaaaagacatctgcagatggtttcatagtaattttcagggcattatggttattttacggcctgcagaccgcgactggaaatgtattcccgtatttcacggcacttaaattagtggaagtaccaaacgtatggatttaaaaggtattcttaatgtatactgttactcc

SEQ ID NO: 19559 - DNA, 1616 bp, Oryza sativa
  ref <308>: DATABASE ACCESSION NUMBER: AK069911
  ref <309>: DATABASE ENTRY DATE: 2001-12-06
gaacgtgcacacaccaccaccaccttcatctcggtggcttcgttcactccgcctacctacctacctttgcagttggtttgctgaaccctcctcaagaacccacgcgcctctcgcggcagcagctaaccaagccatggcgcgcaagaagatccgggagtacgactccaagcgcctcctcaaggagcacctcaagcgcctcgccggtatcgacctccagatcctctccgcccaggttacacaatcgacggacttcacagagctggtaaaccagcagccatggctgtcaaccatgaagttggtcgtgaagcccgacatgctgttcgggaagcgtggcaagagcggacttgtggccctcaacctagatattgctcaagtcaaggagtttgtgaaggagaggctgggagttgaggtcgagatgggtggctgcaaggctccaatcaccaccttcattgtggagccatttgtaccccatgatcaagaatactacctttctattgtctcggagaggctgggcagcaccattagcttctcggaatgtggaggaatagaaattgaggagaactgggacaaggttaagacaatttttcttcccactgagaagccaatgacacctgatgcatgtgctcccttgattgctacccttccattggaggcacgtggaaaaattggtgatttcattaaaggagtctttgctgttttccaagacttagatttctcatttctcgagatgaacccatttaccatcgtgaatggagagccgtatcctctggacatgagaggagaattagatgacacagcagctttcaaaaacttcaagaagtggggaaatatcgaattcccactaccattcggtagagttctcagttctacagaaggctttatccatgacttggatgagaagacaagtgcatctctgaagttcaccgttttgaacccaaaggggcgcatctggacaatggttgctggaggtggtgccagtgtcatatatgctgatacagtcggagatttgggatatgcttcagaattaggaaactatgcagagtatagcggtgctcccaatgaggaggaggttctgcagtatgctagagtagtacttgattgtgcgactgctgatcctgatggccgcaagagagctcttctcattggagggggtatagctaacttcaccgacgtcggggccacatttagcggcatcattcgggccttaagagagaaggaatccaagttgaaggctgcaaggatgcacatctatgtccgacgtggtggtccaaattaccaaactgggctggctaaaatgcgcaagcttggcgcagaactcggcgtcccgattgaggtgtatgggccagaagcgacgatggctggaatctgcaagcaagcaattgaatgcgttatggccgcagcataaatgaagatgcaagttctgggatctgcaggcaagatgctgaatgcgtgatgggtgcgacatggatgagagtgtggtgtagttgcagtagttctctgcagatggctgatttgtttcttgatacatgttatacttggacgagatctggataggttattgatgtactgaaactactactgcgatgcaataaaagtgagagtagcgtttcctgatt

SEQ ID NO: 19560 - DNA, 1877 bp, Oryza sativa
  ref <308>: DATABASE ACCESSION NUMBER: AK069912
  ref <309>: DATABASE ENTRY DATE: 2001-12-06
aaaaaaagaaaaaaagagaggaagaaaacgagaaaaatctcaccttcctcttcctccgttatctagctcgatccccgcaagaaattcgccccggaatctctcgatccgctcgatccattcccccgatctgtcgatcgttccttgcgaaccctcggttcccggggtcccgatccggtcttcgccgcgtcgccgtcgccgccggagtcggagtcggagtcggagggggaggagatgaacggcgccggcgggaaccaccagcagcagcagcagcagcagcagcggctcaggcagcagcagcagcagcaggccctcctgatgcagcaggcgctgcagcagcagcagcagtaccagtccggcgtcctcgccgccgccgccgcggcggccatgacccagatggagcctatttcaaatggcaatcttccaccagggtttgatccatccacatgtcgcagtgtgtatgttgggaatgtgcaccctaatgttactgagagccttctaatcgaagttttccagagttctggccttgtggaaagatgcaagctcatccggaaggagaagtcttcctttggttttgttgactattatgatcggaggtcagcggctcttgcaataatgacccttcatggtcgtcacatatgtggccaagcaatcaaggtgaactgggcttatgcaagtacacagagggaggatacatctgggcatttccatatttttgttggtgatttaagttctgaagtgaatgatgcaactctttatgcctgtttctcagcatatccttcttgttctgatgctcgagtcatgtgggataacaaaaccggacgctccagaggttatggttttgtctccttccgtaatcaacaggaagctgagactgctataactgaaatgactgggaaatggcttggaagcagacaaataaggtgtaattgggcaacaaagaacaatgcagaagagaaacaagaaactgacaaccataatgcagttgtactaacaaatggtagttctagtaatccaggaatggaggcaagtcaggacaccggaagtaaagagaatccagagaacaaccctgattgtactacggtgtatgttggcaaccttggacatgaggttaaccgagatgagcttcaccgccacttctataatttaggtgttggggctattgaggaagttcgcgttcaacaggataaaggatttgggtttgtgagatacagtaaccatggcgaagcagcattggctattcagatggccaatggattggtagtgcgtgggaagccgatcaagtgctcatggggcaacaaacctaccccacctggtacatcctccaagccattgccaccgccacttccttcatatcaacccgtaccaatggcaggtgtgccacaaggtttctcggcagctgatatcgtagcatatcagaggcaacttaccttaagccaggtcgcagctgggcagattgctggccagcatggccttgcaggtcaggtatccgcagggcttcttgctgctggctcccaggccctctacgacgggtacccgaaccagtcatcagcgcaacagcttatgtactacaactaggtgcttaaggaggaggaaggcatttgtagtgttcggcttgttcggcgcaagcctggccttcctctttcggttcctattttctggtttctgtactatttgagtgagtgctcctcttccggttcactgcttgtcgcggaattgtgttattatcttcttattattgttgtactattgaccattttcttttctaatttggtcgaagtagttctcgccttaacagagtaacagatgtatttgatggaatgtgaatttgcgattgatcaatgtaactctcctgatgcccatctgagtattgattattc

SEQ ID NO: 19561 - DNA, 1082 bp, Oryza sativa
  ref <308>: DATABASE ACCESSION NUMBER: AK069913
  ref <309>: DATABASE ENTRY DATE: 2001-12-06
ggcagtcgtcgcgctcgtcggcgtcgcgccacctcgccgccgcccaaacaaaatcctcggcgaggaggagaggcgagatcgcgattccgcgagcgctctgctctccgggaggcgatggcggcggcggcggaggaggccggcctcggccacccgtcgaggtacgtgcagctgacgagggaccaggacgcgcccgccgacgaggacatccgccccggcgagctcaacctgccggcccacttcccgcagctggagcagaggaggtgctgcgagtgcgggcagcagctgccggagagctacgaggcgccggcggacgagccgtggaccaccggcatctgcggatgcgccgaggacaccgagagctgctggactggatcattcttcccttgtgtgctgtttggacataatgttgaggccctaagagaagatatcccatggactacaccttgcacttgccatgctgtttgtgttgaaggtggcattgcattagcaatcctaacagtgatatttcctggtattgatccaagcacatcaatcttgattggtgaaggactggtgtttagttggtggttatttgctacctatactggaatttttcgtcaacaactccagagaaaatatcatctcaaggattcaccgtgtgatccttgcctggtccattgctgcctgcactggtgcgcgaactgtcaggagcatcgagaaaggaagggccgtcttgcagataacaacgctaatcggaacaccatcgtcaaccccccaccgatgcaagaaatgagcgtggtcgggaatcatcccagcattacaccagagaatggagcagcatgaacggttgtcagtgagcatgaagctgtgcaggacataccatcataataaaacagtaaagatacaagacaagcataggaatatatgaataacataagaaatgaaactgacctttgtaacccgtgtgccttttaccggagtaggtgttaagagaacgtctctcaaggtatcggcataagtagttccataactggttgaacacttggaacattattagacccatcgtttactaaaagaatgctcttttcatattgggaatgatt

SEQ ID NO: 19562 - DNA, 1350 bp, Oryza sativa
  misc_feature (555)..(555): "n"=any one base of a, t, c, or g
  ref <308>: DATABASE ACCESSION NUMBER: AK069914
  ref <309>: DATABASE ENTRY DATE: 2001-12-06
ggaggttattcgcgcaaaatctcctcccgtcggtcgcccgaggtctgacctagggttccggcgactcccatggccggccgccaccgtaacccgccgcccccatccttccctcgcggcggcggcgggggcgtgggcaggggccaccacccgcctcctccctcgctccaccaccaccgcctcccgccgcctcatcacctcgacgacttccgggagccgccgctgctccccccgcaccaccgcctcgacgacttccgcgagccgcaccacctgccgcccccgcaccaccaccaccacctcgacgaattcggcgagccgccgcgccaccacgtgttcgcgggccacggcggcggcgccgggccccccccggcgccgcacgtcgtggcggcgctggaggagcggctcggcgcggagatcgaggaggcgcacgtgctgcttggccagaaccagcggctggccgcgacgcacgtggcgctcgtgcaggaggtctccgccgtgcggcacgagctcggccgcaccgctcgcggccttgccgctgcccaggaggaaggcgaactncgtcttcgcgaggtctatgagaggtcaatgaagatggaggcagagctgcgagcagtagaggaaatgagggcagagcttgcacaggttcgcctcgacattcagaagttaggtgcagcaaggcaggaactcatgggtcaggtccaggggttcacccaggacttggctcgatcagcagtggacctgcagcaggtggctgcgttaaaagctgagatccaggagataaggcatgaaacacaacatttgagatctggcattgaggttgagaagaaaggatatgccgagagctatgagcagggacaagagatgcagaagaaattgatatcagtggcttctgaagtggagaagcttcgagctgaggccgagaagaggtcacgagctgctgtgtctggaggcaatcaagtgtacgtcggaggctatgggaatcctaaggccgcatatgccgcaaatccttataatgctggatacaacataaatcaaccacatccccaggcaaacactgctgattccggctcccagtttgggcctggctcaacgcacgctccctggggtgcctatgacatgcagagagctactggacggagatgatttttttttcaggtgtgttcagcaaattacaaaagcatacttttctgggacaaacctaacagctttcatgcaatggtgaatcatgaatgtattacttactagtatactctactgtgagttgtgctgtacatgtattacctccgtttcaaaatgttgcaacctaggacgtgatttatcctaatacaacaaatctagacaaaagttctatcc

SEQ ID NO: 19563 - DNA, 932 bp, Oryza sativa
  misc_feature (180)..(180): "n"=any one base of a, t, c, or g
  ref <308>: DATABASE ACCESSION NUMBER: AK069915
  ref <309>: DATABASE ENTRY DATE: 2001-12-06
ggttgcaatgccatttcatccatttcttcttagtttaatgatttttgtaatattttttcttgctgagatgaccaaaataccttgatcctatctcatgtctcctccatctcttcctactctccgttgcagatggtgggcggcttggtggtgcggctggggatggggacggcggcggctggnctggggacggggacggggacgacgccgacgtgggtgtggaaggctgctcggctcggcggcgcggctggggacggcgtccctacgccgcgcgggcgcggctgccacccatggaccccgcgctcaagaccgacgctaactgcatccggggatgcgtctcccaggtctgggtccacgccgcgccgaaggagggcgcgccggacagggtcagcttccaggccgactctgacgcgcagctcaccaagggcctcgccgcgctgctcgtgctcggcctcttcgacgcgccggcgcgggatgtcgccatggtgcccgtcgagttcatcgagttgcttgggatcaggcagagcctctcgccgtctaggaacagcggcctgctcaacatgattagcctcatgaagcacaaggtgctggagatcaccatcggtgaggtaaccactgaggaaattggtcgccaagatgtggtccaagaggttgccgaaccgcctgctgctgtcaccgtccccatgcccagccgagccgccgccgccatccccgtccccagccgcgccggcgccacccaccattggcaatggagaggagtaagagatatatagggagagatgagataggatccaatgctattttggtcactcagcaataaaaaaacattaaaaaatcattaatttgagaagaaatggatgaaatgacattgtaatatgttgctcctgtttgagggtggttttttaacgaaaccacttttgaaagtggcattccag

SEQ ID NO: 19564 - DNA, 2118 bp, Oryza sativa
  ref <308>: DATABASE ACCESSION NUMBER: AK069916
  ref <309>: DATABASE ENTRY DATE: 2001-12-06
taaggtttagctatagctaagctcactgactatgcatgaagcttccagaggcagtgaggcaccacaaattttcagacacatgctggctggagtagtgtaaatatacacacacacacactctctctctcatagtaacagggctcaagggccaacaagattagcactcactggttcttcttccttgtttatttggtaattactctgtccctgattcttctccggctccggcgagatcatgtatcttgtgaaggatatcggcggcgccattgcgctgatgggcgtgtcactggtgctcctgggcacatggccggtggtcctcgccgtgctggagcgccgcggccgcctcccgcagcacacctacctggactactccatcaccaacttcctcgccgccctcctcgtcgccttcaccttcggccagatcggcgccgacacgccggagacgcctaatttcctcacacagctcacccagatgcaggacaactggccttcaatcttgttcgcgatgtcgggtggcatctttaacggcctagggacactggccacgcagtacgggtgggcgttcgtcgggctttcggtcaccgaggtcatggcgtcaagcctgaaggttgtcatagggacaacactgaactattttctcgatggccggatcaacaaggcggagattcttttccccggtgtcggatgctttctgattgcagcctgccttggatctcttgttcactcttccaatgctgctgacaaccaggagaagctgtctagtgccatggtgaaccacagcaacaccaatggggacactgaaaatgaagaactcaccaagcacctccttgagatagaacaacccaaggattgtgaagaacaagagcctgaagtggcaccggctgcccaggctgtggaaaaactagaggcaggaacagctgatttcctggttgaccttgaggggaagagatctattaaagtgctcggatcgaacaccttcctgggcctcggcatcgtcaccttcgccggcgtgagctactccctcttctcgccggcgttcaacctcgccaccaacgaccagtggcacacgctcggggagggcgtcccccacatggtggtgtacacggcattcttctacttctccctcgcctgcttcgccatcggcatcgccctcaacatctggttcctctaccaccccatggtcggcgtgccgcggtcgtcgctcacggcctacctgaaggattggaaggggagggatcttgctctcgtcgcaggcatggtgtgtggccttggcaatgcgttccagttcatggctgggcaggctgctgggtatgctgctgctgacgctgtccaggcgttgccgctggtgagcacggtgtgggggatcgtgctgttcggcgagtaccggagatcgtcgcggcggacttacactctcctggggagcatgctgttcatgttcgtcgtcgccatggtcatcctcatggcgtcgtcggcgcaccggaggccgctctgatggcggccggccggcggctgccgtcgacctcctcctctcctcatggacatgaccgagaaacatcagaagaagaagaagaagctgcatatgtacagctccattgatctgaccacatcagtgtgtagttcctgaccttctcgacgtaggatctatgcatattgcctcccggtgcttgcgcatcggcgaggctacacatcaattaatttcttctgcaatgagcaaccatgggatgggggagtgaatttggagatgtgattggactagtatatagtgtaatgttgtaatatatgtctcagcttctttgtgtgaagcttctgtgaagggaaccaaaataattttcaaatgtataaattttgatcaatgttatgaggagctacttcctccgtttcacaatgtaagtcattacattcatattaatgctaatgattctagatagatatatatgtctagattcattagcatcaatacgaatgtggaaaatgctagaatgacttacattgtgaaatggagggagtagctattaaggctagctctagtaaaaccagattaataacctttttgtaatcctcaaagtagaaatgttacaactttgacaatgaaagaatcaataatggcattatgacggc

SEQ ID NO: 19565 - DNA, 2081 bp, Oryza sativa
  ref <308>: DATABASE ACCESSION NUMBER: AK069917
  ref <309>: DATABASE ENTRY DATE: 2001-12-06
gattgactcgtgtcgccgtctcgccgagcgaacccgacgtcgtcggcgatgaggaaggcggcggcgctggcgtccgcggcgatggccgcagcagcagtagcggtagtctccacggtgttgcaccagaggcaacgtcgggcggcgaagcggtcagagcgcgcggaggccgtgctgctgcgggacctgcaggagcggtgcgccgcgccggtggagctgctgcggcaggtggcggacgcgatggccgcggagatgcgcgcggggctcgccgccgagggcgggagcgacctccagatgctcgtcacctacgttgactccctcccctccgggggtgagaaagggatgttttatgcacttgaccttggaggaacaaatttccgtgttttacgagttcaattaggaggcaaagaacgtcgaattatcaagcaagactcagaagggatatccattccacaacatttaatgtccagcagttcacatgagttgtttgattttgttgctgtggctttagcaaaatttgttgcctctgaaggtgaagactgccatcttcctgagggtacccaaagagaactaggttttacattctcctttccagtgaaacaaaaatcattggcatctggcactcttatcaagtggacgaagagttttgcaattgatgaaatggtcggcaaggatgttgtggctgaattaaacatggctatcagaagtcaaggacttgatatgaaagtcacagcattggttaatgatacagtagggacattagctgctgggagatatgtgaatcatgatactattgctgctgttatactgggaacaggtagtaatgcagcgtacatagatcatgcagatgcaattccaaaatggcatggatccctgcccaagtctggaaatatggtgtgttttttcagtccatacttctgtagttctgtttgctagttagtccgtctcccattatcccaaggtacaaggcatgcaaaagatcatgcttagcagtttatattgtttgtagtcttgcgcgaataagaaaaggcaacaataaaatataagagggacttttgcattgttgataattttgacgtgtttatttgttagtttctttgctttggtaaaaggtaataaacatggaatggggtaactttaagtcctcacatcttccacttactgaatttgatcaagagttggatgcagaaagtttgaaccctggcaaacaggtttacgagaaatcgatttctggtatgtatatgggggaacttgttcgaagaatcttactaaagatggctcaagaaactcgcatttttggtgataatatacctccaaaacttgagagaccatacatcttaaggacacttgacatgctgatcatgcatcatgatacatcatctgatctcagaacagttgccaacaagttgaaagaagtcttggggatcgaatatacctctttcacgacgaggaaactggttttggatgtttgtgaggccattgcgacacgcggtgcacggcttgctgctgctgggatatatggcattatccaaaagcttggtcagcattctgacagccccagtacgagaaggtccgtgattgctgtggatggaggggtctataaatactacactttcttcagccagtgcatggagagcactctgagtgacatgcttgggcaggagctggccccctctgttatgatcaagcatgtcaatgatggctcaggcgttggggcagctctcctggcagcctcttattctcaataccaccaggctgaatctgcagatagttcataatattctaaaaaaaagaagctgaatctgcagatagctcttaatattctgaaaaaactgtcaaaaaataatattctgaaaaaaaactgtgtattaaggtgataaacaataggttttggagcaattttttttttaagataatggattaaaccggcctctacatccaaacgagattctagagcaatagcagctatacagtttgcctaagggctaaatatcttgtattttgcaaatgtcaattgtacatgaactctatctgcaatatctgttcagtgtttcagtgggtcatagacactgtggttatatatc

SEQ ID NO: 19566 - DNA, 1983 bp, Oryza sativa
  ref <308>: DATABASE ACCESSION NUMBER: AK069918
  ref <309>: DATABASE ENTRY DATE: 2001-12-06
gataggccatccagactatcttgacatatgtccgtagcccagctctctcctcgcttatctctgatccttctcctacctgctgcccccaggtaatgtgtctgcacattctttgtgtgtgtacatgaagtttgagaggcgttttgctcaagaccgcgcaacgattccatatgacaccgcatcgttgtccatgcctatcatgttcatccagagcccctgttgatcttcagataagagaaaagctcaaaattaaagaaggcttgtttattgatcatgtcaaggataggtatcgacggcgatgcgctggctatggccatggttgtgcggttcttgcgcaataacgttttgatctcgatctcctctcctctctccaaagtttttctttctttactcctctgatggaacaatgcatgcatttactgagtttttgtctcctgttcttcctcgtctgcatgttcttgaatggtttggtcgctcttattcttctgtgatttccttgtccatcattatctcagggcatgcatgaaagctctataaattaagatggaaccttttcttttagttttgttgatgatgactaatttggtttgttgctagctactagctgttgtttcctgtctgaaaactatgaagctatcttgtaaggtaggtaagacgaatgcggaggttcttactacttcggcccttgcctagagcttcagaaatataaactaagattaccatgaagaacaggtgtgtgcaactttatttatggtattgatgaaaactcaatctagtaaacatcatgtatgatccagtagatcgatcgattagattcatcgtacctgaatctatttttgcttaccgtactgtagctagtctttcaccttcagtctttgcaagttatatttttttatactaggtttcgttcttgcatacttgcaaatgctcttgtaattgagttttcagagttctccacttgcaataacaaatattttggttgtctttccatgaagcagatcagatggctagatagatggtaaatgatctgaaaaatataaaagaagattacaggcactgtttgacaatacttaactgaatctatatgcaacttatctttcagtacattgcactggaatttgccatttgctagcacttgctgcctatctgtagtgcttatgggattcatgtcagaactaactactacctgtattttgtaggtttaagagtgtaaattattggtccccttcttgcattttctctcaatttattcagcatccagagtgctataaattcacatcatcaattcatcatctccaatataatgcagctgcaagtttcatacatggatgtggcttgtttccgacatcgcagagacaaatacccagtgttctagattccagaaatgttatcagtgacaatgtgtgttcaggctaggtgccaaaggaagtacagataagctacagtacatcaggaatgagaggagtgcatcaaaatactgaagaccatgatggatatttcgaaattgcaaatgaggggtggccggtctgtaaaaacagttttctcctaaaagatcgacattgctcaagcgaccttaatctagaaaataatttcaaaggaaactaggaatcatggcatggatcaatgaggaggcactttctaagccaagtgatcaagtcaaggtgcaaacttatcacgaaggtctttcagaactcattcgaagtgtttttgcggcctgcaatcctaatcggccaataacacatacgccttctggccaaactcctctacccttactctcataaataggagctaacattcatatgaggtcaatgtaccaaggaaaggttgataacaatcaaaatcgaaaggatggagtaacgattgcgtgagtgctagtcctcagaattaattggccagaccatcaaacattgttcctcattgattggtagtaattaattgtctagacattgtggaatgatgggaaggtatctagctttttctctatgc

SEQ ID NO: 19567 - DNA, 867 bp, Oryza sativa
  ref <308>: DATABASE ACCESSION NUMBER: AK069919
  ref <309>: DATABASE ENTRY DATE: 2001-12-06
gattcacaacccatacacactctgtgcgcgtgtgtgtctctatgatgtcggcgtcgccggagttctacaagccggcgccggtgttctcgccgtgcagctcgccgctgcggctgctgcagcagcagcacggggaggatcatcaggaggagtacggctacggcagcagcggcggctgctgcaggacgccgacgggaggggagagcaacctgaaggcgccagggacgtgcccgccggcgccgaggaagccgcgcgcgcccgccgcgccgtgccggaagcggctgttcgaggtcgaggtgttaagcctccgcctcgaggagctcgagcgcctcttctggcgccctccgccgccgccgccgacgacgcagccgcagccgcagccgcagcagccgccgcagaagcgccggagggtggccaagctcggcagctagctagctcgccggagtagcacacgtgtgcgtggatggccataagtggtgttggttgggttagttactagagctaaagctagagtagttcggagttggtaggatttaggcgtactggcgtttttactgctgtacttgcactatatttctactgctcaaattatctccatggctagtatagctggttgtacactttgtactatacctgcctagctaaggttgctactactactactgtagcgtatcagtgcagtttatactagtatctgtgtatgtgatggcattgggggtgtgtactcctggtacgtattagcaatcaataggagcttagcttgaatttgcttccatgcatatatggcagttgcagtgcagcctgtgaagtaatgacaagttgtatgatccgtgtatacatccatcaatgtatcagtgaatcaatccttgc

SEQ ID NO: 19568 - DNA, 1675 bp, Oryza sativa
  ref <308>: DATABASE ACCESSION NUMBER: AK069920
  ref <309>: DATABASE ENTRY DATE: 2001-12-06
gtctctgctctcgttctcttctgtctgctactaccatgcattcgaccggcatggagatggaggtggaggtcgccggcgacgacgaggcggtcccggaggcgccggagcggtccgtcgtcctcatctccgccggcgccagccactccgtcgccctgctcagcggcggggtggtgtgctcgtgggggcgcggcgaggacgggcagctggggcacggcgacgcggaggaccggccggtgccgacggtgctgacggcggcgttcgacgacgcgccggggggcgtcgcctccgtcgtcatctgcggcgccgaccacaccaccgcctactccgacgaggagctgcagctctacagctggggatggggcgacttcgggaggctgggtcacggcaactccagcgacgtgttcaacccgcagcccatccaggcgctccagggcgtccggatcacccagatcgcctgcggcgacagccactgcctcgccgtcaccgtcgccggccatgtccacagctggggacgcaatcaaaatggtcagcttggcctcggaaacaccgaggactccttgctcccacaaaagattcaagcttttgagggtgtccgtgtaaaaatgattgctgctggtgccgagcacaccgctgctgtaacagaagatggtgatctctacggttggggctggggtcggtatggcaacttgggactaggcgatcgcgatgaccgcttaatcccagaaaaagtttcttctgtgaatggtcaaaagatggtgcttgtagcgtgcgggtggcgccataccatcaccgtgtcctcctccggtagcatctacacatatggatggagcaagtatggtcagctagggcatggtgattttgaggatcacctggttccacacaagttggaagcattgaaggatactactatatctcaaatttcaggtgggtggaggcatacaatggcacttgcagcagatgggaaactctatggatggggatggaacaagtttggacaagtcggtgttggcgataatgaagatcactgctccccggtgcaggtcaattttccaaacgaacagaaagttgttcaagttgcttgtggatggaggcacactcttgccctgacagaagccaaaaatgttttctcatggggaaggggcaccagtggacagcttggccatggtgaaatagttgataggaacatacccaagatgatcgatgccttgagctcggatggatcagcttgcaagcagctggaatcatcaaaagccgtcccaatgtcagctaaagtttgggtctcgccatcagagcgatatgccatcgtgccggatgagaaggctggaaaaggcatccctgctggcaatggaacagagactcatgtgccccaaggagatgtgaagaggatgcgcgtctgattcagcaacatatacgatccagtgctcttcttccacttgatatcctctattagttaaccttagaattagcatcatatatacatataataaccttggggcagcatttatcctctaccatcttatgacatatgctgcccagtctttaattagtgtgttgccttttcatttcttaaaataatcagtgatattattcacagtgaggttggtcatgtatgacagtatgagtaactatggactgtcataggtatcaccatgggaaaaaaatcagtcagtttatt

SEQ ID NO: 19569 - DNA, 5297 bp, Oryza sativa
  ref <308>: DATABASE ACCESSION NUMBER: AK069921
  ref <309>: DATABASE ENTRY DATE: 2001-12-06
ctctccccattctctccctctcctctcctctcccacctctcctctctcggtgcagatcccggccggagctgcggtcggagggcggtggcggcggcagctaccggcgatggcagaggcggctcaaggcggtggatgcgcggagggtggaaccagcggcggctcccctcctcccagatccggtgtagacggctgcggaggatggaggcggcgtggagggtggacacggcggcggctccgccgggagggcagtggcggcggccgtctcctccagatctggcgccatcggacccaaaccctatcctgcccaacgctcggccgccgcctcacccacacggggcgcaggactccccccgccaccttccgccctccccaactcgtcaccgtcgtcgtccgccctccacccgccgccgacgaagtcatccgtcctcccccgctctctgctgcccgtcctcgtgtctccaccgctccacctccataccccacgccgttggaaagggggagagtgtaggggcaaggacggcggcgcaaagatctgcccccctgtcctcgggagcgacggtggctcgcggatccatcggcctctgtcctttggagctgctaggctcaagtgggaaggacggcggcatgcggatccatcgccccccgtcctcgggagccttagcggcacatggatccagcggcctccgtcctcaggaatggcatggcgggagcgggagggccggcagcatgctgatcttcctgcctccgtcatcgcgagcggcggcggcgggcttagacgagcgagagcgagggcggctggcttaggcgagcgggagcgagtggcagctgcaacaacaacaacagtgatggtggctgcgacgacgatgatgatgctgacggcggctgcgacgaaaacgacgatggcctcctccaaccccggcaccgggccggccgtcggcgacgacttcacctgcctcgatcacgccgctgccgcccaatcctccctcacctgcgagatgacgaggggcttgctcagcatcgagcccttgacgagttggagtgcgcagtgcatcagattcagaccaccttcgccgcctcgagcttgacctcgtgctcgctacggtactccatccttcacccccaccaccaactcccccttttcccctcctgctttctgcttgtgttgactcgatggagagagcaaaatccactcacctgcattccttgagaaggcatggtattgctctttctttgaacaggaacggctgtattttagattgttttactgtgtgatgaaaaatagagagagtttgtgagtttcaaatgagcttttctttggctccattatactgatccacggtggtgtaggatcatacgagaccaaacaaacctaccagagaggggtgaatggtaggaaaaaccaaaaacccaaaatcttttacagaattaaagattattctcgaacgaagtcggtgacgaggtctagtcgccgctggtcgaaccgcccacctgccgccggtcagaccgcccgaacacctgcggtcagactgccgctatcccaccggtcagaccgcgtgcacacctacggttagaccatcgggacatagaaataccggtagatgacaaactcgaagatgtagattgaaactttttgactttattgcatcaactagtgtttacaaagtgcacaaacagcactcctcaccaaaatctcaaactaaactcgaaaccctaactttctctcaactctagtctctctagaaccaatattaggaggcctcaccctccctctctatttatacataaaaaacctcctactcatagtagatgtagaactactatttacaataggacttaatccctcaatttccttattctccaaaaccacagccgaacgctcctgtgccggctcggtctcggtctccttcctattcctccacgcgctgacccttcctccaagcaggccgccaactcaccacctgggccggcctgtctacaacacaagcaagcccacgtgcacatcccagccgaggcactgccgcttgccgccatcacacatgtacagcacacgtacatgcatccccgctacagtacctcgtgtactgtagcacatcttttcttcttccagtttcttcgtaatttccttcgctaacaccgacacttgcacacacacctcgtgaagcccgttgtgaagatctctcccacacgatgtccatccaccgtataccatctcgtatccaacttcgtcacccggtatccttgaccttctggatctcaactcctccatgaatctagtcccgatccccaccgttgaccgaagttgacctccaagaatcctgactctagtcaatttcttatatggtatctcgaccgcactacacatctgttcctcattgaacatagtcccggtcctcaccattgaccaaggctgacctcaagtcacctacacacaatcagacaaaacaaccatttctgggcacagaaatcacaacctgatccacattagtcacacgcacttacaccaacatccacacattttttcaaaccaattcatcgattaaatcatttgcatagctaattgttcatcacaaatattaatcatgacaatattcttttcgataatatgatgcttgcttgcatagctttccatgaagattatattgcacccatgccttctcatcagcattggctactcactgcctaaatttcataaaattgccgtctcacagctcctccttccccctcctctcttttttgttaactttggttttcatagttcaagaatatgacacactttgggcattggtaggatgtgttaatattgcgaaatgacaatggagaagtgggcactgaaaagaacagtcgatcgtgtgttgcctaatcgtcagacagttagatagtagatgaagcattgttgtgaggctgccactttcccaaggagaacgttgtccatgccatgggccaggctatcgatagcagcgcatcttctggttgcccatcgatccatgtccaggtacagcatagggttttgttagggcgctagcgttagggtctaattcagggtatgagtgcttcagggactgcacggccatcgcgctgggtggttgaggagccctgcgactatgccgcactgtctgaatcaatatgcgatgtatgatttttgttatgcacgatacttagcctgctaacctgaatacagaatagttgcctttgctcaactattttgataggtaaatctgaaaccactgaactaaattaattttgctttggtgagttcatttataaggtagggagcttgtcctacatcacattcctgactccagctttctatatactacaatagttgtctttttctatgtttttgagaattgtgcctgaatttcactagatcgcgtctttttgaaatgatatcttaggttgtttgcatgacatgggtactactagattgctaccaggttaactggttaagtctattattgatatgaaggattatttcagtcagacttacaaactgaaagatttccaaacttgtcagtgacttacaaaaatgtgcaaatgtatctgttgtcttccattaatccaagtatatttctccctggggcactgttgatattttacgcaatcttgcaagtatcaactggacatgacaggccatccctcctaaataaagttacctcatttgtttctcatcaatgggatatgcatcaagtgtctaaagatggcattgtcttggagaagaattctgatgggggtaaccgattgcatttccccctccagttttgaaattatatttttgctatcacctatttactactttttaatttttgttttcagtgctaattttataatcaatgtaagtattttattgcaaaattgaaagatcggatcatcggaggaatgttccgctttggtgtatgaacatgttacagttgtattgaacaagcaattaggtgagcaaggcgaaattagagcgaagaagaacctgttggcaccatggctaagggcctccttcactggaaattctgagcatgcttggtcctgcaatcctgctgatgaaaacagtcgaaatctatatgtaaccctacctccccaccatttgcaatgccctacttgtagattgtatcagctgataccatcaatgccactgtaggtgattattgatacctgactcgctgtctcattttgcaaagatgatccagagatttgaaaaaaaaacgtttaagtaaggcaatgcatcagattagcacatcatgtcaccatactggttgcgcggcgtggcgccgcgcatgttcccttctatttaaccaataaatacatgattcatttgcttctccatgcttaagttctttgaaattagtatagattaattgataatacgaaatgatggctctaactcccattttgccttctgatatgatcagtaacctatatgatgaaacatgggttatgaggttatctagcttgttcagaatgaatcaaataacttctgtgatttttttcaatataggatcttcacgaagaaattgcttttgtatcttgctcttcatgaatgaattacttttatgacttgttcttcatgaatgaatcttgacaatgaaaaaatatttgattctgcagatgcacgcctctttctgggatctatagagttctttcggggttctatagagttctttcgggatttctggtgggcatcaagcaattttttacgtgatcaagagattactcttttcctgctgaatattaaagcaaaggtttgttcacatctttttttttttaccgaagtttttcagatccattatttgattaatccaatttgatattcaatttttttcctcaagggatgactgacttctcaattttttgtttactcagttgattccatctgttgttgcatttatttcggtttccataagcctcttcatgaaggattcattgccatacatcccaatcatattatttggcaactatataagctgaatttacctgcattgcttccgaaagaggctggaagcagtcttttaaaggctacccaagtgatgaagtcttattctcttgcttcttctctgaatttttgaggtactgattttctcttgggatctgtgttgtttctgtaagccagctgctgctgaagcctcaaggcaaggatctttactgtggagtatgcataattactgaacacaattacataaacttgtctgattcaggaagaggacaaattgggacttgggagcaagagatgtggtaggactagaggagagagccaattgtttgtcatgtacaggattctgttcttggtaattaattccgaaaggaaatcg

SEQ ID NO: 19570 - DNA, 687 bp, Oryza sativa
  ref <308>: DATABASE ACCESSION NUMBER: AK069922
  ref <309>: DATABASE ENTRY DATE: 2001-12-06
gatcgatccatccctctaccaaccaagaaacaagaaacattacaccaaaaaactagctagctagccaatggcctccatgtcctccttccgacttgccgtggcggcggctgcactattggtcattggctcatgtgccacagagctcaccttcaaggttgctgagggctctagcgccactagtctggagctcgtcaccaacgtcgccatctctgaggtggaggtcaaggagaagggcggcaaggactgggtggggctcaaggagtcaggctctaacacctggacactcaaaagtgaagcaccactcaagggccccttctccgttcgcttccttgtcaagaacggtggctaccgtgtcgtcgatgatgtcatccctgaaagctttactgccggctctgaatataagagtggcatccaactctaagtaacaggcatgcatactcttgtgttgggtcatattggaattatgaacctctaaataattatgtcttaaaagagatcactccatgttcgagcgaaccattaattaattttctattaattaattttctgtggttatttttttgtaatgggctagtggcaaaataaggcatacatgtgtactccaaaatattgctgtggagccatatgcaaagcatggttttgaatatatgttatttatataagatatatgggaaaaagtatatttgg

SEQ ID NO: 19571 - DNA, 4256 bp, Oryza sativa
  ref <308>: DATABASE ACCESSION NUMBER: AK069923
  ref <309>: DATABASE ENTRY DATE: 2001-12-06
gagggaagcaaccaaacactactacttactgctctggctagctccaggccaggcaaatactcgccagggcagcaaccaaacacgccctacaaatcacaaaatgccccaagtttctctccgcctacgaggccccaggctgccctttcccgtcctccctgcaatgcctcaagattgctggctgtaaggagggcgtgcagaccctggatttcatctcaaacctcaacttcctcacagaactacacatcgatgattgtggggaggatttgagatgcgagggtctgtggcctctcctcacccagggtcagctcagcgaattagatgtctttggaacacccagattctttgctggtttggatcccatactcggggggctgcaggacggacaagagcagcagcttcctcctcctcttcagtgttcctccaagctgcaggagctcaggacggatgacttcgcaggtgtcctcgtgaagcccatctgcttgctcctctcttcctccctcaccgaactacgccttggatggaacgacgaggtggagcgcttcatgaaggagcaagaggaggcccttcagctcctcacctccctccgggacctccaatttttgagatgcagtaagttgcagtgcctccctgcggggctacatagacttaccagcctcaagagattaaagatcatcggctgtccatccatcaggtcgctgcccaagggtggcctccccagttcactgcaagaactagatgtcggatactgcaacaacgagaagctcaaacagcggtgcgggaagctaaagggaaccatcccaaaaatcatactagactaacaaagggcactgccttcaagttgtacattcctgtagccttgtagaacttcacaatctatccatgcactgttccccaacatgtggatctcatgtgatatcctctacctgtacatagatcttgtgttcttatgtgagttccagtagacttcttaatactttgggtgcatatttctggtcgtcactcctgaagactttagtggtgtttagctagttgaattggcatacattatggatcaaaataccatcatggcttattggcttaataactgtggaaaatgataagtttgcagtgttctgcaactgatattaagatttagatctgattattggattgcaagacagatgtggcagaaacacatctttggaaaccaacaatgtggcagttacatgcttgaaggtataactcccatagtctcatctcgaatgggccttcacaagaataaccatcttatcatgtcagtgtatcatggagtcccttcagatttcagtctattattatgctcaataggttcttatggaagattcataagtatgacttttgaattgcttgctagttgtgcgctgtagtacgctagcacagctttgaaagtgaatagcgtggcaataaacaggcctgatagctgccatagactcaatgtgtgttcaagtgccaagtagtcctggacactatttgcacttcaaattatatgaatgctttcatgttattgaacagaccataattttccgctgcagcgttgtacaggagtctttggaacacccagattctttgctggtttggatcccatactcggggggctgcaggacggacaagagcagcagctttctcctcttcagtgttcctccaagctgcaggagcttcatacggatgacttcgcaggtgtccacgtgaagcccatctgcagactcctctcttcctccctcaccaagctagtccttggatggaacgacgaggtggagcgtttcacgaaggagcaagaggaggcacttcagcttctcatctccctccaggacctccatttttggggatgcactaatctgcagtgcctccctgcggggctacatagacttaccagcctcaagagattagagatcatcggctgtccatccatccggtcgctgcccaagggtggcctccccagttcactgcaagaactagatgtcagagctagctggaacgagaagttcaaacagcggtgcaggaagctaaagggaaccatcccagaaatcatactagactaataaaggtgttcttttgtgagttccagtaggcttcttaatacttcggttgtattatattttggtcatcactcctgaagaaccagtggtgttcagctagttgcactgacatacattatggatcaaaatatcatcacggcataataatggtggaacatgttaccatttcttagtgaaatttaatggcgtaccggaccgtcacaagaaaacccaatcaaatcatatcagtgcatcatggagtcccttcagactctgattcagaactacgattattggattgctagatagtgcggcagcggcacagctttggaaaccaacagtgtggcaaactggcagttacatgcttgaaggttttagttcccatactctcagtgttctcaaatgggaacaaactgtacaatggcaagacaagtgaacgacacgatggtcaaaagaagagaagaaaaactagtgtgcctagcacactcttgaagcgcaattgaacctctgtaactccggatgcacagtatttaacgtgctgcccaacttcatacttgcaatctcgcttaactagtgacagaatggtaacattgcagtcttcttctactgacagaggcatgaaaatggtactttctggtggatgcaactttatctgttcaaaatgctaatgtgtcaatggtagacgtaatttttggaccacaggttgtaaaatcagtcctgaatctcctaggaccttgatgtcttggttgcagcctctgcaagctacaaatctcttcccttgtgctatcctcaatgacttgctcttcattttgttcatccatttatgcagtgaaccaaagcgccttagattagactgtttgcactctattaccgggaattgttgcagcgaacttccaaacaggttgtcacttatgaggaattagtagtgtttggctagtcatggcataacaactgtggaaaacaatgagtgttcagtgttttgctacttggattaagaacactcacaagaatagccattacatcatattagttcattgtggagtcccttcagatctcaggttaatattatatggaacgcgttaatatgagaggtaaatcttctattgacaccaactacatgaaatcggtactgtccaagggatgcagcttaatctgttcaaggcgctaatgtgccaatgccagatgtaatttttgaaccacatgttgcataatatgtaggaacaaaaggcttagttcaatgaacataaatgactggaattattgcaatgaacgtccaaacagtctagctccttccctttatatgaagaagacataatatggataagtgctcaattgcactgtctcttctcagcggataaatggcaattgggcaattgatctccacccggtgatctccacccaagctcaacttgaattagatatgcttatgacgactttacaatcccagcagatacatcctgaaagaccagataacagaagctgtacactgagcccggttggatttacgacaacagcatactatgagctaataacatatcatggcatcctatggcgcccggcacacttcatctggattaaagcaataccaaacacctgcaaaatcttcctttggctagcctttcggggaaggctaaacacaaatgataacagggtgaagaaatgctgggcatctgatccacattgtgcggtttgcccggctatagaaacagctaatcacatcattctacgctgcaagttagccactgaaatctggaacaaactcaacctccttgatcaggcaattcagagtgctgacattctacagttcaccgagcatgtcctgggaattctaccgactcaacttaaactgggatggccaatatgcttcgctgcctgttcacacagcttatgaaaagcacgcaatcatagaaccttcagagaagaagaactctccgtaactaatgtgacgcatcaaatcaaggactgcctacacttatggaaaaaccgagttaaaccacaatgtcagccgccaatatgtagttgggcagctctactagcatagatgttgtttttctgtttgtttgtggttctctctaatccctttcttccttcttttctacctcttctttttcttgcctttctgcttgaatgtatttttgttatatcttttttgaccaccattaatacaatggttataaggtagagcctctctaccttttcagtcaaaaaaaaatatggataagt

SEQ ID NO: 19572 - DNA, 1687 bp, Oryza sativa
  ref <308>: DATABASE ACCESSION NUMBER: AK069924
  ref <309>: DATABASE ENTRY DATE: 2001-12-06
gacccatctctcctctccacctccacctctctctcctcgcattcgtgctcgcctcccaaatcccaaaccctagcggggggaggggaagcccgcgcgcgccgccgcagatcccatccctcgcgccgcggcggcccaatcgcgcggcggccatgcggatccgcaagtgcgcgtcccgcctcctcggctcctcctactccgcctccgccgcggcgcccccgccgcccgtgacgggggcgggggcggcggcgccaggattcgagctcctcccgctcgcgctggcgacgccgccgccgctcccgtacccggggagccacgaatccggcgcgggggccacctgcttcgccgccgcggctgcctccggggagccctgcgagctcagccgctcgccatgggaccttatcggcgagctcaacatctccgatccccaggaggaggacgtcgtggagaagtacttcgtccatgtcgccagccgggctagctggctcttcccgaccagcatgcccgccgccgtcaagcagaaggggctagctgcggccggcgagttcagcaccaagatacctaataagaagttcgccaagaagacggcgaagaagccgtcaccggcgacggcgaagaagaaagaggcggcagcggcggcggtgaaggaggaggacgaacctaccaagaaaccaaagctcaagaaagaagaggatgactccaattccgccatctccgccgccgggggagcacaagtctggacatgcaagaagaacgacggcaagaggtggcactgccagcggcgggtgaggcagcccaactccctctgcgactaccactccgaccagaagcgcggctactacaacccgctgtacgacgaccccaccgacgagacgtatgctccaccggcgtcaccgccgtcatcggtggtgccggcgaccgcgtcctccaagacctccaccagctcctccaaggcgcggaagaagaaggtggcggattccggcgaggggttctactactacgcagggttcggcccgttccgcaccaagaggcattgcaggagcagcagcagcagcaacaactacaacatgcaggatcagcctccgccggtggaacaagaacagcacgaggaagaagaagcgcggtcgccggagattgctgatcctcatcctagtgcaggtaacaaatccaggagcggtaatggtgatgacgctactactactactgatcgtcagacgacgctggcgtcgacgacgactgcggtggcagctcgggatgatttctccagctccgacgacgacgacgacgacatcgccgggatagcaggcggcgacgaggagagcagcgacgacgcggcgcggatcggcaggctccgagccggcatcaacggtgacgctaggaagaataagagccagcaggctcggaagaggtggaggaagcccgtgaaggcacggtcgctcaaatccttgatgtgagcaaattaaagcatagtgctagaggagaagaattgaaagctagaagaagaagaagatgatgatgatgatgcttagctaaggctcagggttagcttagcttagcttagttcgccatattatacaaactgttcgatcgacactgtgttttgtagcctttttggttgttcgaatgccttatgtcaccccgttgaggtttccgcttgagatgcagcaggaattttccctcgttttctgcg

SEQ ID NO: 19573 - DNA, 2033 bp, Oryza sativa
  ref <308>: DATABASE ACCESSION NUMBER: AK069925
  ref <309>: DATABASE ENTRY DATE: 2001-12-06
gggagccagcgagcactcgagctgagagcaaagaagcgcatccttctcatggcggcctcctcgtcgtcggcggcggcggcggcgttgtcgccggcgatctctcttcacctgctccggccgctcccgtgcagagccgtactcctgtccaggcaacggaggccatttccatcgccaagagctggctgcctggcggcggtaagagctcagcggcggtggctccggtcgccggagatcggccggtggaggaggcgcgggggctacgcctgcctctccttcaactccggcaataagccgcctccgccttccagtgagaattcagacgaatggccaatccttcgccgatgggatgtgccgtgggagtggcagacggtggtgctcaccatggtgggctgtggagtaagacagctttgttctgacaggattggttgagcaatcggttttgacgtatgtggggtttagagctgtcgaggcaacggtagatcagaaggcagaaatacttttccttggacaacttagcgtgacagcagttgtgctgggtgttgtatatggcatcaccaataccttccgaccactgccagatgatatatttcgttatgatattaaagaaccattcaagcttcaaaatggctggcttctgtgggctggagttggtctctttggcgctataatttctattgctttagttggggttgctatgacttatctgaatggtgaacctccagaaagagaggtcaggccttttacatactgtactatatagatttttctcaggccatacaattttattcccatttaattaattattacccctcaatctttagtttttaactcacattgttttaatcccattcatcattaacctctaattcaatttgttcagcaagaaaaaaaacacatcttggaccgcttaatattcattaaacaataacctataacaatatgccaaatggagcaattcatgcaatttgtaatagaccattgtctttgattacccaacccttttggcttgccttgcatgaccctaggtcttatctaatcacaatcttctcatgtatggactggattaagctgattgtgattaaacaatgacaactcaaggctatcatatggtcacttgtgcaagattcagatggtagggaagccagaaagataggttttccatgagtagcataggaattagcaaatatgcctattctctttggtttgagatgagacagcataattaggaacagtttgcggcataattaagatggaatgcaccctttgataaagtgaagcttcatacacaaggtttattcaatgctttgactgacaagcttatgtggtaaggcctcactttacattgataggggcttacgcttttccaaattgaatctcaacatgttttgtgtacttacctcctgttatactgattaccttttttcagtgtgctgtttcttgagtcctgattgctgatctatttctctgggctttttttttcagactgactcgttagttcttttattgccattaatcggctcatcaagtgccagcactgcttttctggtgggcattactggagttctagcaccaattctggaggagactgtgtttcgaggatttttaatggtgtccttgactaagtggtttcctactccagtttgcatacttgtcagtgctgctctatttgcctttgctcatctgacacctggacaattcccacagttgtttatacttggtgttgcgttgggtttttcatatgctcaaacccataatcttctaactcctatcacaatacatgcattttggaactcgggagtaatattactgttaacctttcttcagctgcaagggtatgatatcaaggagcttttgggagcatcttgaaggctttgactgatcagcctacggctttgtgcatatgctttagtaacttgatcaaagatacttgaaaagaacaatgggttctcctttattttactgttctctgtaatttcatgtttcccgtaactcccagaagtaaattacgagcgaaatatattgtgtttgtactc

SEQ ID NO: 19574 - DNA, 1632 bp, Oryza sativa
  ref <308>: DATABASE ACCESSION NUMBER: AK069926
  ref <309>: DATABASE ENTRY DATE: 2001-12-06
gctcttttccgtcctccaccctcgcgagccaagctaccattctcctcctcggctgcggcggcttctgcggcggcggcgatgcagatggcggcgaccaccaccaccaccgactcctcccaggcggccgtgcgcttcaccaccctcaccctcacgcccacccgcacccgcacgcgcacacgcacccgcaccaccccatggcgcaggcgcggtgggtcgtcctgccttacccgcctccgccgccgcccatggtggccgctccgccgcccccgccgccgcagtacgccaagcacttcgcggcggggccgccccccgccgcggcggccgggcggcgcacgccgaccccgcccgcccccgccggatccggcgggaacgggtgcgaggagaacaagacgatctgggttggcgacctccagtattggatggacgagaactacctccacagctgtttcggacccagcggcgaggtagtgacgataaaagttatccgcaatagacaaactggacaatccgagggatatggttttgtagagttctactctcacggatcggcagagaaggctcttcagaattttactggtcatgtgatgcctaacactgatcgacctttcaagttaaactgggcttcatatagcatgggtgaaaagcgatctgaagttgcttctgactactcaattttcgttggtgatctagctgctgatgttactgatgaaatgttgatggagctttttgctaataagtaccgctctgtgaaaggagctaaagttattattgatgcaaacacaggccgttctaggggctatgggtttgttagatttggagatgacaatgacaaatcccatgcaatgactgaaatgaatggtgcgtattgctctactaggccaattcgtattggacctgcaactcccagaaggtcttcaggtgattctggctcctcaacacctgggcattcagatggcgattctactaacagaacggtatatgttggtgggctcgatccaaatgtcagcgaagatgagctgaggaaggcatttgccaaatatggtgatgttgcctctgtaaaaattcctctagggaagcaatgtggctttgttcaattcgtcagcagaactgatgcggaagaagcactgcaaggattgaatggatcagtcattggaaagcaggcagttcgcctttcatggggccgcagcccatcacatagacagtctagggctgattctggcagccgaagaaacaatatgtactatgggacgccattctacggtggatacggttatgcctcccccgtcccgcaccctaacatgtatgctgctgcatatggagcctaccctgtctatggcagtcagcagctagtgagctagagaagagagagagagagagagcttcattccattccctccaatggaaaacaaggttttggtccggtcagcatggtagcgccagatgtgaggttatagaacgtcctaaaagcgagtgaaacaggtaaaatgaatgtatggtatctgtagtgttgtctgtgttgcaagaagtataactcaaggcttgtagacacaagtgagtcgatggtattctttcaagaaattttgacttgctaataaattaaactattgtttgtgtgtccccgttgtgcgaagt

SEQ ID NO: 19575 - DNA, 1663 bp, Oryza sativa
  ref <308>: DATABASE ACCESSION NUMBER: AK069927
  ref <309>: DATABASE ENTRY DATE: 2001-12-06
gatcattcaataacaccccccccccaaaaaataatactttattcctctctcttaattttatttttttactttgtttgagagagagaggatcaataatttcttgttgaaaaatggagattattagtcctagtagtagcagcaataacaattcacctgttcttgcaacatttcttgtggttcttgtagtgctcctagcatcatcacggccagcctcgtcgcagaaccagcaatccttcaccatcaaccccggcggcgccgcggcggcgaggcccggcggcggtaaaggcggcggcggcggcggcgggccgggcagcttcagcgacttcctgacccagaacgtgcagcactacgtgctgagcgagcagaagtacgccgggaaggtgaaggcgctggacgcggagctgtcggcagcggaggccggcgcggcgaggtacgtggtgagcggcgacgggaaggggaagttcaggaccatcaccgaggccatcaaggccgtgccggagtacaacaagaagagggtcatcctcgacatcaggcccggcacctacaaggagaagctgttgatcccgttcacgaagccgttcatcacgttcgtggggaacccgaggagcccgccgacgatcatgtgggacgacagggcggcgacgcacggcaaggacggccagcccatgggcaccatgctctccgccaccgtcgccgtcgaggccgactacttcatggcctccagcatcatcttcaagaacaacgcgccgatggcggcgccgggagcgcatggagggcaggcggtggcgctgcgggtgttcgggagcaaggtggcgatgtacaactgcaccatcgacggcgggcaggacacgctgtacgaccacaagggcctccattacttcaagaactgcctcatccgtggcagcgtcgacttcatcttcggcttcggcaggtccctctacgcggattgcacgattgagtcggtgacgaaggaggtggcggtggtgacggcgcagcagaggagcaagaacattgccgaggccatcgacaccgggttctccttcctgcgctgcaagatcagcggcattgggcagatctacctggggcgggcatggggtgactcgtcccgggtggtttactcctacaccaccatgggcaaggaggttgtgccgatcggttgggacggctgggaagtccagaaacccgagcatagcgggatatactacggagagtacaagtgcagtgggcccggggcgctgcctagcaagaggatcgggtggtcgctggtgctgagcgacatccaggccaagcccttcaccggatcacacttcgtctacggcgactcctggatcctgccgcctcccaagagcatgtaattctgcctgggctgggctagctaaccacaacatgtgttgtgtagggccgtgattttttccagcccattgggccgacaccctcttgactggttgcagttaagcagaggttggttttattatttgtttggaactatgatttgaagatcatatccaagcatgcatgcacatactttgcattattggggggagcatgatgttctgaggagcggctgatgagaatctggaatgagtagttctacaagcttatggcttcttttgtattcggattctgataatctgagtgagaatctgtgttgtttgagaagctg

SEQ ID NO: 19576 - DNA, 1998 bp, Oryza sativa
  ref <308>: DATABASE ACCESSION NUMBER: AK069928
  ref <309>: DATABASE ENTRY DATE: 2001-12-06
ggttcgtcgtcgtcgtctccctcgccggccgcgacgccacgcaccaattctccgattcgtcgaggagccgaggaggaatcccagcctcgagtcgcgcccctgatcctccaggctccatcgatccgaggaggaggggcgcgcgcgggattccgtcgtcggattgggttgggttcgcggatgatgggggcggagaaggcggaggggatggaggagctggagctggaggagggcgggggctcgccgtctccgtcgccgatgacggccgccgggaagatgcaggcgctggacttcgagcacatcgggtcgctcgccgcggtggcggagtcgctctcgacggggagcaagtggcggagggcgctcaccagcgtgcgcgtcgtcatcctccaggccaagatcaacgtcctcctccccttcggccccctcgccgtcatgctccactacctctccgccaaccaccaaggatgggttttccttttcagcttaatcggcatcacgcccttggctgagagattgggatatgcgaccgagcagcttgctctctacacgggtccgacaattggggggctgttgaatgctacctttggcaatgcgactgagatgattatctcgttgtacgcattgaaaaacgggatgatccgtgtcgtccagcaatcgctactaggctctatactgtcaaacatgctgttggttctcggttgtgctttcttcgctgggggtcttgtccatcccagcagggaccaggtcttcaacaaggcgtcagccgttgtaaactcaggattgcttttgatggctgtcttgggtctaatgtttccagcagtacttcactttacacattctgaagtgcagtatggaaaatccgaagtttccctttcaaggtttagtagctgcatcatgcttgtggcatatgcaagctatctgttttttcaactaaagagccagcgaagtctgtacagtccaattggtgaacaggaagaagaagtaactgaggatgaggaggaagaaaaggagataacacagggtgaagctatctgttggctttttgtgttgactatttggatttcgattctctctgggtacctggtagacgccatacagggggcctctgaatcattaaacatgccagtggcctttattagtgttattctgcttccaatcgtgggaaatgctgctgagcacgcaagtgccattatgtttgccatgaaagacaaacttgatattacacttggagttgccataggatcgtcaacacagatctccatgtttgtgatcccattctgtgtggtaattggctggataatgggccaacaaatggacttgaattttcaactgttcgagacagcaactctttttataacagtactggtggtggcatttatgttgcaggaaggaacatcgaactattttaaaggccttatgcttatcttatgctatctcatagttgctgcgagcttcttcgtacatgttgatcccgattcaagtaacaacaagtgaaagatccgcaacaatttgtggaatgataagggatgagcatattggaatgtcagcactagcaaacagcagtatttgcaacatatcatctgtccgagtcctgatttttgacggcctatacctgtcagcagtatctcacacggaggcttcaacttccggcctggagttgcaagggccctgatgcggcttttttaagatagcgacggcatcgccctttgattgagaacctgtaactttattatgggatagtgtaatgtgccaagatcactagtctgtatttgctgaagaaacacttgtcgcgatttttgatgatgttgttgtactgatgccaatgaactggctatagcgttgcagttcaagggacactggataactggactacatagtccatacacatttccaaacggtgccagttgtgcaacatgatttgtcactgcacataatttatttgtctaggatgggttgctcgtttttgaatgcttgcttgcttataagagaacaggtttctag

SEQ ID NO: 19577 - DNA, 1777 bp, Oryza sativa
  ref <308>: DATABASE ACCESSION NUMBER: AK069929
  ref <309>: DATABASE ENTRY DATE: 2001-12-06
gacgcagccacagcacggctattccccctaacccccgccgccgcccagatgcgaattctccgccgctttccgcgtctgctccgacgctctaacgccgccgcccgatctcctgccccgatgcaccgcctcatctcttctccctctctcatagcatctgcagcggctagctggtgctggtggtcaccattgcttgctcgaggaggacctgtcgtccgtcgtgtttcccgatttccttgggaacctcggaacatgaccaccatcagtcgagtaaaaggcgacgagtcatacaggcgacttccatcccaggaaaagaagcatactgcgatcactcaaggtatgaaaaccattgacaccaggggcacaatcttggaggctagagctggagatgagaaaagtaatagagatgcggcgtcctcagaggtttcatacatcaaatacgatgtactggggcaaagtgcgaagcaggatggctgtgatgaggatgatcgaaggagtgaaacggaggaacatgttgaggaggacgaagttcttgatcctgaagaatatactgtgaacaacatacttccaaaaagtagacaccgtgatggctctatatatagggacatcatggacacaccgtggaaaagggagtttcatattgcagaccgtaatgagactcggttggaggcaatgaggttttcgaatcccacaaattgtgtcattcgcagtaatggaacttgcatgtcacatgttcattgcaacatgctgcaaattttatcattggagttggctaaaattacactggatggtggttaagtagagttgtatggatacatagctgtgcgggatgatctagatccgttgcttaattatattgtcaactgtagcagggatgatcccatcattgtggagcagggttcgctcatcaacatggaaggccctaaccgaggaatagacatgatggactatgctctaattgaatatgacatgaggatcaagacaggtgaacaagaaaaagatgacctacagctgattgatggtgcatcaatgataggctctggaggcctatggaatcggccagaaacaatttgcattcctggcgattacggtgcagttgacataactttatcacgttttaattgttcagctgaggccaccgtagagattcttatatcagaagtgcaaagcagtttcaatttgttgctcggttgtttaaccagtgacttggataaggaaatccgtctctttgatggtgtcatcagtgagtcacgtgatttaaagaggtcggtggttgctgtaacgagggattctttcatagatttgaagttcgaagtgggcgcgtttccatccagtttcgaccagcattatgtttccttcaaggagaaaatccatggctatgatactcaagaaataaagactgattttgcgttaatctcagtaaaggtgacttggtcagctttgctttctggacgagtgatacctctgtttctgtaacagagtgggccatgcaacatcacatttacacacccatgaatatggccctaacacacgctcaaagagataaaaatcaacggcacatctttgatctcactagatctataatgttaactttattatacttattatttagaatgtatatttcgcatatgaaattatgtatccaagtttattacagcaaatgcttgaataacggcattgcacttacctaacctattttcagacttatgagggagaatctagcgttcaaatttgtgtcttgtggactttgaatagtcaaaatcgatcttcttttatggct

SEQ ID NO: 19578 - DNA, 1870 bp, Oryza sativa
  ref <308>: DATABASE ACCESSION NUMBER: AK069930
  ref <309>: DATABASE ENTRY DATE: 2001-12-06
gactcgtctcctttggttagtgccattggtagccccgctcggcgacgccgacgcgatttcctctcctcgcgccttactgaattcgaaacgaaattgtagatcatatagcagagagagagagagagagagagagagagaggaagcagacgcggaccccttgatttctcggctagatctgagatatcatcgcatcatgggactgctggggttgaatcggctcatgtccatacagcgggagcagcgctgtcgccaaatcgaagccaatcgtcttcttgcatccactgataaaagaaaggggtctccctgcaaacaagataattcccgatgcagcaaaagagagagatattctcagccagaccttccggaggacatttggcgccatatacattccttactgtcacttcaagatgctgcccgtgctgcttgcgtgtctcgggcttttctatgtttatggaggtgccgtccccacctcaccttcagtttgcaaactctgggcttgagtgaatggcatgtaaaaagggtggaatagctagagattacaataaaaaagttgaccgcatactgaaaaaacactcaggcacaggaatgaagaaatttgagatcgaattctatggtccttcaaatgcaaacacctattatcatctcaataattggcttgagattgctattacatctggaattgaagaactcacccttaggttgactccagatgtgacaaagtacaacttcccttgctcacttttatctgatggaagaggggacttgattcagtctcttcacctttcccactgttccttccgtccaacagttgaggttgttagcttgagaagcctgacaagtttagatctatgtttggtgcgtattacggatagagagttaggaattctcctttccaattctttagttttggagaagttgggaatcaaatactgcgacaagattaattgcctgaagataccttgtgttctagagaggctcagttcactggaagtgtttgaatgttacagtctacaaatggtagagagcaaagctccaaatttatgcagtttttgctttggaggtgaacaggtacagttctcaattggagaaccgctgcaaatgaagaacctgcaagtgatcttccccaacagtatcagttttggccgtgctgaacttccatttagtatgcctaatcttgaaactcttaatatcagctcacgttgtgagatgtcccatacaccaactgcacctggcaaattccttcacctcagatacttgggtattacttttgcgggatggagattttcacgtgcctacgattatttttctcttgtttcttttcttgatgcttctcctttgttggagactttcatcctatgtattttacagaaaggaaagcatgacttaactttaagggatcctatatatccaaggcaaatgtctgaacgccagcatgacagcctaaagaatgtgaagatcaatggtttcagttccacaaaaagcttggttgagctaacatgccatattcttcagaacacaacttcgcttgagtgccttacattggacactactcgcattgagtttcggtgttctgatagtagtgttgatgtatgtctcccatcggacagggatgctatcaagggagcgcataaagcgctcttggctatcagaacatatattgagggtatagttcccgctacagtcaagttcagtgttctagagccttgccgccgttgctacgcttggtaactatgccaaatcattgtaattaaacagtatttaattgtgtaacttcagatgcgttgtgctttctgttttaaaatcagtggtgtactggtgtccataaaaatgctgaggtatgtgctttggtttattattaatctctttctgt

SEQ ID NO: 19579 - DNA, 2195 bp, Oryza sativa
  ref <308>: DATABASE ACCESSION NUMBER: AK069931
  ref <309>: DATABASE ENTRY DATE: 2001-12-06
ggtaaaaaaaatatagtcgtcgtgttcctccggctcggcggctgcattgaccttgggctccgccatgaactcgatgctgctcaggccgctcccgagcgcgggggcgagcggtggtcggggctcgccggggagggggcgggtggttggctcggcggtgagtttcggcgggcgcgggagatggcggcgcggggtggcggtggtggcggcgggggcgggggcggaggcgtcgtggatggaggaggcgggggtggcggtgctggaggagggggtgaggcggaacccggcggtgtcggactcgtaccggccgccggggatgccgcggccgaacgcgacggtgctggaggcgcaggcgcgggtgtgcacggggcccgagcagacgcgcccgctcggggaggagcaggccatgcgcgtcctcgacaccatcctccgctccggaatgggagaactcaaagatgagccagtatccagtgcacaactgggtgcattcttcgctggcatgacaataagagctaattcctttccagaagccacccaatggagtgagggtgagcgtcgtgccatgagcttattttggccacggcttgtcaatgttcttccccccgaggtgaaatttatagcagatccggaaggaacaatcatgggagcaaatggtttaactggacctcggtatgttggtcaaagcactgcagagatgagacttgtcagtgctttgagagaagttcttgctggtggccatttgggttatgaggaagttcagggtgtactaaaggatgttctaccagttgaattagccagtgcaaattcaactatggttaatgaagcactgctggcagcatttcttattggacagcggatgaatagggagactgatcgcgagctcaaaggatattgtctagcctttgatgatgaattagttgctgatgtcaaatcattgacacactatggtgagccctatgatggaaatacacgctttttcaggagtactctgtttgttgcagctgttagagcctgctatggtgaggcttgtctcctccatggtgttgagtggatgccacccaagggaggcataacagaaggtcagatgcttaaattcatgggtgcaaacacacatttgtccacattacaggccaaaacactactggaggatgagaataccggctttgcatatttgggtctccaagaagcttgcccaccattatattcgattattgggcttagggagcatattaagaaacggccaccgctagctacctctgagaaagttcagcaatttgtgagagcgcgaggaagagaatcaatggttgctggattttatcatgtgggctatgaagatccattgcttatgctcatgaggaggagaactgttcatgctggactagttgtaaagggtgaggagggtgcgctttctatgacaaccaaagaaagatctgctcatgcatcaaaaggacttccagtgaaccattgctcagggttccggataccaaacagcacagatttctccgagactgatggcatttctagagagggtttcagtgtcattgtgaatgctcaggaacttggttttgaatctactgagactccacgaactgatagatcagtcctgaaaaacttggagttgggtttggcagcgctgagtggggagaaaggaccagcctatgacagaatagtcctaaatgctgccatggttgaccacctcttaggctgcactggagctgaggatatcaagtccgcacttgacagggcaagagaagccattgacagcggtaaagccctgagcaggctcatgaattacataaaaatctcgcacaaagtgtcctagctcgcaagtgtgctggctgtacaattttggtttctggtgtcgtggtggaatactctcatcgactcatacacgagcacgagtgctttcaagttgctcagctaacatggagaacatccctgacgtgaatagtcacttgcaaggccttgtcaataaattaactgaaagtctgaaaaactgaaaatgttagcgatggggaatacttgattaatcaatctttctttagccatgttctgagagaatctggctgcgtgtaccatatgcaaattctgttcatgagatgtgtgaccgaatacctgcatcaagacacaagggatgagttatcttgattttgttcgtgaaacaaaatctgcaattctcgttgtaatgggttactccg

SEQ ID NO: 19580 - DNA, 2066 bp, Oryza sativa
  ref <308>: DATABASE ACCESSION NUMBER: AK069932
  ref <309>: DATABASE ENTRY DATE: 2001-12-06
gagaagcccaaaacacacgaagcaaagctgcctcgtctgtgtcactgacagatggggtccatggagcagcagcagccggagtcggcggcgccggcgacggaggcgtcgccggagatcatcttccggtcgaagctgcaagacatcgccatcaccaacaccctcccgctccaccgctactgcttcgagcggctcccggaggtggcggcgcgcccatgcctcatcgacggagccaccggcggcgtgctcacctacgccgacgtcgaccgcctgtcccgccgcctcgccgccgcgctccgccgcgcgccgctggggctccggcggggcggcgtcgtgatgagcctgctgcggaactcgccggagttcgtgctgtccttcttcgccgcgtcgcgcgtcggcgccgcggtgaccacggcgaacccaatgtccaccccgcacgagatcgagagccagctcgccgccgccggcgccaccgtcgtcatcaccgagtccatggccgccgacaagctcccctcccactcccacggcgccctcaccgtcgtcctcatcgacgagcgccgcgacggctgcctccacttctgggacgacctcatgtcggaggacgaagcgtcgccgctcgccggcgacgaggacgacgagaaggtgttcgacccggacgacgtggtggcgctgccgtactcgtcggggacgacgggtctccccaagggggtgatgctaacgcaccggagcctgagcacgagcgtggcgcagcaggtcgacggcgagaacccaaacatcgggctccacgccggcgacgtgatcctgtgcgcgctgcccatgttccacatctactcgctcaacaccatcatgatgtgcggcctccgcgtcggcgccgccatcgtcgtcatgcgccgcttcgacctcgccgccatgatggacctcgtcgagcgccaccgcgtcaccatcgcgccgctcgtgccgcccatcgtcgtggccgtggccaagagcgaggcggcggcggcgcgagacctctcgtcggtgcggatggtgctctccggcgcggcgcccatgggcaaggacatcgaggacgcgttcatggccaagctccccggcgccgtgctcggacaggggtatggaatgactgaggcagggccagtgctgtcaatgtgcctagcattcgccaaggagcccttcaaggtgaagtccggtgcgtgcgggacggtggtgcgcaacgccgagctgaagatcatcgaccccgacaccgggaagtcgcttggccggaacctgcccggcgagatctgcatcagggggcaacagatcatgaaaggttacctgaacaacccagaggccacgaagaacaccattgatgcagaagggtggctgcacaccggcgacatcggctacgtcgacgacgacgacgagatcttcatcgtggataggctcaaggagatcatcaaatacaggggcttccaggtagcccctgcagagctggaggcccttctcatcacccatccaagcattgctgatgctgctgttgttgggaaacaaattgagcctgaaatcggagaaataccagtcgccttcgtggcgaaaaccgaagggagtgagctgagtgaagatgatgtcaaacaattcgtagcaaaggaggtgatctactacaagaagatccgggaggtcttcttcgttgacaaaatccccaaggcgccgtcagggaagatcctgagaaaggaactgaggaagcagctgcaacatcttcaacaagaagcttaatttacaaccggcctcagacatgaaaagaatttagcatgaacaagcaagttccatgattctaatgttgcaaattacacattctgttctgaatagtttgtgtcttccatttatatgtgatgggggaaaaaaacccaggtacaaatggattctgtgcaatacaaagggtggtgttaccgtgttaggtcggctaggtttgctcatttgcagagagacaggacactggggaagccatgtacaaaaatgttcagacctgtttattgttcttgctggtgtctttgtaatattttgtttaaacatttatatcattcattattattgtt

SEQ ID NO: 19581 - DNA, 541 bp, Oryza sativa
  ref <308>: DATABASE ACCESSION NUMBER: AK069933
  ref <309>: DATABASE ENTRY DATE: 2001-12-06
gatcaaacatagcaccaatcaccaatcacctatcagtagtacttcactgctcgctactagtcccctgaattcagcgatcagtataacagcgggaagctcaagaagagatcgtcgatcgatggcgggtgcagcgaaggcgtcgtggatggtggcgatgagcgtgggcgcggtggaggcgctcaaggaccaggcggggctctgccgctggaactacgcgctgcggtccatccaccgcgccgccaaggccaacgcgcgcgccggcgtctcgcggggcaagaagctgcctgcctccgcggcggcggtggcggagaggaggagagcggagaaggccgaggaagggttgaggacggtcatgtacatcagctgctggagtaccaattagtatagctgtgccttctactcttctactactagctttgctataggagtcaggttggaacttggaagtggcaaccatggctgagacttgccggttgcttgttaatttcctccgggttgtatataccacgatgatgatgatgaaaacttctgttacttgagt

SEQ ID NO: 19582 - DNA, 935 bp, Oryza sativa
  ref <308>: DATABASE ACCESSION NUMBER: AK069934
  ref <309>: DATABASE ENTRY DATE: 2001-12-06
gtggcgtttcatctgctagctctccctgccattccagtcattggcattgttgtttcctgtccactgactcgcagttcatcccggattcttctcctctttcttcgccgccggctagccggtgttcgcgctccggcggcatcagacatgtcgaagaaaatcgtggtgaagctgaacgtgcacgacaaggcggagaagcagaaggccatgaaggccgtctcggcgctcatcggcatcgacgagctgtccatggacatggcgagccagaagatgacggtgatcgggatggtggacccggtgaacgtggtgagcaagctgcgcaagtcgtgggcggcgaccatcgagtccgtcgggccggcgaaggagccggagaagaaggaggagaagaaggacggcggcggcgacggcaagaaggacggcggcggcgacggcaagaaggaaggcgaggccggggacaagaaggacggcgatgcggccaagaaggacggcgacaaggacggcgaggccaagaaggaggacggcgacaagaagccggcggcgccgacggagcagcagctcttcgccgagctcatgaaccagtactaccaccggccggcggcgtacggctacaacccttacatgtccgtgccaccacactacgtcgtgcagagcatggaggaaaaccccaactcctgcgccatctgctgaactcgatcgatgccgccatggctagaggtagtagccgagtacgtacacagcatgtgtagtactgtatacgtctacgtgtacgcacgagttacgacgcaaatcactatgcatgaatgcaagcatgctagctactacatgtccagttacatggttaaaagttgttatatcttactaccgaggtagtaactagttctaatgctgtaattttggtgataaggaagatatgtatgcaccatatgtctgtatatacg

SEQ ID NO: 19583 - DNA, 821 bp, Oryza sativa
  ref <308>: DATABASE ACCESSION NUMBER: AK069935
  ref <309>: DATABASE ENTRY DATE: 2001-12-06
gctctcttcctccccgacccgaggcggcggcgaccctagcttcccgattctcccatcccccccatggcgtcccacctcgacttccgctacctcgacgagggcctcggcggcgagcgcgggaagcgcaagcgccgcgaggcggaggaggcggccgccgccgactccatggacctcgacgccgacgccgacgcgccgaggccgtccaagctccgcgcggtgccctccctgtccgacccctccaagcccgcctccttcgggcagcccacctacgacggcgtcatcgccgggcgcgtctccgggcggcgctggaaggaggcccgcacccgccgcgcctccgcgctggcggcgtcccggaagccgaccccgctggagcagcgcgcccgcgacaagtccctgaagcgcgcgtaccaggcccgcgtggcggagctcaaggaggagatccggcagagcaaggcggcgaagcggaagcagcgggaggagcgggagaagcgcaagaaggagaacgtgctccgctcgggcaccaagctgcagcgggtcaccaaccccaagaccatccagaagatcgccaagtccaagaagcggaagcagctcaaggtcgtccccgacgagttcctcggcggcaagaagtcggacgccaaccgccgcatgcaggtgcccggcctagacaactgaagatcgccttaccaaacaaatccttttgttatctgtgatacccatgttacagtgcagcttactagtttttacattgcgcaacgagattttgtactaatgctttagcatgagattttaagtatggtcaatccagcaattatgttggtatg

SEQ ID NO: 19584 - DNA, 2880 bp, Oryza sativa
  ref <308>: DATABASE ACCESSION NUMBER: AK069936
  ref <309>: DATABASE ENTRY DATE: 2001-12-06
gggtaaaacgccttctccccctcctcttccgccgccgcggcgatccctctttcacctccacctccacctgctcaggacgcggccacgcagtagtcgcggagaaaagaaaccgaaaagaaaaaaaaaaatctagctacgcatctcggcccggcccccccgccgccgcgcgctcggatcccccgacggctcgccgccacggcgccgccgccgccatgagcctcgcctcgctcgcccgcgcgctctcccgccgctccgcgccctcctcctcccgcgcgcgccagggtttctccctcggtgggctaggtgggaccaccaggtcgccgccgccgccgtcgtcgccgctcccatcgctccatggcggggagggcggtgggctgggattgggattcgtccgcgggtacctgacggcggcgctggggaggcccgccgcggtgaaggctgggacagactggaggtccatcctcgcgaacccgcagttccggaggctcttctctgacgggtccaagaagaattacgagaactactaccccaagggcaagaaggaggcgccgaagggggatgggagtaacaagtctgattcgaagcaagattcaagtacagacgatcaatggaatttccaggagactgcctcaaagcaattgcaaaattttctggcacctctactgtttcttggactgatgctctcgtccttgtcgtcgagctcatcagaccaaaaggagataagcttccaggaattcaagaataagctactagaacctggtttagttgaccgcattgttgtttcaaataaatcagtggcaaaggtctatgtcaggagttcaccacagtcgaacagccaaggtcagaacactgatgccatcattaccaccaatgatgttccgagcaagcatactcccagcagatacaagtattacttcaatattggaagtgttgattcctttgaagaaaagttagaggaagcccaggaagctttgggagtagatccacatgattttgttccagtaacttatgttgctgaagtgaattggttccaagaagtaatgagatttgccccaacagtctttcttgttgggctaatatatttgatgagcaaaagaatgcagagtggttttaatattggaggtggacctggcaagggtggccgtggtatttttaatattggaaaagctcaggtgacgaagatggacaaaaattccaaaaacaaggtgtttttttaaggatgtagctggttgtgatgaagctaagcaagaaataatggagtttgtgcatttccttaagaatcccaagaagtatgaagagttaggagctaagataccaaaaggtgccttgcttgtgggtcctcctggaacaggcaagactctgcttgccaaagctacagcaggagagtctggtgtgcccttcctgtctatttctggatcagatttcatggaaatgtttgttggggttggaccatccagggtacggaacttattccaagaagctcggcaatgtgctcccagtattatatttattgatgagatcgatgcgattggtcgtgcaagaggccgtggagggttttctggttcaaatgatgagcgtgaaagtactttgaaccagctgcttgtagagatggatgggtttggtacaacttctggtgttgttgttcttgctggtacaaataggcctgatattttagataaagccttgctaaggcctggaagatttgatcgccaaataacaatagacaagccagatataaagggccgtgatcaaatattccgcatatatcttaaaaaacttaaacttgacaatgagccatcattttattcgcaaaggctagcggctttgacacctggatttgcaggagctgacattgccaatgtttgtaatgaagctgctttaattgctgcgagaagtgaggaaactcagattaccatgcaacattttgaatctgcaattgatagaattattggtggtttggagaagaaaaacaaggtcatcagcaaactggagcgccgcactgttgcttaccatgaatctggtcatgctgttgctggatggtttttagagcatgcagagcctcttctgaaagttacaattgttccccgtggaacagctgctttaggatttgcacagtatgttccaaatgaaaatcttttgatgacaaaagaacagctttttgatatgacatgcatgacattaggtggccgagctgcagaggaggttttgattggaaggatctccactggtgctcagaatgacctggagaaagttaccaaaatgacctatgcgcaggttgctgtatacggtttcagcgaaaaggttgggcttctgtccttccctcagagggacgatggctttgaaatgaccaaaccttacagcaaccaaacagcatccatcatcgacgatgaggtgagggaatgggttggcaaggcgtacaaaaaaacagtggaactgataactgagcacaaggagcaagtcgccaaaatcgctgaaatgctgcttgagaaggaggtcctccaccaggacgatttggttagggtattaggagaacggcctttcaaggcatccgagccaactaactacgacctcttcaagcaagggttccaggatgaagaagacagcaagaaccaagaggcggccaaaacccctcagcctgatgatgacggaacaccctcgcttggcgaggttgtacccacgtaatcctgcagcaaatttacagctgtaaattgcactcctattcgatagattcttgtttgttgttgcagcataagaaaatttgtataaattaacgccctcgcctaatctctgatgtgggaacccagttggcttttcgccggccatagtgtttccctgttttaaatgaatacgaagagctagtcgaggatcatgatttgagcc

SEQ ID NO: 19585 - DNA, 1293 bp, Oryza sativa
  ref <308>: DATABASE ACCESSION NUMBER: AK069937
  ref <309>: DATABASE ENTRY DATE: 2001-12-06
tgtcactaatgccttgagagatgccaaactgtctgttgataacctggacgaagtgattcttgttggtggatccactcgtatcccttccgtgcaagagcttgtgaagaagatcactggcaaggatcccaatgtcacagtcaaccctgatgaggttgtttctcttggggcagctgtacagggtggagttttggccggagatgtgaaagatgtcgttcttcttgatgttactccattgtctcttggtctggagacgttgggtggagtgatgaccaagattattcccagaaacacaacactgcccacctcaaaatcagaggtattctccacagctgcagatggacagacaagtgttgagataaatgttcttcagggagagagagagtttgtccgggacaacaagtctcttggaagcttccgcttggatggaatccctcctgcaccacgtggtgttccacaaattgaagtcaagtttgatattgatgccaatggtattctctctgttgctgctattgataagggtactgggaagaaacaggatatcaccatcaccggcgctagtacactgccaaaggatgaggttgagagaatggtggaagaggctgacaagtttgctcaggaggacaaagagaaaagagatgccattgataccaaaaaccaggcagactctgtggtctaccagactgagaagcaactgaaggagctaggtgacaaggtacctgcacctgtgaaagagaaggtggatgcaaagctcaacgagctcaaagaggccattgcgggtggatcaacacagagcatgaaggatgccatggctgctttaaacgaggaagttatgcagatcggccaggccatgtacaaccagcagcctaatgctggtgctgctggacctactcctggtgccgatgctggaccgacaagctcaggcggtaagggaccgaatgatggagatgttattgatgcggatttcactgacagcaattgatagttctagcgattgaagattattgatggaaggatgatctgtggtggatggctgtgagggtctgatgggtgatggtataggaagaagggagtgaacaaattgttctttttgtttactatggatcccatgttcaataggctctttagtttgcaatttgatagcgtagggttttgccaacatattcctgtgatgttgaatgaaggattataaaaagtagccttcaaaaaaagaggaggcaaaggttttgatcgaagaagtagctgattgatatgaccttgttccttgaaaataaaaatatcattagttccctgtgc

SEQ ID NO: 19586 - DNA, 1539 bp, Oryza sativa
  ref <308>: DATABASE ACCESSION NUMBER: AK069938
  ref <309>: DATABASE ENTRY DATE: 2001-12-06
gagtacacacactctgagctccactagctctctctcctctccctttccttccttattattcctcaccatcagctagctgagagctagggttcaattccctcttgctgctccctctctcccggccggcgacggcgacggcgacggcgaggctgttgggctcatcatcacctagctgaaaatcggccggcttgattaattccaagcttgcaggaggctaattgaggtgatctatatctccggggagagagaggagggagaagcgccctcttgctcatgcttgtctaatcatgagcagctcaagatgacaagcaataacagcacgaatgaggagctcggcggcggcggcaggaaggcggccgacaagccgagcggcggcggcggcgccgccgccgccgtggcgagctcgcggcactggtcggcgtcgacggagtcgcggatcgtgcgcgtgtcgagggtgttcggcggcaaggaccgtcacagcaaggtgaggacggtgaaggggctccgcgaccggcgggtgcggctgtcggtgccgacggcgatccagctctacgacctgcaggaccggctggggctcagccagccgagcaaggtggtcgactggctgatcaacgccgcccaggccgagatcgacaagcttccgccgctccagttcccgccgcacgaccacgacctcgtcgccgccgccgcctcgtccatggcgccgccgccgttcgcgaacggaggcgacggccaccacggcgcctccgcgtcgtcgatgctggaggacggcgacaaggccgccggcggcggcggcatgaaggcgttcatgagcctgagcaactccctcggcctgctcaacgccgccaccatgccggcgacgttggccgctcaccaccaccaccatcatcacgccgcggcgtactacgccgccgccgaatcttggggcaacggcggcaatggtggccaccaccatgatgtcagccatggcgtctcgccttcggctcacaactcgccgttcccgtcgctgctgtccttggcaccgggctctcatcatcagttcgtcttctactcgccggaaggcggcggattcgccgtgaaagaggctgcagccgagcagtttcctgtagatagcctcgaccactcgcaagggcagctcacactgagctcagcaagaagcttccttcactctggaagccagggatgatttgatcaattacaagagacaataatccctactccaataaggctggtacgttagaacaaattaaaaaaaattctaataacttcgtttgttgttccattttcaggtgtgtgtttaaggttgtgatcaatttggtattttatttaagcgcattatttggtacggccagatgattaagagttctagaactacttaattacagcatgcaaaagttaaaattcaaggttttgcagggtgtgcgatatgcaattcgttgcttcttcttttcttttcttttatatatatatatggaggtaattaattgttggtgtattattttgtcttgtgtaataacgatttgaggaattttggagcct

SEQ ID NO: 19587 - DNA, 626 bp, Oryza sativa
  ref <308>: DATABASE ACCESSION NUMBER: AK069939
  ref <309>: DATABASE ENTRY DATE: 2001-12-06
gactcctcgccgccatccccaaacctcccgacgatcccaccgcctcgaacgtgccgccgttccagcctagggttcgcgggctctccggctgccggattcgcctcctcgccggcgggtagaggcggctgagggggagtgccggggcgctccgcatcgctccctccctccctcccgtcgtcgtcgccggcggcgtcgggtcgggcccggcggtatcgtcccgcggaaaccctagatttcgccgccgcacgcgtggagcaatcgtgcggctcctggtgtccctctatggctatgtaaggaggggattccacctccccgcttgtgaggctctctcggcataaccgctctcgcgttctagggtttgcgccgcctcgactgcaatgggtggtcgcacggtgctctccgacgaggaagatgaaatcgaggaggaagaggaggaggagaatccgcggccttcgcggagaggaagggacaatatggatcgggacgatgatgatgacgaggaggacgaagaagacgagggtcaggacgaatatgagaaggatggcttcatagtagatgatgcagatgaggaagaggaggaggaggatgagagggaaagtgatgatgagaggcggaagaagaagagg

SEQ ID NO: 19588 - DNA, 1079 bp, Oryza sativa
  ref <308>: DATABASE ACCESSION NUMBER: AK069940
  ref <309>: DATABASE ENTRY DATE: 2001-12-06
gatcctgtagtaacgaaacaagcagagagagagagaggcggagagataaataatatacagaaatgagcaggtcgagctcgagcatggccaccgtcctcgtggtgttgatggtcgtcagcgccggcggcttatccccaccatgtgcggccgctgcgaaggaggagaagccagtggtggtgctgccaccagcggcggcgccaggggaggcgccctccgcggacgcggcagcgttcgtccgctcctgctgcgacaccgccctgcaggccgaccgcgacggctccagcttctgctactaccatctcctcccctacgctgccttcttcgagggcaaccaggtgaaggtcgccgaggtggccgccaccatcctgagcaccaacctctgggtctacgtcgaccaattgcgcaaggtccagggaggggccggcaagggggacccgaacctgaacgcctgcgtcgatgacttcagcgtagccgccggcgagaacatcaccagggaggcgctgcagagcctcggccgcctcgccgccgccggaaatggcaagcgcagcaaggaggatctggagaatgcgcaaaagtggatcaaaggggtggagaaaccctacaacggtgggatcgggaaagcatccggttgcgagataggttacctgttcacttatagcgatgatctccccgcccagaaaacccttggatatactttcgacacagctagctccctcatcaatcacataaagctttaataatctagctatatatatagccttccatgcatgctctctagctacctactaagtggaagtacattattttatttattatacttgttgttaattcccatgatcgattagtggtgttgtccacgatttttggtaacattgtttttctcaattttctatttcatatattcccaactctcaattctacattatatatcattttttcattcaacttcatacatacaattcctcagttctttcttatatataggccttacgctaaatttttttttggatacacaccaccgtcgattatatcgtgcatacttttgtatttcaattaattaattgtgacacttgcttccc

SEQ ID NO: 19589 - DNA, 1186 bp, Oryza sativa
  ref <308>: DATABASE ACCESSION NUMBER: AK069941
  ref <309>: DATABASE ENTRY DATE: 2001-12-06
gacaacttccatctctgaagaaaaagaagagaaaggataccattacagggaagaagatggcattgctaagtgtcagctcatctcatcatgccatccatccaggtagtagcaggagcatgcagtgcatctgcaccagggtgacaccatccagatcagtgggagaaatatcaagatcaagatcaagaaatgatcttcctctgggtgtttcaccgtcgtcgaggatgctcacgacatgtactctcaagactccttcctatggcaacaagtcgaagtcgaaggagaagatcaatccgagagacatgttcaccttctcctacagattcaacactgacatccccatgaccgagactccaggggcatccatcgatgagtaccttcagaacaggcccaggattgttggagccgtgttccctgataagcgcaagagaaccaagctcagtgatgaagaatggagcgtgcagcttctgccgatccagttcctgttcctgtcggcgtcgccggtgatcgtgatgcggttcgtaagcaaatccggcggcaaggagtacccgccgcacgtccccgtcaaggcaaccagcctcctgctcatggaagtgacggactacaagctggacgggctggacagcaacgcgatgccgtcgcacctcgccctgaccgtccgcgggtcgctgtacccgcggccggaggggaggaagagcctgaggggccacgtcgagatgagcgtcggcttcaacctgccgccggtgctcgcgctggtgccggagggcgtcatcagaggcgtcggcgagacggtgctgaggcagctagcactgcagatgaagcaggatttcgacaatggcctggcagccgatttcaagaggtacaggagggagaagctaactgaaaagaagactacaccctgaaagttttttcaagcatttcatttcaaaaatagaagatcttttccaagcattcactgccagtagtaatagagatggcagtcactacaccaaattgtttggagctcatctgatcatcagcaattcagcatgatggcaacataattgtattgttcatcaagcctcaagaaaagatggagagaataacttaacagatctcatttattcattgtaaactgaagcatttagaatgtacataatggcaagaataatcaatttactgagattgttaatatctcgagctattggac

SEQ ID NO: 19590 - DNA, 2150 bp, Oryza sativa
  ref <308>: DATABASE ACCESSION NUMBER: AK069942
  ref <309>: DATABASE ENTRY DATE: 2001-12-06
gacgcgccgcccctccaaaacccccaatcttgtcgccatttcctcctctcccccagcctccatcgccacccttgccgcgcgccgccctcctcttggtggctggaggaggaggaggaggaggatgcaggccacggggagcggttcttgggtcgcgcaggcgtccgtgctcggctgcggcgggggcggaggaggggtggtggtggtgcggcggccgtcgtgggatggcggtgcggcggtcggtggtagggcgaaggggttcggggtggtgcggtgctgcgtgcaggagaagaagccgcgggtgaggaagaccaaggaggagaggcgggagatggtcgagtccttcgtcaacacttaccgggtttcaaatgatgggaaattcccttcagtcaatctcacgcataaggaagtcggagggtcatattacatagttcgtgaaatcgtgagagatatcatccaagagaacagggttctgggccctggcggcttgaatgccacggcactgagttttgaagactgccctgattctgtggagtcacctgttacgcatgaactgggccaagacagtgtcgagatattagatatgtctgatgacaaccaagctggcatggatactgtgacagacatgagcacccagcaactactggggtcatctaatctattggatgctggtattctgaatggtgcactccgaaatgggaacatagcagatatggcatgcttagagacaaacagcgagaaacaagatgaagttccatgtgcgcaatcagcagaaattgaccccagtagttctgaaaagctacctccttccttctctcatgcccctgattcagaaagtgaatttgagatggacagtcgggtggttgctcatgagacaaccagcagtctcactaatggagttatttcctcaggacccagtgctgttattacaaatgagtcgcttttacaagatcatgatgacacaactgataatgctgttgatgaagctgttctttgcttacagactaatggaagttctcaagcaaatgagaccattttgcaggaacatgagacacgacctgaaagtgtcatgagcaatgatgttcaaaccattgacagtcagtccaattctagagtggatactttcaactcaaatacaagtgaagacacaaccaagtctattgaagtgtctgaagtacagaggttgcatcctgatgaggaagaaaaggcagaaaatcttgtttctcatgcagaactggatacaaaggtgttctcacacgttgaaggcaagaatggcatggtggaggaagataacagtgaactcaagcaatctatatctatcataacaatggaagagcatgatagcaagcctgaacatggagacagcaccacaactgccatcagcagtgcatgtgttactacttaatgatgttagcaacaggcaactgagtgcattatggaagtattactcaagatacgtttctgttgtctagttgcctatttattgatattctatttgctatataatatttattgatcatataacaatttgttacataaaccggttcttgtaccttgtcgatcatgtcctatttttctgtttggttatgaaaattttatttctcatgcgaatgtggttaactatgcgagatgttaacaatttaatagtgattcaataaaggacagatcacacactataatgtttttaacattgttattctttatggtccgcaggaaaactgggaaggtgcagccgaagaaagagaccaacctgttttggctaatcattagggcatttgttgtttccatgtccaagatgtgggcaaaatgagaggatgtgcaaaagacactttcatctggcactgcagcctgggatgccctctgcctactggcaaatgtgaagctccattttgacgcgatgcatatacatatttgttttctgtgccgcacgttaggttggttggtaggcttcaggagtttatttaggttctagcttgtaggagtagcatttggtgaactttctcagccttttcaactctaaaatctattagctgtaattgcactatttttgtagaaggggtgaggtatgtgcttctcttatatatgaaagtatgaaacagtagtatccacagattctcctctgaatgaggattaccggcctggtggccttgcgt

SEQ ID NO: 19591 - DNA, 2477 bp, Oryza sativa
  ref <308>: DATABASE ACCESSION NUMBER: AK069943
  ref <309>: DATABASE ENTRY DATE: 2001-12-06
gacgccgcagcctctccccaaccctaaccctaatctcctccctcgccgcccccgatcagcgcagcgccgcgccgcgccgcgggaggaaaaggaggaacgccttgccgcaagaccaccgaccgtcgattccacgccgctcttctccgctttctccgccacccccgccagggagaagactccgccctccgccatcagcaacaacgtcgtcttgatcttcatccgattggattggaggtggggcctgcgtggtccttcacctcccagcgtgagggcaccaggagaggaaggagaagtgtgtacttctctgctggcctgtgtggtgaggtgatagctaaactaataggaagatgaagcgcaagcgtgggcgtaagatgggcaagaagggcaagttgaaagcttccatcacagcggatgcttctccaatgtccccgtccagcccgagcaccgtggatgcttcctcaaagtccccctccagcccaagcacagaggagaacggcaccagcccagcgcatcatcaggcagataatgcgcctgttattgctccgccaccagtgcctgaaccagcacctcctgagccggagaagccagccgtgtctactgacgtacagaatgctaagccaaaagtctatagccgagtcaggttgaagttcaaatctgccaaagtgttggagacgcaccagggtccttcagaagcaaaagcacctgttgatggtggtggtggtaaacctgcaagtgctgctcctgaagcgagcaaagaagttgcggagaaggctattgtatcaccagacggacagaaagatgcgcaggcagcagaattgagtggttctgataaggataagatggcaagaaaagtagcaagcataaatatcaagtctgtaggattatcttcggtagaagataaaaatcaggacaggaaagctgattcagtcagtgaacctcttccaagcaagcaggaaaccgtattggaaaatgtagaaagcgagactgcattggagccgagaagctcacaagagttggaggtaaagcaggctacgccagaacgtcagcgagatgacagagagctaactgctgcacttgaagctattaagaaagtcatgaagatggatgcagctgagccgttcaacacaccggtggaccctgttgctctaggaatacctgattattttgatattattgatactcctatggattttggcacaatatgtcaaaatctagaacgtggtgataagtatatgaactcggaggatgtgtgtaaggacgtgcaatttatatgggataattgtaccaagtacaacagtaaaggtgattacattatagagcttatgaaacgggtgaagaagggcttcatgaaaaactggctggcagcaggcttgtattctgatgcgcaggagaatggtggcaatgataacacaggcgatgaggatgtcaaaggttcaaaaggcaagtctaagcaaaaacggcggcgcctagggaatgatcgacacaaaaatgactgtgcatgtgctgtttgtcaagttacacgccgcaaaaaggaaaaggatgaaatcttggctgtcattgaaaacgatacagctgcagtgaatagtaacatttctgaccagcaaatcatggaggtagactcaggcattaataacgctggtagtcatgacactacctctagtcaggagcaaccaccacaaactgatatgtacagaagaacagtggtagcagatgattcagggactctgatagaaaatcatgtgaaattcttcaacaaccagccactgccacatgattatgaggatgaaggctccagaccatactttgacgaaaaagaagaggtagactatacggatttgatcagtcaggaggaacatacatccagtcagcccaatgatggctccgaaattgcacaacaccaacataaggagccaacagaaacaagccaggagattgaaatggaggattatcccatacagaaggagaaccaatcattcttgcaactctgcgcacggcttttccccagcaaccagagttctgttttcaggggacgccattctctgttccgacagcaacagcggcaggtttcaatgaagggaagccctctgcatgcggccataacagcgataatgaaacggtaggagttttgtccctccaatggctgcttagcagcagccgtttcgtgtaaaggaagctcaaggcagcgttgtgactttgggaaagaaagctgtaccctgaagtcacgggagctggttggaataaaacaggttagttgaaacatatctttgagctcagaggctatagcttgatttaggtacgaaattagttgggagatacctgtctattgtatgacaattatctatgtgtaaggctgtaagcttcatatttgtatcaagataattgtgatagtcacatgttgccacattgcttaccgcgctggagtagggttgtacttgaaccttataattgtattgttggtgtcaaaagatttaattagt

SEQ ID NO: 19592 - DNA, 1344 bp, Oryza sativa; identical to SEQ ID NO: 18824
  ref <308>: DATABASE ACCESSION NUMBER: AK099118
  ref <309>: DATABASE ENTRY DATE: 2002-08-28

SEQ ID NO: 19593 - DNA, 1634 bp, Oryza sativa
  ref <308>: DATABASE ACCESSION NUMBER: AK099119
  ref <309>: DATABASE ENTRY DATE: 2002-08-28
gaaaggtctcgcctttcttgctctgaagcttttctttagcttttcgattcgcctgtcggggaccgggatcatggcggcggtggaggcggagaaggtggtggcggagctgcgggagaggtgcgcgacgccggcgtcgctgctgcgggatgtggcggcggcgatggccggcgagatgggcgccggcctggagaaggagggtgggagcagggtcaagatgctgctctcctacgtcgacaagctccccactgggagagaggatggattgttctatggattggacctaggaggaacaaacttccgggtgctcaaggttcatcttggtggcagcaagaagcatgtcgtcaactctgaatccagggaagtcagcatcccaccacacctgatgtcagggacctcctcggaattgtttggtttcattgctggggaattaggcaagtttgttgctgaagaggaggagggtactgacatgccaaacggcaagaagaaagagctaggattcaccttctcttttcctgtgaggcaacgatctgtggcatcgggtacccttgtcaagtggacaaaggcgttttccattgatgatgcagtaggtgaagatgtggtggctgaactacaaacggctatggtgaaacaaggtctggacatgcatgtagctgcattgattaatgatgctgttggaacattggctggagcaagatactacgatgaagatgttgtcgcaggtgtgatatttggtactggcacaaatgctgcatatgttgagaaggcaaatgctataccaaaatgggaaggggagttgcccaattcaggggatatggtcatcaatatggaatggggtaatttctattcatcgcatcttccagttactgaatacgatgaagcattagacaaggaaagcttaaaccctggagagcagatatatgagaagttaacatcaggaatgtatttaggtgaaatcgtaagaagagtgctgcttaaactgtccttgcagtctggaattttcggttctatagataactccaagctcaaaacttgtttccatctgcggactccgcacatttctgcaatgcaccatgatgaaacacctgacctaaagatagtggctgaaaaattgcatcaaatcctagagattacacatacatccttagagataaggaaaatggttgtcgaaatatgcgatatcgtggcaaggagggcagctcggctggctgctgctggtgttgcagggatcctcatgaagcttggaagaaatggcggcatcaacaatcagcgctcggtcatcgccattgatggaggtttgttcgaacactacaccaaattcagggaatgtttggagagcacgttgggtgagttgctgggagaggaggcttccaagtcggtagccgtcaagcacgcgaacgacgggtcagggataggggctgcccttattgcagcctctcaatctcgatgaaaatttgctagataaatagtagtatatgccgtccatttttgctctggagtgaaaaaaattattgaaaaaacctagctttgttgtatgtgctgcttgggcatggtggaactggaagcagtctgtaaccaaaatgaggcttgatatactgtcgccctgcatagttgtaacctgaaataaaattggaact

SEQ ID NO: 19594 - DNA, 1120 bp, Oryza sativa
  ref <308>: DATABASE ACCESSION NUMBER: AK069944
  ref <309>: DATABASE ENTRY DATE: 2001-12-06
ggtggcccccaatttccgtcgctcggcgtcctccacacgaaggctaatggcgaccgccatgcggagcaccaccttcctgcgactcggcttccgccaggtctcctccctcctgttccatggcccctcgtcgcctgcccccaccgtgggtctcgccctcggcgtgggccggggcgcgctggtccgcctccggtgctcggcggctgaggccggcgacgacgggggcaggaaggtgtcggcgcgcctggcgctgacccagcaggtgcttcgcgacgccgaggagcgcgccgcttcggccggctccgaccccgcccccaagatcactttggatcatgttactcttaactttgcaagaagtgggggggctggtggtcagaatgtcaataaagttaacacaaaggtcgacatgcggttcaatgtaaaagaggctcagtggcttggtgagagaatcaaagaacggatattacaaacggaaaagaaccggataaataaagatggggagcttgtgatatcttctacaaaaactaggacacaaaagggaaacattgaagatgctttgcagaaaatacaggcaatcattgatgctgcatcctatgtacctccacccccttcagaagagcaaaagaagaaggttgaaaaaattgctgcagccgctgaaaggaagagacttcagaagaagaaagtgctttcgcagaaaaaggaatttaggaggaacaggactagctgggattgactgcaagttattttgcttaaaatcatacctgtatttcgtgcccttttgaggtgatcaagcttcccgcatgtaactcaggttctgacaactagtatttgctccgcgtggttcttgagcgtggagatagggctcacctgatccttgtggcagtaaatatccatgcgcgacaggaacaagttccaaaccggtgaagacgtattggtgaatatggcgagtttcagagccagtttttgctccatcaattggaaggtagcatctgacgggaaaacactgccttttgtcctaaaatgcactgtttgtcagtggtcctgatccctgaacttatcacatgcatcacatgctactgtaacaatcattcacccaattataaagtgtttgcgtgcctgtgct

SEQ ID NO: 19595 - DNA, 1123 bp, Oryza sativa
  ref <308>: DATABASE ACCESSION NUMBER: AK099120
  ref <309>: DATABASE ENTRY DATE: 2002-08-28
gagctcccactttccagtctcccgccgccgccgccgctgttcactccgcaccaactccgacgatcccccggcgagctctcgacgatggcgacggcggcgacggcgtcggctacggcggccacccgcttcacgcggctggcgggggtcgggctccggcgcacggcccgcctccccacggccgtgcggttccagcgccgggtgctcgccaccaccgcgctcctcaggaccgccgagctccggcccaaggagcagggcctgcccgagacgctcgactaccgcgtgttcctcgtcgacggcgggggccgcaaggtgtcgccgtggcacgacgtgcccctgcgcgcaggcgacggggtgttccacttcgtcgtggagatccccaaggagagcagcgccaagatggaggtcgccaccgacgagtcattcacccccatcaagcaggacaccaagaagggcaacctccgatactacccgtacaacattaattggaattatggattatttccccaaacatgggaggacccaactcttgcaaacaccgatgtcgaaggagcatttggggataatgatcctgttgatgttgttgagattggtgaaagacgtgctaacattggagatgttcttaaggtaaaaccgttggcagctttagcaatgattgatgagggtgagcttgactggaaaattgtggctatttctttggatgatcctaaagcatctcttgtgaatgatgtggatgatgttgagaagcattttccgggaacattgactgccatcagactggttcagggactacaagataccagacggtaagcctgcaaacagatttggtctgggcaacaaacccacaagcaagggatatgctctgaaggtcatagaagaaaccaacgaatcatgggagaaattggtgaaaaggaatatccctgctggagagctctcactagcctaatcttgtccatgagaagccatcagattcttttggtcatttacctaagcatgttgttttcataagctataagcatgctgcttcttgcgaactctttggtgacctgtgtgcaacaggaacagcttgtggagtgaataaggctttctgagctagtttttctaagggaattgggtgttcttgagc

SEQ ID NO: 19596 - DNA, 1191 bp, Oryza sativa
  ref <308>: DATABASE ACCESSION NUMBER: AK069945
  ref <309>: DATABASE ENTRY DATE: 2001-12-06
gattatattgaaaaactatcctttttattcagtaactaatgatcttcgattgttctattaaaaaaatattggtccttggccatttcctaatctgagttgcataaaactacatatgttcccatggtcttccattgagagaaaatggcagatgatggtttcaaatatcatgaggaatatgttacaaataaacgagggatgaagcttgcatgccaatggagtcctttagaccatgaaccgaaagctctaatcttcctatgccatggatatgccatggaatgcagcatttcaatgagaggaacaggtgttcggttggcaaaggctggatttacagttgcacggattggactatcagggccatgggaagtccgaaggacttcaaggctatatcaatagttttgatgatgttgttgttgattgctcgaactactttgcaagtgtttgtgaaagaggagagtgcaaaggaaaaaagaagttccttcttggtgagtcaatgggaggcgctattgtgctgatgctacataggaaggaacctacaaattgggatggggctattttggttgcccccatgtgcaagattgtagaagatatgaagcctcgtcccattgtgataacaatcctaagcaagcttagcaacgtgatacctacatggaaaattattcctactgaagatgtcattgataaggcaattaaaagcgaggagtggcgtcaagaggtaagaaacaatccatattgctataaaggaaggcctaggttaaagactggttatgaactttttatggcaagcttggatattgaaagcactcttgacaaggttacactaccattcatcattgtccatggtggtgatgatgccgtcacagatccatcagtaagtgaagaactgtatacatcagctcagagcaaggacaaaacactgaaactgtacccagggatgtgtcacgccctgacatctggtgagcccgcaagcaacattgacattgtatttttggacatcattaagtggcttgatgagagggtatcagtttcataatatgagatcagttaacaattgtaaccatttggtacatatatagtctcagcagattgatgtagtgtgaggcctcacttagatgacggaaattggatacaacttcattttcattatgtcaattgacgcataattgttccaatgtcattcaaataatttcagcc

SEQ ID NO: 19597 - DNA, 2508 bp, Oryza sativa
  ref <308>: DATABASE ACCESSION NUMBER: AK069946
  ref <309>: DATABASE ENTRY DATE: 2001-12-06
ggcttcttatcccgccccacctatggctgctgctgctgccgctgccgccgccacactcctcccatggctctcctcgcgctccgcctcggccaccaccaccaccacctcggcctctccgccccgcgcgacccccgcctcctcctccgccggaggctcgtggtcgccagctccggtgccgtgaaggcccccgcggccgcggcggtcgtgtggttcaagcatgacctccgcgtcgacgaccacccgggcctcgccgccgcggtggctgccgagccgcgccggcccgtcctgccgctctacgtcttcgaccgccgcatcctcgacggttactcagacacgatgctggaactgctactttttgctttggaagatcttaagatggttttgaagtctcaggagtctgatcttctcataggcttgggaaatgctgaagatgttgttctcaagcttgtaaatgaggtacaagcgggcctcattttcacagaagaggaagttgagtacagagtgcgcaatgttctggccagtgttgaatcatctctctctaatgcatcattcctatcgggaaaccctcctgagatagtggtttggagtgcctcattgtatgactacaagaatccgagggaattgtcaacatcacacaaccaatttttgaaggaaaaattaccgatgaacacacctcttgctgccccgtctttacctgctctgaacatagagatagagacaggttctctccacacactggaagaactaaaagggtttcttaaagagagtagaacgtcagagaataattgggttcctctcaagggcacatcagccagatctattcttaaaaagactctcagccagataaatgtcaaaaccggtgttgcatcaagtggcagcgatggaggagaggataccactgcatattatgctatgtcagggaggaagatccaaaattcaatgttcacatcagaaagctcaacagaagttagaggtggaacggaaatcactttggatgctttagctgcatacctgaaatacctagaaggaacagggaaggctagttggcaagagttgcatgataaagtacggttaactgaaactagagatggtgcctcgttttgcactttgtttggtcctgcacttcagcttggagttatatccaagaggagagtttaccatgaaactattcagtatgagagagaccggaatgctggatttatatcaccatttggatactcaacacctacagtgacagcagcagtagatgctatctgttcaatggagtggtattggctcttggccttgaaatcccaagtatgcattgaaggaaattaccctgtcagaatctggagatggaaaggtcatcttatacagtatacctctgttggtcatgagggtccttcggttcttcttgtgcatggatttggagcttccctacagcattttcgtgataatataggtgccattgctgatcagggatgccaagtttgggcaattacccttcttggcttcgggaaatcagagaaaccaaatatcaactattcagaacttttatggtcggaattactgagagacttcattgttgatgttgtgaaggagcctgttcatcttgttggtaactcaatcggaggttatatctgttctattactgccagcttatggccttctcttgcaaggtctctgatccttttgaatacagctggttcagttgtgccaagttactcttttattccattaagtgaagaaggacggacttcatggctttccagtttgcaggcacgcctccttctgctcttcttgaggtcaagagcaggaggcattcttaaggaatactatcctacaagaactgaacgggttgacaagccacttgtggatgagataataagagcttcatatgatcctggcgcagcaaccgttattgagagcatattcagtttcaatctttccattcctctcaactttttatttgattcttttggtggaaaaatcttaattgttcagggaatgaaagatccacttacaaaatccaagtcatttgtttccatgcttagggagcattgcagcaaggtccatattagagagctagatgcaggtcatgctccacatgatgaagttcctgatgaagtgaactccttgctgtgcgaatggatcaaagagactggcgcttagccagcaatggagttccatcctacttagatgtggcaaaaaggagatgaatattgaacactgtacagaattgaaaaacagcatcgagcaggtttgatagcaagtcggcacaagaagatgagatgcaattcgcactcctgatgaactttctggtggttcttaaagctgtttttgtttatggacctagctcaaaatcaaccttgaaccctacattacaagagttgtctaaatctaatcatacaaacttttgaccccatcgtgcaagtaatgtctaatcgtgccacatttgtactctcttgtagtcttgttttatatggctcgacatagatagaagtacaaaatgaactaatatttcatgcc

SEQ ID NO: 19598 - DNA, 3066 bp, Oryza sativa
  ref <308>: DATABASE ACCESSION NUMBER: AK069947
  ref <309>: DATABASE ENTRY DATE: 2001-12-06
ggtgtttccattggaatggaatggatggggataagtgaaaaatcaaaaagggcatggcaattggtgggttagaactgaactgtgaggagcttcagagactatggagcaaggtgtagctggagaaaacgtgtacaacacagagagactgcacagctacggaagtggtaaacaccagtgctagtatatgtatggattgaaggtaacgtagcatttgccttcaccacaactctgcaagtcaccagcatggctatcaagcttacaaaatatcagttcttttcttctcgtgccactgcactgcacctaaggaggagagagctgaagttgcttccattcccatcttttccctgcagctctagttcagctcctaacacttgttcacagcaaagtcatctcctgttagtttcatctgcaggacctagagaacaaacattacttccggctgattcccgttcttctctccctcatggcatcactgataacggtacaagaaaggaaggaaggaggaggaggagggggagaaagaggaaggagacagcaaaagatgaaggggagtgtgttccatctgcggaggaagtgtccattagggtaaatactctttatgagagtggcgaccccattgggaagaaggagttgggccggtgcgtggtacaatggctaaagcagggtatgcactcaatggctataaaatatgcttccacagaaatgcagaacgatggagcaacattcttactggatggtggatcatctgaagacaacctcggatttgtgatgcttgcacagccttatctatcagcaattcccatgcccaagggacaggaggcgctctgcctcaaggcctctactcactatcctaccctctttgaccactttcaaagggaactccgtgatgttctgttgaaacaacagaaccagggtcttatttctgattggcgcaccactcaatcttggatgcttctgaaagaattggctaactcagctcagcatcgagcagctgcccgcaaacctaaagctcctactacgcacagtactcttggcataagtcttgataagacaaggttgatgcagaccaaaattgaagactttgtcaagaaaatgtcagaccttctacatatagaacgagatgcggagctggagtttacacaagaagaactgaatgccacccctgtgatggatgggaactcaaagaagccactcaaaccagtagagtacttagtcactcatgggcagtcacagcaagagcagtgcgataccatttgcaatttgaatgttatcagcagttcaactgggttggatggccagcatctggtcctatttagagtgaaagataaccatagattgcctccaaccacactctctcctggggatatggtttgtatcaggacatgtgataaccggggggaaattaccacatcttgcatgcaaggctttatatataatcttggtgaggatggttgcagcattaccgtgacactgaaatcccgccgtggtgatcctacgttctccaagctttttgggaaaaatgtgcggattgacaggattcaggcattggctgacgcacttacatatgagcgaaattgtgaagcactgatgcttctttcaaaggaaaggtttacagaaaaagaattcttccattggagtagtagccactctgtttggggacaaggaagacatgatgatgatggagcagaataatctggctgattggggagaatcaacaatacatgatgatgagctattgaaaaagaacaaatatgactttgatgcctcccagttaaaagctatcacactaggcttgaacaacaaaaggcctgtcctaataatccaaggacctcctggcacgggcaagactggtttgcttagttatctcattgcatgtgctgtccgaaagggtgaacgcgttctcgtaactgctccaagcaatgcagcagttgataacatggtggagaagttgtcagatactggactggacacagtacgagttggaaatcctgctaggatatctccatctgttgcttcaaggtccttgggagagcttgtgaacagaagacttcagaagttcacagaagagttcgagaggaaaaaatccgacttgagaaaggacttgaagcattgcatacaggatgatacattagccgcaggtatacgtcaactgttgaagcagcttgggaagaactttaaaaagaaggaaaaggaaataatcagagaggtcctttcaaatgctgatgttgtcctatcaactaatattggggcagctgacccacttgtgaggaggattggttgctttgacttagtaattattgatgaagcaggacaagcaatcgaaccctcatgctggatccctatcttacaaggaaaaagatgcattcttgctggtgatcaacggcagcttgcacctgttgttttatcaagagaggctatgcaaggtggactagcaatgtctttactcgaaagagcttcatcgttgcataatgaactactgacaacgaaattaacaacacaatacagaatgcatgattcaattgccagttgggcatctaacgagatgtatgatggttttctcaaatcctccccatccgttgcttctcatcttcttgctgattacccatttatcaaggaaacttggataactcggtgtgcctttcttttacttgacactcgtatgccgtacggaagtttgaatattgactgtgaggagcatttagaccctgctggtacaggatctttttataacaatggcgaggcagatgtagtttcacagcatgttttgaaccttgtacaatgtggtgtctctccaaccgcgattgccgtccagtcaccttacattgcgcaagtacaactattaagagacaggctagaagattatccagaggcttctggtgttgaggtttcaactatagatagcttccaagggagggaggcagatgccgtggtcatatcaatggtacacacttcctttgctgtctttatagggtagtccttcttggtttgctgtaaggtgaccgtggtacttcaaatgccgtgttgaaccatataatctcatgtcaataaaagttgcaggtcattctt

SEQ ID NO: 19599 - DNA, 1509 bp, Oryza sativa
  ref <308>: DATABASE ACCESSION NUMBER: AK069948
  ref <309>: DATABASE ENTRY DATE: 2001-12-06
gatttcgactcggggctccggccggcctcttcttcttccggtgagccaccgacaattcgattcttacatttcgtgatcgatcgattgatttcgtgttgtaatcttgcgtgatcgatcatggtgtgtcaattaatggcaagggcgtggtcatggagccccagcccggctcgccggagaccgccgagctgcccgcgcctatggtgctagagccgccgccgccgccgtcagatgaggcggcggcggaggaggaggaggccggcgttaagcctgataggcaatcatcttcatcgtcttcgtcgtcgtcgtcggaggaggagaaggaggtgtccaaggacgtcgcggtagagaccagcgtcgtcgtcccgtcggtggtcgccgcctcgccggacgatgaggccgccgccgtcgcttccggtgacggcggggacgttatcaaacacgacgatgaggccgtggtcagaccggacgattgggcatcgtggccgcagcagccggctcagaccgtcgacgacgtagcggcggcggcgacgacgacgccgcaggcggcgccggagatccagacgatgtcgctgcagccggcggcggtggcggggttcgatccggagaggatccccaagtccatcttccaggcgaagcccccggggtcgtcgtcgcaggcggagtggagcgtggcgtcgaacgagtcgctgttcagcatccaccacggcgcccggccgtccggcgacctctgcggcttctacgccggcgagagcaggtcgcatttcgactacttctacgacgaggccatggccggcgccgccggcgaccacacgtcggactggaagctggccaccgtcgccgaagggtcgcctggtggcagcgcgcggtcggacgccaccgacggcggcggcggcgcggccaagcaaaaggcggccatcgacttccgccgccacgagagcggctccgccggcagctcgagcaacttctccttcgccttccccatattggcggagacgacgacgtcgcagaggaagagggactacggcgggatgtaccatccgctgaagaaggaggcggagcagcagcaggcggcgtcgccggcgtcggcgttcgaggagatgacgccggaggaggagcggcggcggcggcggagctggtggtgctgctgctgcggcgagtgctgcggctgctgctggttcgcctgctcgtggtcgtcgtgctgctgctgctgccggtggcggtggtgcagccgctgcagctgcagctgcccaaccttctgccgccgcaactagtgcctctctgctcctgaccaagacatttttggcgggaaaagatgaagggaaaaaaccgagaccaactcggctaatcctgatacagccatagttaaattaattattgctaccagattaggcatcactgcatgagaggatcatatcatatgtatgcatgtgcagatgggtaaaaagatgaagatgatattgttcactgttgacaaggaaatgttatgctaacctgcagatgggctgaggt

SEQ ID NO: 19600 - DNA, 2165 bp, Oryza sativa
  ref <308>: DATABASE ACCESSION NUMBER: AK069949
  ref <309>: DATABASE ENTRY DATE: 2001-12-06
gtcgatcccccgcggcgcctcacccccttcctctcccttgccgcctctcgcccccactccgccgccgccgccgcctcgcctcccgcgggatcgcgccatggcattgaacgcccccgtcctcgtgctgaaggactcgctgaagcgggagtccggcacgaaggttcaccatgccaacatccaggccgccaaggctgtggcagacatcatccgtactacactcggtcctcggtccatgttgaagatgcttctggatgcttctggaggtattgtggttactaatgatggcaatgctatattgcgagaaatagatattgcacatcctgctgccaagtctatgattgagctaagccgtacacaggatgaagaagttggtgatggcacaacatctgtcattgttttagctggtgagatgctccatgttgcagaagcattcattgataagcactaccacccaactgttatttgccgagcatacaccaaagctcttgaggatgctttagctgtccttgacaaaattgcaatgcatgttgacgtgaatgaccgtgctgctatgctagggctagtgaagagctctattggtacaaaattcacgggtcagtttggtgaccttattgctgaccttgctattgatgctactacaacagcaggtgttgacctaggtcaaggtatgcgtgaagttgatatcaagaaatatatcaaagtggagaaggttcctggtggtcagttagaggattcacgggttcttaaaggagttatgttcaataaagatgttgtagctcctggaaaaatgagaaggaagatagtcaacccccgcattatccttctggattgccctgttgagtacaagaaaggagaaaaccagaccaatgctgaactgatgaaggaagaagattggcaggttctgctagagatggaggaagaatacataaagaacctctgtgcgcagattttaaaattcaagcctgatttagttgtcacagagaaaggtctcagtgatcttgctatccattacctaagcaaggctggtgttagtgcaattcgtaggctaaggaagactgataacaacaggattgctaaggcttgtggagcagtcatagtgaacaggccagaggagcttcaagaatcggatgttggaacaagagctggcctctttgaggtcaagaagataggtgatgaattctttaccttcattgtcgactgcaaagatcccaaggcatgcactgttcttttgaggggagcaagcaaggatgtcctgaatgaggttgagaggaaccttcaggatgccatgtctgttgcaaggaacattttgaaaaacccaaaacttttacctggaggtggtgctaccgagctgactgtatcagcagcactgaagcaaaagagttcttcagttgaaggtgtagaaaagtggccctatgaagctgctgctttagcatttgaagcaattccaagaactttggctcaaaattgtgggttgaatgtcatcaggataatgacacaactccagggaaagcatgcaaatggtgaaaatgcgtgggttggcattgacggaaggagcggtgacattgttgacatgaaagagcggaagatctgggattcttacagtgtcaaggcacaaacgttcaagacagctatcgaggcagcttgcatgcttcttaggatcgacgacatcgtcagcggtatcaagaagaagcaggctcctggagcctcagctcctaaacagcctcagatcgaacaggagggtgacgcggacaatgagcagatgatcccagagtagaacttgtgtgctgttggtgtgaggagcctgcactggcgatgttatgctctaaagccagagtaagcccatgaagggagaacggctagtttgacatgtgaagcttttgcgagttgtgtttcttgaatgtttgttcttggctaagcctccagggttttttctggttttagtttgaaaatgtgccgcttttatatgtttgatttaggggcacgatgaggtttctcgttctgtgtattgtatcagcattttgggatcccacgttctgcggggttagctgctgttcgttttattaatgtacctcgtactggacggctaccggaactttgattaagcagcaacactagtattagctttatgacttgcattccttaaatcggagaaagaaattcctgtt

SEQ ID NO: 19601 - DNA, 1194 bp, Oryza sativa
  ref <308>: DATABASE ACCESSION NUMBER: AK069950
  ref <309>: DATABASE ENTRY DATE: 2001-12-06
gatccatccatcgcctcctctttccctcccacctccacacgtcccctcctcttccccaatattccacgccaccgccgccgtcaacctccgccatcagcagcagcagcagcggtctcccattcccattctttgctcccacgcgaggctgcgcggagaacagctgcacaggtggggtgggggtgcagaccgagctgaggagtagccggagttggtggtgagagacgcgggtggggcgcggccatggcggggagggtggtgcggagctgcgtgcagacggggctcaaggcggtgaactccgtgctggggctcgccgggatggccgtcatcctctacgcgctctggatgctccgcgcatggtacagggacgtcgccgacctccactaccgcctcccggtcccatggtttatctacacttttattggcctgggagtctttatgtgcttgttgacttgctctggtcatattgcagctgaaactgcaaacagccactgtctctcttgttacatgatttttgtgtttattattattatattggaaggagcaatcaccactgacgtatttctgaatagcaactgggaggaggatttccctgatgacccatctggaaagtttgaagaattcaaggattttataagatcaaattttgagatttgtgaatggataggcctctcggttgtcgctgcccaggtgttgtcaatcgttcttggaatggtacttagggctcttggacctgaccgtgaaagtgactatgatagcgacgacgacccctctgtgcctgcaaggctgcctttactaagaaaccagtaccaacatggcataaactattctgaacataccttacctcaaagtagtgattcatggagtttgcggattttagataaggctaacaaatgaaaattttctgacgatgaacctttggatggagctatcaccatgcttcggcctgaaggtttagctcgacatgaggaaatgatacccttctttttttttttctaggtagcaatattgaatggcttcttttgattgcctaaacatgcacaactatttgagtagcatgcaactgacccttacagccccttgatgttatgggaagaatgttgtattttacagtgcttcagaaacagatgatggcgtgattccgtcactgacaaaaacacagttgaatgttttgtagtccgtcgagctgtctgatcc

SEQ ID NO: 19602 - DNA, 1112 bp, Oryza sativa
  ref <308>: DATABASE ACCESSION NUMBER: AK069951
  ref <309>: DATABASE ENTRY DATE: 2001-12-06
ggaaggggagagagcgccgcgagcgagcgagtttggcggcgagatgggctgctgcagcagccggagcgcggactcgccggccagccgcgtcacgcgctggcgctccaccgggatcgtcgccctccgcgacgccagattgaaggtagtaccaaatgaagttctacaagtagggaattccctgaggattctggatttgactaacaataagatagctgagattccccaggaagttggcacactcgtgaatatgcaaagacttgttttggctggtaatttggttgaaagcatcccagctaacattggatatctgcggaatcttaaaatcctcacacttgacagaaataagatctctgtcttacctgaagaattgggttctctatcaaatcttcaacaactctctatttctcagaattctttatcacgcctgcctaagagtgtaggagatttgcgcaataatcaaataaactcttgattctatatttcctcatatgaaatttacgcagcttgttacattccgtaaagtttcttctttactaatgttgctactcaatgtatctgacaacaaactaattgcacttcctgaatcaattggaggttgcagttccctggaagaattgcaggcaaatggaaattcaattgaagacgtgccttcatcaatctgtaaccttgtttgcctcaaatccctatcattgaacgggaataagattcgtcagcttccccaaaacctactgaaagactgcaaggctcttcagaacatatcgttgcatgacaatccaatctcgatggaccagtttcaacaaatggatggctttacggaatttgaggcacgccgaaggaaaaaatttgacaaacagattgattcaaatgtcatgatgagttccacagcactggatgaaggcattgatttgaactagtttttcagaaattttatttagtttataattaccccattagtcaaaagaccaactgtaaatctagtgtacatattagtttttccgatactctgatttggtaaaaagacaaaaaaatgtataacacacactaatgaatgaactgtgtaatttttgcaaatattcaatgaattaggtgtacatcaccatctttgatctacg

SEQ ID NO: 19603 - DNA, 2234 bp, Oryza sativa
  ref <308>: DATABASE ACCESSION NUMBER: AK069952
  ref <309>: DATABASE ENTRY DATE: 2001-12-06
gagtttatcccctctctcgtgcttcaaaaaaaaaaaagaaaaaaagaaataaagaaaaaaaaaagtgaccgccggtcttctcccccgcctcgccgccgcgcgcacgcagccgccggcgaactggccccggaggcgcctcttccttcccaaccccgccctagcccttctcccctgctcggcctcctcgcgcgcacggccggtcgctgggtttggagccagccaggggggccgatgctgccgcctgccgcctcctcgttcgcatcgattccaagcttgtaggtagcacttctaaacagtaaggagattttgagcttcccataggaagggcattttataaactgggcagcagacatgtcaggcatcgatggtaacaaaccaccttcagaggttttgattgatgagaatgatgactgggtgatagtcaagaagcagcgaatcaccatcctgatccctccaccatcacctgcagctgcaagtcttcaggatgatatgcaaaaaataagttctgaacaagcttgtatagccaaaaagagcatggaaaactgtgatgctgcaagaaagaagcatccaaagcagatgacaaccaacaaagctcaggagccacttctagagggcatcaaagtttctgccaacatcaagaaagctcaagaaattgctacatcttctcaccatcctgttgcccctgttgttaaagcaaaccatgcttccatccaaggactgtttcatgagaatattgagaaagcaggaaattcgtttggaaacatttataaggaagagctgccagttatttcttcccaagttacgaataggataatgcgagcacgacttctcgagagacgggttgctggatttggtgggctgaagaattggcttttcacttgtggtttcggatggttcgtcgacatactggacagtgaaaagctggggatgtatcagatagtttcccttacaatgaaccagctaaaagatatgggtcttgatgctgtaggtccacggaggaaattgatccatgccattgagtgtgtttcccagcccaacgaatttgagatgttttcttgatctcaagcgtctaatcagttcattataaaccactgctactatatttgagaggaatgcctgcagtagtcagagttcagcatctattttgacctggctgaaaatgacaccagttctgggggttttggaagtagaaaattagaagcaacagacagttcgacctatattagaaaatgcttatgagatgatccctgtaaaaatattttgcatctgagatgttcagttgcactactattttgcatgagagttctttaatggaattgctaacttcatgcgacagaaattaagggggatttctatcgaattttggaccgctagatccgtgctaaaattcgtgccaacctcctccatcttaggtgaatcgaggcagctctggggaggtggcagtggccctgaacagttagggttttgggctgcggtcaaggtgggagggggatggggaagggggaagagagatgttttctcatggtttagagggatggccgtgggcggcgaaggtctggtagtgtgtggtggactcgttggccggtggagggtggacctccagcagggtgcaatggacttgggcggctggcggaggaacgctgttcgtgccaactggcttgccggtgaggcaccgaggccaggcagcggcgtgctggaggaggcgagcgtggcgcttgtgcgtgcgtgcggcgagaaaaaggatatgatcactgttgtgcacggatcttaaagctaatcgaatgataatgttgtgcatggtggagggtggacctccagcagggtgcggtggacttgggtggctggcggaggaacgttgttcgcgccatctggcctgccggtgaggcgccgaggccaggcggtggcgtgctggaggaggcgagtgtggcgctcgtgcgtgcgtgcggcgagaaaaaggatatgatcactgttgtgcatggattttaaagctaatcgaatgaaaatgttgtacatggatcttaaagctaatcgaatgataaaaagtttgcatgacacagggcgggattttctgtcacaagttgtgtagattttttagataatggatttaaataaaatctggcctctatatcccaagagatgtatacagccataagttctgtagatagtcccgttcgttgaagatatgggctctgtttggaagctagatactgcagctggacaacagcagcttgagc

SEQ ID NO: 19604 - DNA, 971 bp, Oryza sativa
  ref <308>: DATABASE ACCESSION NUMBER: AK069953
  ref <309>: DATABASE ENTRY DATE: 2001-12-06
gaattaacctgacgccaccacctctctttccctctctctcttccattcaccgacaatctaactaaaaatgaatccgatggccccgatgctgccggcgccggcgcccatggcggcggggccgacggagccggtggtggtggttggcccgcagtactgcgcgccgtacgtggtgccgctgacggtgaccaagaagtccatcagcctcaccgacggcgacttcaccgtcaccgacgccaacgacaacgtcgtcctcaacgtcaagggcaccctcttcagcgtccgccaccgccgcgtcctccacgacgccgtcggccaaccactcctctccatgcaagagaagatacttagcatgcacaacagatgggaagtatacagaggggacagcgcacattcgtgcgataagctcttcaccgtgaagaagtcctcaatgctccagttgatgaagacggagatggatatcttcttggccgggaataccgcggagcaagtctgcgatttcaagatcaagggcagctactgtgacagatcatctgccttctaccttggcaaatcaaacacaatcatagctcaaatgaaccgtaagcacaccgctgcaagtgtggtgctggggagggacgtattcagcatcaccgtgttcccgcaagtcgactacgtgttcatcgcggctcttgttgcgattctggatgatgttcacagggacagaaaggagtgatgaactggaagcactctcatcccaagcacccttttaaatttcactttcatatctgtcaaattacctctgttctaggtattgctatctggttgaggatgtgtgtaaatttttctttgaattatgtttattttcgctggtgttccatgatttgtaattaccttcaagattgatcgatgttgtataactgcttacagcagtgaatgttttctgtttaaagatcaggttgcagagccaagtgttgctgatcaaaattcagttg

SEQ ID NO: 19605 - DNA, 2340 bp, Oryza sativa
  ref <308>: DATABASE ACCESSION NUMBER: AK069954
  ref <309>: DATABASE ENTRY DATE: 2001-12-06
gcttccccttttctcccacctcgccgcgcacccctcccctccccatgtcctcgccttcctccccgcgctcttgctcccgcagcttcacgcttcccccgcactagtacagactcctgatggtggtggaggtaaacctcggcggctaacccatcgtccaccgcgcgcggcggctctgtttttggtttgggcggcattttggtctccttgggggtgtggatttgggttgggggggaggagagctgggtgaagatttgtggcggaaactgttgggggggaattgatggtgggattcatggagtgcgtgcacgattggttgctgtgggacgccgtcctggaatgcggagggatccggaggccaccgattagatagcggccgggggaggagggagaggagaggagagaggagcaggcggtggcagaggcggaggccgtcgccattagcaccagtcaccccgaggcgcgagtcaccaagccatgggggaagacctcgtcaccaccctgtccatggagaacggcggcggtggcggtggcggtggccaccacagcctctgcacccttctctccatggatcccgccggccacctcgacgaccgcgccgtcggggtcatggtgcagccccgcatcggggacggcgccgggcgcgcccacgccgtgtcgctctccggcgcgcatccgccggacatcaaccagccgtggcagactgacctctgcgacatgctcgacgtcagcctcggcccgcagattcaggtgtacgacgccgaggcgctcgccgtgctgagcagtgccccgaaggctgggaaccgcaaggccgccaagcgcggggacagcatctggggcgcctggttcttcttcacgttctacttcaagcccctgctcgcggacaagtgcaaaggcaaggtcacccgggatgccaacggtgtgtcagggtttgacaagacggatctccggctcgacatgttcatggtgcagcacgacatggagaacatgtacatgtgggtcttcaaggagcggccggagaatgcccttggcaagatgcagctgaggagctacatgaacgggcactcccgccctggtgagccgcaattcccgttcagcgttgacaggggatttgtgcgatcacaccggatgcagcgcaagcactaccgtggactctcaaacccacagtgtattcatggaattgaggtggtgagatcaccaaatcttgcaagcataactgaggtagacaggaggaggtgggtggagcttacagggagggagctcaatttcgcaatcccgcaggaggcctgtgattttgggacatggaggactatgccaaacacagagattgagcttgacaggccacatcctgtcatgaagggcaacgttcatcaacacccaaagaagctgcttaatggatctggcttgaatttgtcatcaccctccaatcactcaggagaagatggcatggatctctccccagttagcagcaagcgcaggaaggaggtgtttccgcatgccatggatgaggaatgcttcttgccactcaactcttgcggcgagaggacacaacaagatgtggagatgcattcagtagtgcagccttcatggcagcacgaattttctggggtgatgaaaaaggctcgcgggcctgtgactgccgccaagtcgatttatgaagatgaccaaggctacttgataatggtcagcttaccatttgttgatcagcagaaggtgaaagtttcatggaggaacagtcttactcatggtatagtaaagatcctttgtgttagtacagcccagacgccatacatcagaaggcatgacagggtattcaagcttgctgatcctatgcctgagcactgccctcatggggaatttgtccgtgaaatacctctagcaactcgcatccctgaagacgctaagctagaagcatactttgatgaggccgctgcagtgcttgagatcatggttcccaaacgtggaaatgagccagaagaacatgaagtaagagtctctatgcgcccccctcaccttgcagctaacgatctactcctgacataaccagtggaaggtctatcaaccatatagtcttgtttctgaccaccagatcaatgcccaaacatggctgagaaggtatgagcatgactgtgttgggagttttgctttctgagtatttgtcgtactgcactaggcctcttcagcgaagtctgctgaaggctactcagtttgttctagtatgttatgatgggtgtctttttagccctcatgctcttctcctttgtagaatatggctagattgctttttctagaatttgtactgtgttgaattaaccagaaataaattgtctgaattactattcc

SEQ ID NO: 19606 - DNA, 1691 bp, Oryza sativa
  ref <308>: DATABASE ACCESSION NUMBER: AK069955
  ref <309>: DATABASE ENTRY DATE: 2001-12-06
gacccaccagcaactccctgactccatcggagtatattagctcgtagctgagtgcggctcagtctgccagctcgatcggaggcgctttcatcgatcggcggcggcagcgatggcacgctccgccgtgttgttgcacgccgtcctcctcgtcctcgccgtcgcggtgtcgtcgtggcgtggcgtggtctccggcgacgcggcggtggtgctcggccggaaggccgccgggatgagtagtgctgcagcgtcgtcgtcggccgacgacgacctgccggcgctgcagatctcggcgaggaaggacggcgccgggaacgataagtacgccgtgatcttcgacgccggcagcaccgggagccgggttcacgtcttcaggttcgacaagcagatggacctcgtcaagatcggcgacgacatggagctcttcgccaaggtgaagcccgggttgagctcatatgctggcaaaccacaggaagctgcaaactccattgctcctctgctagagaaggctaaaggtgttgttcccaagcagcttcagaaaagaactcccctcaaacttggggccactgctggtctaagactgattggagatgagaagtcagagcaaattcttgaagcggttcgagatcttgtccacagcaagagcaatttccagtacaaaccagaatggatcagtgtccttgggggttctcaagaaggatccaacctctgggttgctctgaactatcttttggggaagttaggaggggattactcaaaaaccgtaggagtgatcgatctcggaggtggttcagttcaaatggcctatgccatttcttcagatgctgcagaaaactctcctccagtccctgtcggcaaagatccttatgttacaaaggagtatctcaagggaaaagattataacctttatgttcacagttacttgcattatgggctccaagcttctcgcgtcgagattcttaagacgaagaatgggcaattcagctcctgcatgcttcgcgaattcaatggtacatacaagtacaacggcgaggagtacgacgcggcggcgtcgccggaaggggcggaccacggcaagtgcggcgaggaggcggcggcggcgctgggcctggacgcgccgtgcgagtcccggaactgcagcttcaacggcgtgtggaacggcggcggcggcgccggcatggccgacctctacgtggcgtcctacttctacgacagggcggtgcacggcgggttcgtcgtcgacgacgcgccgagcgccgtgaccaccccggcggcgttcgcggaggcggcgtcgaaggcctgctcgctgagctccggcgaggccgcggccgcgtacccggaggcgttcgacgtgcagttcatatgcatggacctgacgtaccagtacacattgcttacaaagggcttcggtttgaagccaactagggagatgacgcttgtgaaacaggtcaagtatggggattgctacgtggagtcggcgtggccgctgggtactgccatagaagccttgtcctcccagaagagtcatcagtctgcatgatccatttagctatatcacgcaaggatgcctacatatatgtatgtgttctgattcacgtacgtttgagcggtggagaagatgtttggcagatttgagtagcaaattcataacactgcgcaattaataacttaataaaatggtattgtttgacggc

SEQ ID NO: 19607 - DNA, 1567 bp, Oryza sativa
  ref <308>: DATABASE ACCESSION NUMBER: AK099121
  ref <309>: DATABASE ENTRY DATE: 2002-08-28
gggagctcgagcgtggcggcggaagcgcggcgaggttcagcagcggggatcggggaggcgagccggccggcagaagtgcggaggcggagcacagcgaggagggagacgaactggttggccactttgcctcaaccatatacaaaaatagtgtttcaccggatgttcatcttgctgctctttttttccctcaaaactgttcgtagatcgaccaggaattcgcgatggttgcgctctccaagttagtgctgatcactgcagtggcgctgctgggctgggcgtacaaggtcgcgcggccgccgccgccgccgatcttgggcggtccgggagggccaccggtctcctctccgagagtccagctcaaggacggccggcacctggcctacagggaagccggggtcggcagggagatcgccaagtacaagatcattttctcccatggcttcgcctccaccaaggaatccgacttcccggtgtcccaagagctggcagaggagctggggatttacctgctgtacttcgacagggctgggtatggcgacagcgacgccaacccgaagcgggggctgaagagcgacgccacggacgtcgaggagctcgccgacaagctgcagctcggggagaagttctatgtggttgggacttccatgggcggctacgttgcgtggagctgcctcaactacatcccttacaggctggccggcgtggcgctggtcgtgccggcggtgaactactggtggccgatgcccgccagtgtgtcggccagtgcgtaccgcaagctggacgtcggggaccggaggacgttctggatcgcgcaccacatgccttggctgttctacgcctggttcaatcaaaagtggttcaggatctcaccgatcgtggaggggaagcccgaggctttcactgaaaaggactgggagatcctagctgagattcagagaactggccaattggacagggggagggcgacgaagcagggagcctaccactcgctgtgccgcgacgcgacgatcctgttcggggcgtgggagttcgacccgacggcgatcgagaacccgttccccaacggggacggcgtcgtcagcatctggcaagggcgcgaggacaagatcgtgcgggtggaggcgcagcgctacgtggcggagaagctcccgtgggtacggtaccacgagcaccccgagggcggccacctcttcatgtgcgccgacgggttgggcgacaagatcgtccgggagctcctgctcggcgaggagccgcgagatttgtagacagatcgagttcgtgtcctgtttcgctacacagagaggggaacacaaactcacagattggggaggaatataggtccaagcggtgcttgtagttgttgatggaataaacctccgatttgctaaactagaaaatcgaacttaaaatcctgtgaatttctaacttctgatatgcaccgcagtctgtgctccgatcaggctagtgttgaatatatagattgtgttttcttttccgcgtaggtgaattaaagactgttcattcacaaccgttcatacaaaacaataaatcggcataattaaattcg

SEQ ID NO: 19608 - DNA, 2747 bp, Oryza sativa
  ref <308>: DATABASE ACCESSION NUMBER: AK069956
  ref <309>: DATABASE ENTRY DATE: 2001-12-06
gattccctcctctctctctctctctctatctctctctctctcttcaacacagtaacgaactctccagtctccaccacgcgtgcgaggaagcacagttgaactcaagcaagacgaagtcgttgtcgctggccgctggccgctgggggagtagatgacgtcgccatcggagcaaccactgtcggagaagacttcgagctcgccgccggcagcggcaacaccgcgagaaaatgcggtcgacgccggttaggccttgagctcgccggtggcagcggcgccacaacaaggaacaaccgttatcaaagaggacccgagctcggcggcggcggtggcgtcaacgtcacaaggagataccgctagcgccggttagggcccagagctcggcggcggcggcacttggagggagcgggttgaagcttgaggcgccgttgatggagatggctgtgagctcgccgacgaattaaggtgaggatggtgggagcatcgagctagcaaggatttgttccatgctagtttctttatgttgcacacaagtgtttcttgatgttgcattttggtattccttgatgttgcaattcatatttctggatgttgcatttggtacttgatgttgcaggtgatttctttagatgttgcatatgtttttgctcttgaagtctgtgttttttagtgtttcatccgactgaaacattttcagtaaaataatgaaacattctttcataaaggatggaacatcaaagaaacaactcacgttggaacattttttctggaacggggaaacatttgcaacaacttatggtgaaacattttatttggaacagtgaaacattgcaacatctcttttaacatctagtgaaacattgcaacatctctttaatatatagtggaacaccgtccagagatttgtaaaactccggacgtccgatgtgtagtcatctccttttatgccatctgcaaaacaagcccggcactaacaaaaccacgccttgtttctattttttaagataatggaaatagattacatcttcggcttttatcctaaaacacacagctataagtttaatagtaataaaaaaaagttaagataaaagtaaatcaaaataagaaataaggtgatcggacaaatctcatgctcctctttattatttctttattattaactagcgttaaaccatatagttttttttctagcaattctaatggaactacgtcactcatagtgaaaatataatggaagggatggtgattttacatgagacttcatgagttgcacaagaaaaatatggatggggttattttcaaaattggttgtacacattcattcgtggcgatcaatcttgccacgatcgaggattactacgactctctgtgctatcactttatgtcaccatctaaactcaacagtaaaccagagcatgtggctaccatccatcccccgacccatcatacaggtacagccgtatagcaacctcttcacctctgtttcttgcacatgcgcaattccgccgttttttcttgcactagaacctgcactgcgtgtaagagctctcctacacgatgggaccaggaagcaacaactccttcccggccgagaaaagggttgcagtggtgacaggagggaacaaaggacttgggctcgagatatgcaagcagctggctgccaatggagtcaccgtcgtcttgacagcgaggagcgaggagaggggcgccggagcagcggccgcgcttcgtcagctcgggctatcggaggtcctgttccatcagtttgatgtgtctgagccttccagcgccgctggcttggctgattttatagagcacaagtttggcaagcttgacatattggaattttgggggttacatttgattttggcaacttagatcttaataaagcgattgagggcaagagtgcaaacgagacgctggaatggttgatgcaacacaccgtggagactgccgagaatgcagaagaatgcttgaaaataaactatcacggcaacaaaaaaaccatacaagcactccttcctctcctccaatcatcacctgatggaagaattgtaactgtttcctctgtttttggacaactatcgtttttcagtggggagaaactcaaagaggagctcaacgatttcagcaagctaagcgaggagaggatagacgagctggcagagctgttcgtcagggacttcaaggacggagagctggagtcccggggatggccagccagagccgacgcgttcgcggcctacaagacgtccaaggcgctgcagcacgcttacacgagggtcctcgcgaggaagcacgcctcctcctcctcctcgccgttgcgcgtcaactgcgtgcatcctgggtacgtcaagacggacatgaccctcggcaccggggagctgacggtggaggaaggcgcggctggccctgtcgcactggccctgtcgccgccgggaggcgccacgggcgtgttcttcatccaaaccgaaccagcgtccttcgtctgagcgtgattcctccggaaaatcagacgcagcttgtttctcatatctaggggtgggcattcggtctaatcgagaaattcggttcggttcctcggtcttctgaaaaattcggtcttcccaaccacaagaccgatcggtcttaaaaaaactcaagaccgagcatttcgatcttcggttagttcggttcggtctcggtcatagaccgaactagccatagcagcagtttaaacagcaaaaagaattaataaaaaaaaactccat

SEQ ID NO: 19609 - DNA, 1412 bp, Oryza sativa
  ref <308>: DATABASE ACCESSION NUMBER: AK069957
  ref <309>: DATABASE ENTRY DATE: 2001-12-06
ggtgcgaagattacgcctctccacgcgcaatcctatcctcctcctcgctcctctccgcgtgtactggcgccgcaggccgcagccttgctccagcgctactctcgctggagccgaggttgtccccttccgccgcccacgctgacttcttttccaacagccgccggatcctacttcttcgccatccgccgtggccggagccaaggtcggtcccttccgccgccaccaccaccgccaccgcgcactccaccgctgccgtggtcttccccatcggccacgcccggagtcgacgtcgtccccatccgccgtcgccgccgccgacggagtggtcgtccccagccgccgcggatttgtaaattattgtctttttgacagtattcctaaagtgtttcgatcttccaccgtaccgacttccagccgctcgaaggcgaggtcacatggcgtcatccactctgttgcttcctggtcgctgctacgccgccttcaccgttcgactctcgcgtcgctgcccccatcgctgcatcccgagaagagcctacctctggtggtgtcgttgtcgccagccgccatggccagatgtggaccgggatcgtacgtcttcaccgccgccgaagtatctgccagacggctgccagcgtcactgcttcgcgatctccgacgacgagattgcataggcagctacaaccacgaacccacgttttacccaccaccatcgcgggcgtcaccagcagaagaggatcacaaatcattgttgccccggtggacgaagacgcagctgcctctttcaatgaattgttggtctttttttatgctaaggtagtacttggtgagtccgtgagctgatgataccttggtatggatgcttgactgattaacgatggaaatgtcagggcgcagtgaaagaatgtggaaacagccgtcatgcccctctaatttctcatctactgtgtacaatagtggattccctgatccaggattagcaccatatccaatgatgagtaatttctaaaaagggttcattgcacagcccaaaatagtgctctgcatctgttttctgcatggatggcttcagtagccataccaacatattggcttcaggtgtagccgtgcagcaatgccacatcttccttcaaaggtggagacaatgctatattatagcttgtgacggttggtttggtgtagtagatggagttgatcaatagttatttgaaggaccaaagttgatggcataattgatctccctctcctctgtcctgctactgacattagaagtgcaagcttttcttgtaattgttttttagtgtacttttcttgtttgtgataatcaattttttactccgattgagttgaccttaggagtgcaatgtataaattgtgcttgatccataaaatatttttgcttttattctgttttt

SEQ ID NO: 19610 - DNA, 1013 bp, Oryza sativa
  ref <308>: DATABASE ACCESSION NUMBER: AK069958
  ref <309>: DATABASE ENTRY DATE: 2001-12-06
gattcacacaagcatctcctcttctcctcttcttccatctgcaagctcgagctcgttctagaaggttctagacacatcagttgccatgggcaacggcctctccccgtgcatgcacctgccggcgacggcggcggcgggggtgaagctggtgtactggggcgggcagacgaggatgctggacgacgatggcggggtgtgcgccgtggcgggggacgtcacggcggagctccccggtgaccacgtcgtctgcgcggccgactccttctacgtcggcctcccgatcccggtggtgtccgccggcgaggagctgatggcggggcggacgtacttcgtcctccccgccgagcgcttctcctgcttcaaggtgctcaccgccgcggcgctcgcgtcgctgtcgccggcgccgtcgaagaaggtgtccgtggctgggccggggcagtgcccgttcgagtacgtcaagggcgagggcggcgccacgctcatccgagtcctcccggagttcatcgagaaggtgatcagctgcgacgagaacggcggcggtgcgcgccgccggaagccgtcgacgacggcgacggcgacggcgacggagctgtgcagcacgccggagctgaagcggcattacgcgctgctgatggggcggaggaaccagccgtggtcgccgaggctggagacgatctcggagtgcaacaagactaggaagctgctactgcggacgctggcgaggctcttgtcgtcgcgatgagcggcggcggcggcgcgtcgaactcgaagacgaccaccaccacactacgctagttgtaggattctagctgtgcagataatacatagaaggattccattcagacatgtacagtcaattggcgaatggagattgagattaagacgcactgttcaactaattagatgggtgaaactgcgatatatatagagcgagaaaacacggcacaaatacacacttctttgtaaattaagtattcaaagtctcaaattaaacgatacttcctccatttcag

SEQ ID NO: 19611 - DNA, 1720 bp, Oryza sativa
  ref <308>: DATABASE ACCESSION NUMBER: AK069959
  ref <309>: DATABASE ENTRY DATE: 2001-12-06
gtgcagctagcgcgcggtacggtaggcaccagctatacagcgcgccacacacaacaatggccggcgctaccgctgccgccgtctcctcctccttcctcgcgctcgcgttgctctcgctctgcgccgcggccgctggcggctcgcctcagctggacgcggaggccgcgcggcagcaggaggccgaccgcgtgacgaggctgccggggcaacccgccgtgcggttcgcgcagtacgccgggtacgtgacggtgaacgagacgcacggccgcgcgctcttctactggttcttcgaggccaccgccgccgccgacaagaagcccctcgtcctctggctcaacggcgggcctgggtgttcgtctgttgggtatggagaagcggaggagctcggtccattcttggtgcagaagggcaagccggagctaaaatggaacaagtactcgtggaacaaagaggccaatctgatgttcctggagtcccctgtgggtgtcggcttctcatacactaacacaagctccgatctgcagcagcttggcgacaagatcaccgctgatgatgcttacatcttcctgctcaactggttcaagcgcttccctcagtacaaatctcacgacttctacatcgctggagagagctacgctgggcattacgttccacagctttcggagaagattttcgacggcaacaagcaaggccccaaggagaactacatcaacttcaagggtttcatgatagggaatgccctgatggacgacgagacggaccagacgggcatgatcgactacgcctgggaccacgccgtcatctcggaccgggtgtacgccgacgtcaagaagtactgcaacttcagcatggagaacgtgaccgacgcgtgcgacagcgcgctcaccgagtacttcgccgtgtaccgcctcatcgacatgtacagcctctacacccccgtctgcaccgaggtctcgtcgtcggcggcgttcggccagcgccaggtcgccgtccacggcgccgccccaaaaatcttctccaaataccatgggtggtacatgaggccggcggggtacgatccgtgcacgtcggatcacgccgaggtgtacttcaaccgggctgacgtgcaggaggcgctgcacgccaacttgaccaatatcggctacaactggacgcactgcagcgacgtgatcggcaagtggagagatgctcccttctcgactctccccatcatccgtaagctcgtcgccggcggcatcagggtctgggttttcagcggtgacaccgatggaaggatccccgtgacgtcgacgaggctcaccctgaacaagcttgggctgaagacggtgcaggagtggacgccgtggtacgaccatcagcaggttggaggatggacgatcctctacgagggcctgacgttcgtgacgatccgcggcgccgggcacgaggttcccctgcacgcgccgaggcaggcgctcagcctcttcagccacttcttggctgacaagaagatgcctccgacggcgttcccctagtcgctcgcatgcagtctgccttcttcaacgatggcgaggaacgggcgtcgtgcgcccactaggttgttttccagcgataccaactgatcaggaaattttcttttctttggtccaagactccaagtcatgtaacacagtggaaattcgattggaacaatcgataacaataaaatcatatatagtgttgattgatttcgatgctcgcg

SEQ ID NO: 19612 - DNA, 1233 bp, Oryza sativa
  ref <308>: DATABASE ACCESSION NUMBER: AK069960
  ref <309>: DATABASE ENTRY DATE: 2001-12-06
gttggacaaaatgactccggcggctgatggcgacgacgatgagacgacatgcatccgtgccttggagctaatcttcacctttgtcgttcccatgacactcaaggcgacgatcaagcttggcctcctcgacgcactcaccggcggcggccacgcactcaccgccgacgagctggccgcggccgcgcaactgccggccgaggcggcgtcgtcggtggaccgcatgctgaggctcctcgcgtcgttggatgtcgtcaagtgcgccccgacagacactggaggcgaacgagctgtccggcggtacacgccagcgccggtgtgcaggtggtttgccggcgaaaggtctctggcaccgctggccatgttcctcctcgacgacgactacctgagcacctggaatcagttgccggcggcggtggccggcggcgacgggcaggtggcgttcgagaaggctcgcgggatgcccatgttcgagtacatggggacgaaccgccggctgaacacgctcttcaaccaggccatggtgcagcagtcgacggtggtgatcggcaagctgctcgagcgattccaggggttcgacggcgtcagcgtgctcgtcgacgtcggcgggggcaccggcgccaccctggagatgatcacttcgaggtacaagaacatcaccggcgttaacttcgacctgcctcatgttattgctcaggctccatctcttccgggtgtcaaacatatagctggaaatatgtttgagagcgtacctaatggagatgcaattttcttgaagtcgatgctccacctacataacgatgaggactgcatcaagatcctcaagaagtgccaccaagcactcacacacaacgggaaggtgattgctgttgagatacttctcccagcgattccagagccggtcccaacagcacaaaacccattccggatggacatgatcatgctcaacaatcactggggaggaaaggagaggacggaaccagagtttgctaagctagccgtggaatgtggctacacgggtgtatttcaagcaacctatattttcgctaactattgggctcttgagttcagcaagtagttcttcaaaatcatgttaatttggttttatatttattatgtatttcaataagtatatatggcaaagagtaattccgatgccatgcaaatggtttgaaattgtttttacttgtgtaataaaaatataaattaccccctataaatcgaacatcgtactgc

SEQ ID NO: 19613 - DNA, 2155 bp, Oryza sativa
  ref <308>: DATABASE ACCESSION NUMBER: AK069961
  ref <309>: DATABASE ENTRY DATE: 2001-12-06
gaccaaacatgatacgccggtaagcaagcaaaaaagtcgatcatgcaactacccgagggaggcattacatcgaacagttggcgggcaccgtcctcgtcgccaccgggggagggagagggagagcatgagcagccgagaaagcgacgacgcaggagcgggagcgtggtcggagccccgagctccgccgcccagatacgaggaggagccccgccgccgcagcctccgggcctgcagtggggaaggcgacgcgacggggcgtgagctgccgctgccccggcggccaagagcatctcgcaactgaagtggcgcgcgcgcgtgaaccgctcgtctctgaagtctaatccttcatgtcgctgctgccaaagctttcctaggggacagaagatcctgcaatatttgtgatgctttgtctgaagaactcttcaacttctgcggcatcctcaggaagtggcatctcatccatcagcagcttgacagcaaatgtgatacacatgtcccattcggacggctctccgtatatcgatgctagggctgcttctgcacctgaaacacctgaaacaagaaaatttttaccaggactgttttgatccagagctgaagttgttcagtgtaaagcttaccattgtctgctttgttctccataggattggtggcaccagtggcatgctgatcaagagcactggcagctgcaccattgctgtccttgaggccagctccagcatcatcagctatcaaggcatcctcctgcttaaatgcatctgcacctgaaagtttcttgtccattggagtattgagagttggcacaccgtccttctggtttgtattttcactagtgctgttcttcacctcagctgaggtatcaatcactcggacaccagtcttctcagtaacatcgttaccggtgccggttttcgcctctcccttggaagctgtcttcttcctcttccttgaataaacagcctgttcattaccattcctgttcttcccagtttcaaatttctggagctcatcctgtgatgtccacaatgcaggctcttttaccctgtggcgcgccgaacgtttaccgcgtgtttttgggtctatgcgttcagtgatctctgtttttatttctagaagtttgtatttagtatcttcaccattgttgtcctttaatttaggtgccgtttcagatgcactgcttgacatgctgtctctttcagttgatttcatcatctttgagccaacactccgatcattcacatattttcttatattccttacagagttcagaagcccctgaagtggtgcccaaggtgtatgattccttccccttgggcggtccgaacgctttccatgaatcttgggaagcataggttcagaatctcctgatgatcctgacaaaaagtaaactacattcaattcattgacattgaaacagggttgttgagatatgcatccaaattacaaattactaatatcaaggggggaagtaaatacaacagtactgacagaattcaactgatttttaacatgaattcattgcccttctgcttggtaaactaagataaactgttactttcaaagggggaagaggtgcaggcaaatgaatgacatatgaaaagatttcccttttggcatgatcttccttttgagaaattatttccctctagtgtttcttctggttattcctaaaacataaattagatagcttttcagcacaataccaaagtaaattagagtggataactcattaaaaaataccttaaaaacaagaatgaactagtagtgaagaatatagaaatgcaagacactgatcatccaatagaatttcaaggaatggaaagatggattaacacgcatccaaaacttttctatatatgaatttcttattatgttgttttaaatctattttctaacttcataatatttaatccgttagcttgtaccctcaaataatcatcacaaatcattcagttattcagccattcagcacagaagaacaggagaatgcacagcttggtatttagcactatgaaatatattgattaataatcaatagttttagttggagataactgctatttaacaacctatgtaaggcatattctatttggcagaaatttttcacgttttcctactggaattaaactgtttcttgtaaagttcatgtattcct

SEQ ID NO: 19614 - DNA, 3065 bp, Oryza sativa
  ref <308>: DATABASE ACCESSION NUMBER: AK069962
  ref <309>: DATABASE ENTRY DATE: 2001-12-06
gctgaacgcgacggcgcggcaaaccaaaggtgctgcgcctgcgggagtggtggtgcacgcattagccaactcgacgcgtgaggaggaggcggccgcggagcgtccagcgatgtccggcgctggtggcggattcctcgccgacgcgaacgacccctggctcaagccgcggctgctgcgggcggtggtcggcgagcggctgccgaggcccgggaccgacctgccgccggcggagctcgcctccatcctcgacgcggtgcgcacgcatggcctccttacggagcgccaacccgggccgcacgacccgaagctcgccgaggcgtggcgtgccgccgtcgacgcgtgggtcgagcgcattggtgagctcatgcagaacaacttgccatacagttgttggttgggtacttgctttctcggtctgacgttccaagagtgctgcaatgagcgctttgcagaatcatactccagttggtttgagaaaattcttagtaacttgcaggaaccatctactgtgcaacttgttattatagtctcttgtacttccatgtctgatttatttgtgagactggcaaggtttttgaacttaaagaaagaggcatcatcatttgctggaagacttgttgaacctgtgctgctgcttttaaatggaaatggtcaagtggctgatgaagcagttgatttgctgaggacagttattaaattgtacccatcatctttaaatcgacattacaataaagttgaatccgccattgcaacaaatgtaatgagttcagaagtcaatatcaaactaaaggagaaattcgcaagagccttagcatcattaccttctgtccgagtatctgaggagagttggtcattgatgattcaaaagatactaattgtggtaaataatcttttgaatgatgcatttattgggctggaagaagaaaagaaaggccatgagattctaatgttactagttccacctggaaatgatcctccactaatgctgggagatcaaacaaagtggtctggaggaaatgtgcatgtcacaaagaaatttcgtgtctatactgttcctactatttcagtccttattcattgctgctgtgtgatgctgactagttattatccagttcaggtgaatgtcccagtgcgtgctttgatagctttgacacggagagttctgtcagttgatgggtcattgcataaaaagttattcccttcaacaacttccttgcaccaagagcttatttgttttgagcttccatcattgcattctactttcttggatttgctcagtgcaacaataaaaggaatgcgaagccaacttttgccacatgctgctaatattgttcggctcataactaagtactttgaaatagcgaagttgtctactatgaggacaaaagtatacggcattgtgcagcagttgctgacatccatgggcgttgggatatctatgcacttgcttgaggccatagtaagcaattcagttgctgatctggacgacagctgtggccaagatatgacttcattaagcacaaaacctactatagcgacaaatgaatcatcatcaaaaagttattccaagaagaggaagcaagaaacagattcacaaaatttacatgtctccggttcagacaaaacagtaatcagccctaagaaaaggaaaagttcttccatgtcaactacttctgaaactacagctgatgttagaatgttgactccactctctgtgaaactagcagctcttgaaacgctggaaattctacttaatgtggggggttcactgaggacagatcactggagggcagaggtggacttgctcctaattaacatagctagaagtgcttgtgacacaggagggaggtacgagtacaaactatcatctgcagttggggagacaagcatagcagacttccagcttgcttcattgaaggcattgttggcatcttttctttcttctcatgcccgccctccttatttagcccaaggaattgaactcttcagaagaggaaagctagagataggcactaagcttgcagaattttgttcacatgctttgctggctttggatgtccttacacatcctcgagcactttctctagaaagtgcagctccttcaggccctggactcacctacggtgcacctgaaaaggcaattttcggtactgaaaaatataggttttcactgtctggaaaccaatctcaggctttggaggatgacgacccttatgatgattggttgacatccaccaaggtcagtgaaccaacaggttctccagcgaaagatagccctgtaggaaaagagaaagcaattgagaagtcgcaaggtgaaaagcaaatcacccctgtggaagaacatcaacaaatagatttagctgtagttcctgcggccatacaagacgttccaacgtctgggaagactgatattgaaatggcggatgcggccactacagaaacggtcaatctaaaagcaacggataatccttcaagctccaatgatggtttaactcaagtccgcacactgctacctgatctcaaccaacaggtagctgccccagtctccgacgaagggcacactgacattgtcgatcatcttcggaacaaaacgtcagcttttgatgcatcattaagcaaaacagtaactggaggtgaagcaccgcaatctggttctggttcttcccacttcatgcagtccagcaaaactgatgattctgatgtggaatcagaagattcaatgccaggtattgttgatggcgaccctgactctgactagatttgaataacatttaatgtatcaatgtatcttgctttttaagactgagtatatgtcatggactaatgatcgtcagaagcgttaaggctgttgtattccatcacttaccttgacaaactactagcattaagtagagcacagcatgattgatcatgacggagccacttgttactcctacaatagatgtcgcagtaaggtggcttcgacggaaatatttttcaggcattttgcattggtactgggtattgtctggtgggttttatatgtgttttctggcagtgaacatccggtttgcacattgatttgc

SEQ ID NO: 19615 - DNA, 2512 bp, Oryza sativa
  ref <308>: DATABASE ACCESSION NUMBER: AK069963
  ref <309>: DATABASE ENTRY DATE: 2001-12-06
gaggcgggcgcacgcgcgggggccgatggatggggagcggcggctagtaagtggcggtggcggaggcgctggaggtggcggcgtgatggcggtgggcatggtggtcgtcggcgtcggcgtgccccgcttctcccagtggtcgtcggcgtcggcgtgccccgcttctcccagtggtcgtcggcgtcgccatggtggtcgttgttgtcgccatagtggtggtctcagtggcgacagatgtggtggccagcgtgcggcgtgcaggcgggcggggccaggagatggtggccagcgtgcggcgtgcccgacgacagcggcgaaggaggctcaacagtcggcggaggcgcgccgcctacaagccgagcgttgactcacataaaggagaaccacaaatttcagctaaacaggaggaaaggtcaaagggaagagaatccagcaaatggccttgcacaccttgtcattgaaattaagaacaaacatgagctgaagtatgatgttctcttctaatagctcctccttttattgagtttatgcctgtcaattttcaaccaaattcatcttcgtcacaaaaaattttgtgtcaaaaatttcaggtgtgtttatgtgaggcatgcgattaccgtatactggggtggtgtaaggcctggtgctgatggaatggagcactacgaatcgaagatgcagcacccggtttcatcaaccggagttcagaagaacgagccatgtgatgctctgaacagcataaccaccaatggccttggccttgtgaaccctgacagagtgttcagcttctacgacgagctacacgcctaccttgcatcagctgggatcgatggagtgaaagtagatgttcagaacattcttgagacactgggtgctggccatggaatggtggttttggttgtttacatgcttctgctgatgatgatgcagttctaagaggagtgcagttgtgagagcttctaatgatttctgacccagagaacatgcctcacatactatacatattgcatctgttgcatataatactgtatttcttggagaatttatgcagccagactgggacatgttccatttgagaatcatcactacattcctttgctaccatggattatgtgatgtctaagctgataatctgaatttcttttggttgacagagcgttcatccgatggctgaataccatgctgcagcaagagcagtcagcggctgtgccatatatgtcagtgacaagcctgggaaccatgacttcaatctgctgaagaagctggttcttcctgacggatcgatcctgagagccaaactccctgagaatgccatgacgatccagtgcgagtcaatgtcgtcgtcggtgcggtcgtcttcgtgggtgaaagacgtcggtacggcgtggacgaccatgacgttgctaagcagctgcagcgcgccgcgcagtcctcaatgacgtacggccgctgccgctgctcacctgctcctgcggccgcgggtagttcgagtcacacgacggcgccgtttccgattgcacgcgcgtacgcttggctgcaggcgaagtcgtaggtgtcgtcggcttctccttctccccgccggtcaccgcctgtcgacgacgtcccggcaccactccacatccgccggccgccgcgctgaagcagcaacggggttcccgatcttcgatgagaggtggataaactttgatttgatgctgcgccttagcaaccggtacaccgactccacgttgttgctgttcttgtcgtgccaagaacaaccttgaacctacaagcaatcgaagaacaagcaagaacaagttgacaaggaaacagatcacggcacttgtcatatgatgaaactgaaacaaaccaaaatggggttctgaatacaagtatccaggtggtctagccgatacacgcgagtacaatgaagtagctgcagctaaacttacatccaaacaaaaacccaaactgcaaaatgggggctgctaggagtttatataggtggagaaatgaccaggagaggaggtgggagcaaaccctaggttttatggacccctaatgggctgtaaagatacaaaggcacaagcccaagtttcagatgcgaaaactattttggtcattctgagcagctcggttcgaatctgaaggtgaggttgggcatatctgaaagtagacaacaagatctttccaacgagtactcatatggttgaaatggagctcatatgcaaatttggcgcccgtttgaagccaactctattgcaggtggccgaattggatttccgaagttgtgtgggatcttgatgacttccatttgatgtatgatgtgagcaatggttctatctgtagtaggcatggtcacatcatcctctcctttttcacagaaaaccgtcctcagttttgccatatggtgctcttcacgtagtgcatgatcttgcccatagaagagtgtacatgaaaacaaatgcaacaaattcttgtcatgtaatatcaatagttctttagcaaatagaattattctccagtgagacgg

SEQ ID NO: 19616 - DNA, 3272 bp, Oryza sativa
  ref <308>: DATABASE ACCESSION NUMBER: AK069964
  ref <309>: DATABASE ENTRY DATE: 2001-12-06
cctccacgttctcctctcctcttctcccttcttcccttcttcctcctcctcctccagatccaccctccgccgccctcatttcgcagccgcgggtttggattaccgtgaaatgagctttcttctcctctctgaaaaggtcagtttggtggtggaaagattggattttgattcccccgattcgcttcccctccggaaagattcaaccttgtcagctctccatccctcaacgaggcagtactaggagctatcaatcagctatggcggaggcggtggatgggggcagctgggaggacatgctgaggaggatcctcccgccggggtcccccatcccggaggcgccgccgaatctcgattactccatagccctagagtacgacggcccaccggtggcctatgacctacctagggtggaccccgtcgagatccccacggcggagccggtgtccggcccgcagaggcttgggaacggaggagggttgccggttgtggagcccatcccgctcccagtgtcccggattgcccggtgcgccgagcccgtgtcggcgcaggtcggcggcggcagctcggattcggtcaattcggtactgcagaatgaggagtttgacgatgatgatgatgattcccgctcgttgtcgcatgattcagcgcagagctcgccggggccgcaggataggagccgccggacgcaggaggggaggagaggcgccacggtgacgttcgggttcacgccggacagcaagtgtgagagcaaggagttcgaggagatgtccgagcagtacgtggtggtgaccaagaaggagaagaggaggagggcgtgctatcggtgtgggaagaggaaatgggagagcaaggaagcgtgcatcgtgtgcgatgcgaggtactgcggctactgtgtgctgaggatgatggggtcgatgccggaagggcgcaagtgcgtcacttgcattggccagccaattgatgagtccaagcggtcaaagctagggaagaactcaaggacactctcaaggttacttagccccttggaagtaaggcaaatattgaaagccgagaaggagtgccaagcaaaccagcttcggccggagcaacttattgtgaatggttgtccactggggccagatgagctgacagacctgcttagttgctcccggccacctcagaagctgaagcctggaaagtattggtatgacaaggagtcaggtttatggggaaaggaaggagaaaaaccggaaagaattattagttctaacctcagctttactgggaagcttcaggctaacgccagtaacggaaatacccaagtttatataaatggaagggaaataacaaagattgagctgaaaattctaaaggttgcaaatgttcaatgtcctcgtgatactcatttttgggtttatgatgatggtcgctatgaagaagaaggacagaacaacatcaaaggaaaaatctgggagtcggctttgacacgttttgcatgcgcattattttcacttccggtgcctcctgggaactctaatgaaacgagagatgaagttcactattctgcaagaactgttcctgattatttggaccagaaaagaatccaaaagctgctgcttcttggaccagatggtgctggtacaagcacaatttttaaacaggctaagtacttgtacgggacaagattcacccaagaagaacttgaaaacatcaaactgattatccaaagcaatatgttcaagtaccttggaattttgcttgagggtcgtgaacgctttgaggaagaagctttatctagatcaaattgcacaatttcagaggatgaagaaacccaacaagatgaaaataaagcaaatggttcaaattcctgtatatactcgataaatccaaggctgaagaaattctcagattggcttttggatatcatagcgatgggcgatctagatgctttcttccctgccgcaacgcgagaatacgctccatttgttgatgagatgtggaaggatcctgccatacaagcaacatataaaagaaaggacgaattgcatttccttcctgatgttgctgagtacttcttgagcagggccattgaggtatcgagcaatgagtatgaaccttcagagaaagatgtgatctttgctgaaggtgtaacacaagggaatgggttggctttcattgaattcgcccttgatgatcgcagtcccatgtctgagccttacattgagaaccctgaagcacattcccagcctcttaccaaatatcagttgattagagtaagtgccaagggcatgaatgatggctgcaagtgggtggaaatgtttgaggatgtccgcatggtgatattctctgtagccctcagtgactatgaccaagtgggacctcctgtatatggcagcagtcggcctctcttgaacaagatgatgcaaagcaaagagttatttgaggctacgattcggcaaccatgcttctgcgatactcctttcgtcctggtactcaacaagtatgacctctttgaggagaagatcaaccgcgcacctctaacgacctgcgagtggttcaacgacttctccccggtgcggacacaccacaacaaccagtcgctcgcccagcaggcgtactactacgtagcggtgaagttcaaggacctgtactacgagcacacgggccggaagctcttcgtgtggcaggcgcgtgcccgtgaccgccagacggtcgacgaggcgttcaagtacgtgagggagatcctccggtgggaggatgagaaagaggagaacttgtatggcggcggggaagactcgttctacagcaccacggaaatgagctcctctcctttcatccgagcagaatgaattcgacattggctgctgaaatcgaattctttgcaacccggcgaaagagtgcccggttcctttcgccgaattggtacagaaaacattggatatggttgtatattgattttacaggttatcctgatcgaaattgttgctgttcatcacctgaagagaataggatccgttggtcctgttgttgcgctagcctgtactaatttttttcgaaacaaatgtacaaagaaagaaagaaaaagttgtgtgatatgtttgtgatttgtaccagtaaagaggtaaaaagcaaaagtgtggatgatagtggccatattgtttggtgaactaaccttagctacactagctgtaaaatcatgtagcagttcagctgttctgtcgggttgagaaaaataaattgacatccacattcaagactactagttgtcatctgcaacttcgaaagcagttgcg

SEQ ID NO: 19617 - DNA, 2212 bp, Oryza sativa
  ref <308>: DATABASE ACCESSION NUMBER: AK069965
  ref <309>: DATABASE ENTRY DATE: 2001-12-06
gacggaacatttatttcttcttccccactccctctcctcggcttcccttccccgcgatgttttctcgaatactcctctaaaccccacctaaaaccctagctctgctgcctaagcgcgcgcgcctcgccgatggactcctcggcgcgatcgggcggcggaggcaccggcgggtacaccagcactcgcgtgtggatggtcgcgggcgtcgccatcgccggcgccatcgtcttcgtggaggccgcgcggcgcaggcgccggtggctgcgggacaggtccgaggttccccccgatttcggcgccttctgctaccgcttcgagatcgccccggcgccgcagcctccgcctcccgccgcgcgccagctactctcgggcctcacattcgcggccagcgacaacttcgagatcgagggctatgtggctgggtttgggaatccggactggaagaggactcacaaggcagccacgcgcacggcggttcctgtcacgatgctgcagaagcaggggggcacctacgttggtagcacagtcatggatgagctcggatttggtgtttctggaggaaatttacacaatggaacaccaatcaacccagcatctccatcactcttccctggtggatcatgcagtggttctgctgtggcagtttctgcacaacttgtcgactttgctcttggtactgatacaactggtgatgtaagaattccagcatgcttctgtggtgtactttgtttcaagtcctctcatggggttgtatctactcttgggaccattgcaaactctcaaagtttagacacgattggatggtttgcacgagatccaagtgttctgcatcgtgttggagatgttcttttaccagctgctacaggtgggcttacgcaaacaaggcagttattttttgctgacgattgctttcagttgctgaaggtccccaacgagaaaacagtaaatgtcatagaaaatgctatccagacattaccaggatatcagccacctaagcacatcaatattggtgagtatatcagttcacatgtacctagcctgaaggatttttgtgaacccactgtggagatgctcgaaggaatgtcagccttgaaagcactctcaacagttatgctgttattacagagatatgaattcaagacaaaccacgaggattgggttaatactgtaaaacccaagcttgggcttgatacctctactcgtgtgctacaagctgtcaattcgaaaagtgataacatcaaatctttatacattgtacgaaatgaattgcgagctgcactcaagaatcttttaaaggatactggaattttagttctgccaaccacagctggatatcctttaaagaggaatgcaaggcaaagactttcacctgggtttgaagatagaatgagtgcatttgtaggcattgctacactttcaggctgctgtcaggctgtgattcccttaggaagtcacaatgatcatcctatatctctttcattgctagcagcacatggatcagacaaattccttcttcgcaatgtcttgtatatgttttcttccatcaaagaacaagtcgttttggcgtccaagttggtaactgcaccagtaatcaatagagatgctgattttggtgcagcagagttgttgaaagagaagggaaatagtgctttcaaaggacgaaaatggagcaaggcggttgaattttattctgatgctatcaaattgaatggcacaaatgcaacatattacagcaatagagcagctgcctatctggaacttggccgttataagcaagctgaagcagattgtgagcaggccttactcttggataaaaagaatgttaaagcatatctacgacgagggatcgcaagagaagctgttctgaatcaccaagaagctcttcaagatatcaggcatgctttagctttggagccacagaacaaagcaggccttttggcagagagaaggctgcagaaaaaactaaggtgatacgagcagctgccatctcgtgagtttttgagaggcgcctgattgtacgcaattttgatcgactgaggaagctccttcgctccgtttgttacttgtgttgcccgtgtgaggcattgagcagtttgccgcggtgctgagtcgtcatcagttgatgttctcacgaattcgagaactttggcgtgtttgtataggaattaagccacatattttggccaggcgatgacggaagaaacatttgggt

SEQ ID NO: 19618 - DNA, 1917 bp, Oryza sativa
  ref <308>: DATABASE ACCESSION NUMBER: AK069966
  ref <309>: DATABASE ENTRY DATE: 2001-12-06
ggcgctcgcgtgcttacccgcctcgcgtacccacaccatggccgccgccgccgcctcctcctgcggcggcgccggctgcgggccccactgctcctcctccgcctccgccgccgcggtggaggatgctgctgctgcggcggcggagaaggtaggccgcctgtcactctcccgcgagtgcggcaagtgcggcggcggcgccgctgccgtcgccgtcgccggaggcctcggcctgtgcggcgagtgcttccgggccaacctgctcgggaagttcaagctcgccgtcacgagcaacgccatggttcgccccaccgactccgtcctcctcgccttctccggcggccccgcctccagggtagcgctgcaattcatacatgagatgcggtgcaaggcgattgagagctgggacgtgagcaattcacaagccttaccggtattcggtgtcggggtggcattcgtggatgaaagtgttctctgttcgaagccgagagacgagattgagatggcaattgaagatatcaggtcgatcgtgtcgagtttgtcaacaggcgttaaagcgatgcacattgcgcgtcttgaggatgtgttctccaccgaatcggaggatggggaacgcaggttgagggaggcggtggatatgattggtgatgacactgggagggaggatttccttcggtgcttacgcatgctttcgttgcaaaagattgctatggaaaacgggtacgctaagatcatgctaggatcatgtgcttctgcaatagcatgccatgttctgtccgcgactgtgaaggggcaaggttactctttacctgctgatgtccagtatgttgatacacggtgggaaatacctgttgttctcccactccgtgattgcctagcccaagagcttactctcctctgtgaactagatagtttaaaaacacagcaacatctcgataggccttcgaacggcatcaacagtttagttgcatcctttattaaacgactacgggaagagaacccttctcgagagcataccattgtaagaactgcgcaaaagctcaagcccttctcttttaacaaattctcggcagatggctatcatgatttcctaccatcgcgactacgtccaaaattccagaagtttgatagcgatgagtccactttttctgagattctctgtctgatgtgtggaagtccgttcagtgaatcagaactccagaatttggaaagcacaaaacacaaggctcagaagaaaattgatctttatactgctcattgttgtcaaagctgttatttccagattctaccagccggtgaaaacttgaatgaacatttcttttcactactaccaaaattatggactggaaaaatggataccatatctgacagccatagcttgctaagagatcaaatagaagagtacctgcttgaagaaaatgatgatggaaactgaacttgatatttcagtgaagcccgaatatatttgccagaaagacagcagagattcctgcctagttgggctcctcacattggcataatcacataatccaaacttgcttcagataatagtgtttctatctagcatggcattggtttattcagaattctgccagatacttacaatttcaacacattatatccttgactcaattcctgatgtttctgtatgtccttcctactcttaagagttgaaacctgtatgaaatccgtatagtgatagcctgatggggcagaccgtcacttgccagcaagtttccaccgatctcaagaccacagacattggacagaaacttccatgtgattacagtattctgattggtcacatctcctgtaccaactattctgtctgcaaaagattgtaacctgaagaatttattcgattattttggaacaatcttctctatacaagatttgcacatactatggtttcaatcaagc

SEQ ID NO: 19619 - DNA, 1599 bp, Oryza sativa
  ref <308>: DATABASE ACCESSION NUMBER: AK069967
  ref <309>: DATABASE ENTRY DATE: 2001-12-06
gagacacagccgagctcaggcgacgacgcccccgcctttaatgggctttccctcccaccgacatggccggcgatccccacacccgcgccgcccccggtgacctctcctcctcctccttctccttctccccctccccttccgccgccgcggttgcgcttggagttgggggtggcctcggcctcggcccctctaggctcctcctccacctcctcctcctccactccctcttatagcccaccgccaccggccgccgcgcgcccatggccgccgtgttcttccaccatgttgtcggcgacctcaccgtcgggaagcccgaggtcgtggagctgcacgacaccgacacgccccgggcggcgcccgacgagccgccgtcgggcgccaggttcctcgggatgatctccgcgctcgacatcgccacgttcgtggccgcttccggcgtcggtgaccgggccatggccgccgtggtcggggaggtcgtgcagcccaaccctggcctgctccgggaggtcgatccaggcacgaggttgatcgacgcacttgatttgatgaagcaaggagtgaagcgcttccttgttcgaaaaaatggcgcctggagaggcatctccaagaggttttcagtgctttacaacgggaagtggctgaagaatatggaagcaacatctccaacctcagctagcagcagtagagagctttcctcctctaccagttccacctacaagttctgctgcctctcaagggaagacattctccggttccttattggatgcctcggtgcccttgcgcccattccactgtctccaatctcttcccttggagccatcaatccacattactgtcatgttgatgcatctgtcccagccatggaagcaattcagaaggtccctccagatccaagtgccgtagctgtagtcgagactacaccagatggaactcgcaagatattaggagatatctctgcctacaagctgtggaaatgtgactatgttgcggctgcatgggcactgataaacctatcggcggggcagtttgtcattggtgccgacgataacgaatcaacaccgatctcagccatcccagtgcctcccatcagctcatcactagtggaagagatcggacctgggcgctcacccagggcaaagaagttcagcagcaggagcatcgggttcctgaacagccaggcgcaccagatggcgttcggtcgaatgaggagcatgtaccgcgggaggagcgcgccgctgatgtgcaagagcacgagctcactcgcagcggtcatggcgcagatgctgtcccaccgtgccacgcatgtgtgggtgacggacgcggagtcggaggaggatggcgtgctcgtcggcgtcgtggggtacaccgacatcttcaacgcggtcaccaagagcgtttatccggcagcatcttgaatctctggatgcttgatccgtaccgtttgctccgttggtggttccttggttggccctagtgcgtgccgtgaactgtacactgcgcctggttggttcttttttgtctttcgagagttggggagttttttgtccgcatgagactgaaactgaagggtatattgtgaattccttgtggatcggtgct

SEQ ID NO: 19620 - DNA, 1967 bp, Oryza sativa
  ref <308>: DATABASE ACCESSION NUMBER: AK069968
  ref <309>: DATABASE ENTRY DATE: 2001-12-06
gataggagccccgcctaccgccgccctcacgcctcctcccacctacctcacctcgaagctgacgtcagcaatggcgctcgccaccaactccgccgctgtttccggtggcgctgcggccgcggcgtcgtcggcgccccagccgcggctcgccgccacgttcctcccgatgaggaggcgaaccgtctcggcggtccacgcggccgacccggcgaagagcaacgggcccgtgcaggccgcggcgaaggcctcgtccccgtcgacggtggcggcgccggagaagaagccggtggggttggggaagtggacggtggatagctggaaggcgaagaaggcgctgcagctgcccgagtacccgagccaggaggagctcgactccgtgctcaagacgatcgagacgttcccgcccgtggtgttcgccggggaggcgcgccacctcgaggagcgcctcgccgacgccgccatgggccgcgccttcgtcctccagggcggcgactgcgccgagagcttcaaggagttcaacgccaacaacatccgtgacaccttccgcatcctgctccagatgggcgccgtcctcatgttcggcggccagatgcccgtcgtcaaggtcgggaggatggctggccagttcgccaagccgaggtctgattcgttcgaggagagggacggggttaagctgccgagttacaggggagacaacatcaatggcgacaccttcgacgagaagagccgcgtgccggacccgcagcggatgatccgcgcgtacgcgcagtcggtggcaacgctcaacctgctccgcgccttcgccacgggagggtacgccgccatgcagcgcgtcacgcagtggaacctcgatttcatggatcacagcgaacaaggagacaggtaccgtgaattggcacaccgggtggatgaggcacttggcctcatgactgcagcagggctaacagtcgaccatccgataatgacaacaactgacttctggacatcccatgagtgcctcctcttaccatatgagcagtctcttacacgtgaggattccaccagtggcctcttctatgactgctcagcccacatgctatgggttggtgagcgcactcgccagctcgatggagctcatgttgaatttctccgtggtgttgccaaccctcttggcataaaggtgagtgacaaaatgaacccccgtgacttggtgaagctcattgagattttgaacccatcaaacaagcctggaaggataaccataattacaagaatgggggcagagaacatgagggtgaaattgcctcatcttatccgtgctgtccgcaactctggacagattgtcacatggattactgatcccatgcatggaaacaccatcaaggctccatgtggtctgaagactcgtccattcgattccattctggctgaagtacgtgcgttcttcgatgtccatgatcaagaaggtagccacccaggaggtatccacctggaaatgactgggcagaacgtgactgaatgcatcggtggatcaaggaccgtcaccttcgatgacctgagcgaccgctaccacacccactgtgacccaaggctgaacgcgtcgcaatccctggagctcgccttcatcatcgccgagagactgaggcggaggaggatgcggtccggggtcaacagcaacctgccattgcccccattggctttctaaactgctgaaacgggggaagggaaaagaaactgggaggagggggtagaatagtttcaactcgccggcggtgatatctgcatgtgttctgtcaaacgtttgtatggtggttgttgagtgttcttggcactataggcagttgtcgaggatatggtagcatatatactcgccgtgttgtaataagttttttgatggatgtgttctgatgaatttttaagggggcctcagctctgtgctgtttggccttggggacaggagaaaataaagctagatggtttgcttggct

SEQ ID NO: 19621 - DNA, 1691 bp, Oryza sativa
  ref <308>: DATABASE ACCESSION NUMBER: AK069969
  ref <309>: DATABASE ENTRY DATE: 2001-12-06
tgagttcagtttgcccctctgatcgatctgttccctagccaagaagcatcgatcagctgagtgagctggcaagcgagagatactagctaggatgtacgacgtggccggggagcggtggagcggcggctgcggcgggcaccaccgccggctgatgggcgcgtcgtcgtcgtaggctccggcgccggcgggggaggacgacgcagggaaaagcgggtcgagcaaggacgcgatgaagatcatggtgtccgtgctggtggtcgtcatcttctgcacgctgctctactgcgtctactgctggcgatggcgcaagcgcaacgctgtgaggagggcgcagatggagaggcttcggccgatgtcgagctccgacctgccgctcatggacctcgcctccatccacgccgccaccgacagcttctccaaggccaacaagctcggcgagggcggcttcggccccgtctacaggggcgttctccccggcggcggcgcggagatcgcggtgaagcggctgtcggcgaggtcgaggcagggcgcggcggagttcaggaacgaggtggagctcatcgccaagctgcagcaccgcaacctggtccgcctcctcggctggtgcgccgagcgcgacgagaagctcctcgtctacgagttcctccccaacggcagcctcgacgccttcctcttcaacgaggggaagagcgcgcagctggggtgggcgacgaggcacaacatcatcgtggggatcgcgaggggattgttgtacctgcacgaggactcgttgctgaaggtggtgcaccgagacctcaaggccagcaatgtcctcctcgacgacaagatgagccccaagatctccgacttcggcatggccaagatcttcgaggacgagtgtaacgaggtcaacaccggccgcgtggtcggcacctatgggtacatggcgccggagttcgcgctggagggcgtctactcggtgaagtctgacgtgttcagcttcggcgtgctgctgctagagatcctcagcggccagcgcaacggcgcgctctacctcgaggagcaccagcaatccctcatccaagacgcgtggaagctgtggacggaggggttggcggcggagttcatggacccggcgctggggcgggggtacgcggcggaggaggcgtggcggtgctaccacgtggggctcctgtgcgtgcaggaggacgcggacgcgcggcccaccatgtccaacgtcctcctcgccctcatcagcgaccacatgaacctccccgagccctccaggccgcccatgttcaccaggctccggagggcgctcctcctcgccccgccgctcatgaccaccaagaccgactccaccgcctcgccggtgtccgtcaacgacgtctccatcaccgtcatcgagccacgatgaggtcgtcgtcctcctcgtcgccgccgccgattaattgtctggggctagcttctttttttgtacatatagtggtagtagctaagtgtttagcagttaggtaagtcttttccttttactcctctgaatgttgtcgatggcttttctgaagctctcaagtctcaaccatcactgcaggcatttatctggtagtaggaggagagttagtgaagagatccacgaggaaaatgtaattaagtattatccttccacaagagggttaattaattaataaatcaaaagggtttgggtttggatc

SEQ ID NO: 19622 - DNA, 1110 bp, Oryza sativa
  ref <308>: DATABASE ACCESSION NUMBER: AK069970
  ref <309>: DATABASE ENTRY DATE: 2001-12-06
ggacgcgcacaacgcggcagcagcagcagaggaggaggccagggcaacccgcaaccccaaaccctactcccgccgcgccaccgccatggccgacccagcggacaccgtgaggaggaggaggaggccgcggcggcggcggcgggcgaggacgaggacaccggcgcccaggtcgcgcccatcgtcaagctcgaggaggtcgccgtcaccaccggcgaggaggacgaggaggtcctcctcgacatgaagtcgaagctgtaccgcttcgacaaggaggggaaccaatggaaggagagaggcaccggcacggtgaagctgctgaagcacaaggagaccggcaaggtccgtctcgtcatgcgccaggctaagacgctcaagatctgcgccaatcacctcgtggcgacgaccacgaagatgcaggagcacgccggcagcgacaagtcgtgcgtgtggcacgcgctggacttcgccgacggcgagctcaaggaggaaatgttcgccatacgctttggatccgtcgagaactgcaagaagttcagggagatggtagaagagattgctgagcagcaaggaaagaacgaggagaaagaaaatgaggaagtctcctctactgcagggttggttgagaagctttcagtgaccgagacaaaaaaggaggaaaatgcagagaaagaggagactcctgcagaagaggataagaaggacgctaaagagtgaaagcacccgcaacctctaggcagctttgatatgcctgaagcgagtgaagtgttaaatgagcgtcatttcattcattttgtggtcaaagttcttcctttcacaaattttcattgtgttttcttttggatgaatgtttgtgctaggcaaaatttgagttgtatcagtcgggttcttggttactacactgttacttaaaccttgagttgtttatccgagatggggtggcggagtgggggcacagcatgtttgtacaattatttgaagttgcttttggaatgggcacggtttgggttgtccaaaatttggacggtgatgccctgtcactcacaattcttatctctgtcttgcaattatatgcgatgtgaagctcttcgcctcttcggtgacgagttgtcg

SEQ ID NO: 19623 - DNA, 1262 bp, Oryza sativa
  ref <308>: DATABASE ACCESSION NUMBER: AK069971
  ref <309>: DATABASE ENTRY DATE: 2001-12-06
gggtctccccgttcccccagccgccgtcttaggcgctgcgccacccggaatcccggagccaccgccgcgcgcaccctgatctcgggtggcaccgaaccttcagccgccgccaccgacgaggaacggctgcccagagcctccagggattcgacgttcaatctttgcaatctcctcctccagccacaccgccgaagtctccgtgtcggttttcttcccttccctgacatgaggtaggtgttataagtggagccaggagcctttgaatctttgcaagtattcaagcagaagcagacattggatctcaatctgcaccaatggaggcctgtagcatagccaggattatcaacttaggggatctagctatgcgcccgaaaaaattgtgccgtctactcatcaaactcttatcagatctcctgctgaaagaatccggaaaatatgaatatgtgcatccacctcctatggagactcaagcggcagatttaccggagctttcacaggatatgctgatggagatctttgccctcctggagatccctgaccttgttcgtgcgggatctgtctgccaatcctggcgttctgcctacaccagcctacgcgacatggggcagtacaagcagcagactccctgcctgctctacaccactgaatcctcaggcgagaaggtttcatgcctctacagtcttgtggagaagagggccttcaggttaactctcccagggacgccgctgcacaaaagactgccgattggatcctcacatggttgggtggttactgctgatgagttatccgagcttcatcttgtcaatccaatcaccggacaacagattgccctcccaccggtgatcaccattgagcaggtgaagcccatcttcaatgacattggtgttgtccaaggctacaagatcggatggtactgtgcagagaaagattatggagatccgtatggagagccgtcgccaatccttactcccagtgagctgcgtgaccacctatactacaaggcatttgtgtttcctgatcccttgactagaagcttcattgtggtggtcatccactatccattttgtcaactttcctttgcaagagtaggagatgataaatggacctggttaccccacaacactcgctacagagattgtgtataccatgatggtctgttgtatgcattgacatcacatggacagatcgatgcctttgatatcacagcctccgttgtcactaggaaggaaattattaaacacatgaaaggtatttctgagagc

SEQ ID NO: 19624 - DNA, 1777 bp, Oryza sativa
  ref <308>: DATABASE ACCESSION NUMBER: AK069972
  ref <309>: DATABASE ENTRY DATE: 2001-12-06
gagccgcctcgtccccacccaatcctcctccctcgccgctcgccgtgctcccgctcccgctccggccggcgaccaccgggaagaggagagctcgagatgagcttgcggccgggcagggcgcaccccctcgccgcgtctcccctccacaccccgctccctgctaggcctaggccccagctgaggctgagcacctccaccagctgcgccgccatgaagtcgtacaggctgtcggagctcagcgacgccgaggtcggcggcctcaaggcgcgcccccgcatcgacttctcctccattttcggcacggtcaatccgattgttgaagacgtgcgcatgcgaggcgatgctgcggtcaaggattatacagtgaagttcgacaaggttgcactcgatgatgtggttgtgcgtgttagcgatcttccggatgtggagcttgatccagctgtgaaggaagcctttgatgtggcatatgacaacatttatgccttccacgtttcgcaaaagttgcctgaaaagactgttgagaatatgaaaggtgtaagatgtaaaagaataacaagatgcattggttctgttggcctttatgtcccaggtggcactgcagtattgccttccactgcattgatgcttgctgtgcctgcacagattgctggttgcaaaactgttgttcttgccacaccccctagtcgtgatggtagcatatgtaaggaggttctttactgtgctaaaaaagctggtgtgacacatgtattgaaagctggaggagctcaggccatttcagccatggcatggggaacagtctcatgcccaaaggttgaaaaaatatttggacctggaaatcagtatgtcacggctgcaaaaatgattcttcagaacagtgaagccatggtttctatagacatgcctgctggcccttcagaagtattagtgatagcggataaatatgcaaacccagttcatgttgctgctgatttgttatctcaggcggaacatggcccagacagtcaggttgttctagttgttgcgggagacggtgttgatttgggtgctattgaggcagaagttagcaagcagtgctctgctcttcctaggggagaatttgcttcgaaagctcttggccacagtttcactgtttttgcgaaagacatggttgaggcaatttcattctccaatatgtatgcccctgagcatttgatcatcaatgtaaaggatgctgaacagtgggaggatcttgtcgagaatgcagggtcggtcttcttgggacaatggaccccggagagcgtgggcgactatgcaagcggcacaaaccatgtccttccaacctatggttacgcaaggatgtatagcggcgtgtcactgaactcattcctcaagtacatcactgtccagtccttgtcagaggaagggttgagaagtctgggtccgcatgtggcaaagatggctgaagtcgaaggactagaggctcacagaagagctgttaccctcagacttcaggacatcgaagccactgtaaccgtgtagatttgttaccatgattgttctaggggccaacttggatgcagagaacaagaatctgtgaacaccctaatgagaagggatggtccagctgtttctcgaaataaggctcatccattttgatacatctttgaatataaagtttgtttgattgtgttacactttcaagtattcaagaggacgaaatctgtgaagactgtaaggaaaagggatatgatccagctattactcgaaataaggcccatccattttgaatctttggtcc

SEQ ID NO: 19625 - DNA, 868 bp, Oryza sativa
  ref <308>: DATABASE ACCESSION NUMBER: AK069973
  ref <309>: DATABASE ENTRY DATE: 2001-12-06
ggatcaatcctcacttccccagccagcccgtctgcggagaaatcgatcccgcacttcctgcagccgccgcctatcccgcatcgctccaccggctactgccttttctcatctccaaccttcgctcttcccccacaatttctgcctgtctacggctgtggggttgcctgctgctggttgtcgttcagcgtccatcgggcaggcagcagcgttccagtggatctcattgacgccggccacaacgcccggttcaacaccgcattccccttggctcaccctctccggcgatgagctcgagcgggcgaggcggcaagcggcaaggggcgccgcccccagcgccattcggggctgcggcgaagagggcccaaccccacggtgggcacctagcagatgactccatccgcgctagcggtgacctctcatctcctatcggttcagcgcctaacggtcgctgcctcctcttccacagctcgctgccacactatgatcagcaaaggcgcaagttgatccaatttccatctgcatctggtccttggtctctgatcagttatcaatttgcaagagtgcttgattttccaagtttcgataccggacaatcttccttgctatgacaactaagatgttctttctgtacatctatgttctcccgctgtactttagttcgttgttagttgagttagatttagtgtgaagcaaatagacccgactctctgtaaagttagtattgtatatgacttcctgtttttagggcattcagcaagtgcttatggttaagaactacactacattacaaagttgccaagaaaatgcaaggtgacaatatcttgtggccatcaaaaattgagattttcagtgactgtcaattttttct

SEQ ID NO: 19626 - DNA, 1075 bp, Oryza sativa
  ref <308>: DATABASE ACCESSION NUMBER: AK069974
  ref <309>: DATABASE ENTRY DATE: 2001-12-06
ggtactcgtcgtagccaccacaccgcccacacacccacaccgccggtagcgaggcagctcacatggcggcgacggcgacggcgacggcggcgcggaggaggaggaggggaagagggtgatgacgagggcgctggagtgggaagggtgcgtggtgtcgccggtgccgacggcgacggccgacgaggcgtgggctctgctgtcggacttcctcgccttccaccgctggcacccgcgcgtcgccaagtgccgccccgcctcgccgtcggccgcggcgagcacggccgccgccccgccgggctccgtcgtgcggtactgcgagggcacgccgcgcggcgacggggcgccgccggactgggcgcacgagacgctgctcgagcacgacgccgcgcgccgcttcttccgctacgagatgaacgacaacaacatgggcttcggcgtcttcgtcgccacgttccgcgtcgtccccgacgctggcggcggcgacgcggacgcgccggggtgcgagctccggtgggagttcgagggcgaccccgtgcgcggcacgcccaaggaggccctcgtcgcgcgcctgcaggccggcctcgacggcatggcggcgcgcgtgcaggagcacctcatgtccgcccgcgccgccgacgccgccgtcatcgccgccggcggcgtcgaggccgccgacgagctcaaccgggacaaatactctatcgcggtctgagtgttcgtccggtccgtcgatcgatcggtacagtacaccagtatatgcgcggttgctggtcaactttatacgtgaactaatttggctgcaaaaacgtatattgttcgatgaaaatacacgaactctgtcgccgtcttccgtatatatgtacgtacctacgtatacctacctacgtatacggtatactgtgtttgtacgtgcttggggtatgggaataaacgttactaagtactgaaaaaaaaaccagtctctagcttgtctctcctcgtgtactgttcgatcgtggcattatttggttttgtaatttaatttgtaaattttattatatggaagtcaatgcaaggattaattttaatgttgacc

SEQ ID NO: 19627 - DNA, 2194 bp, Oryza sativa
  ref <308>: DATABASE ACCESSION NUMBER: AK069975
  ref <309>: DATABASE ENTRY DATE: 2001-12-06
tggcgtctccgaaattcaaacggatcgatttggttttgttgatttgatctggccggacaaggagaagcagaggaggaggagagttcgagatcgagatccatggcgctgctctgcttcctgctcgacatgcggaacatcccccctccgctcctccacctcctcaagcagtgcctactccacctcgccaacctctacgccgccatcccctccgccgacctccccgaccgcctcgccctctgctacgtccaccccgccgcctcctcctcgcctcctcagctcaaggtggtgtataggcctggagagaaatttaaccttcgagacttccatcatgctgtcaacaatttgcctctcgatgcctttcgtcctaaccaacatggatctctacatactactggagatgtgtcattaacaaatctttttagcaatcgagctatctattcttgggccactgatgatacctccaaaaaagtgattgctttatgtatgtctgcacaaaacacgcaagctctccgaagatctctcatggacgcagcagaacagtgtattacagtggagtttgtattgctggaaacaggagctgcattcgtatgtgatggtgtttctgaaaattccaatggtttcatagacacaatttgtgaccttgaaaactgtgtggtacgaagatacagtcctgagactcaagttttgcatggattagtcaagaggtggttagaagagctaaaggatgacaaggaggaggcattgcaggctgtatttgtattcagagttcccattatcagcactgttaatcaaatatcttgcagcatgtatgcttcagcaaatcacatcattgatggttttccatcatgtcagatatgcaggtgccatggtcgccctattgaccttgctaacacaaataaggcaaaatggatgtgcccaataactagccgacagctcacagcttctgatgttactgatactgctgtgaaaattggggaacagacagtactgtttcttcctgactcagaaggcgtttcaagcttgcgacgagcctcatcctccatttcttttgacgtgattgagcgcaccaatttagcctcactaaatgaaggactcataattgggacgcctcatattgtgattcccagctctaatgatgttgaggttgctcttgatgatgagtgctcctcagaacacccaacttttctatggtctatgtgagacacttttcaagcttgatcagggacttgtgtgctcctcaaaatgcaatactgaaacgatgaaggtaggatcccttgagtgttattatcttctccaaccatctgagaagggaccgatgcttctgaggaggcttgctggatctgaagagatactgcctctcccagttgtgagtcgaccttgcaactctaccggtaccaaggaagtccagaatttgatcgaaacctcattatctaagattgtgctgaaggattacaaccctctacaacatgagagaggttttcactcgagactgaattgtctggtgaaggatagccttcaatttggttgtgattgattctgcagatcaattgctccggcttgtggcgcgaaggatcctcatcatcttgattcgttgagtgaaccacaaatattgacattccggggtccagaggaaaacaaggtgctgaggctgtgtagggaggagggtggagatatccaatcgttcagcttcagcgagccacaggcagcgtcaaaggagaaggcgtcgcccaggcccagcatcaccgaggagtgggaacagcttatcatcatcgacgacgacttcaccagtgccgtcacatgttctacttctagggccaaccccaagctgccgtccccagtgaaaccgctgggcctggacgacaagacaagcaggattctggagaggctggaagctcccaggggcaaagaagcagagggctaccaccagcacacgcaccggcaacagcaacacaactccaccaccaccagcgtccagcattggagccggaacacagatcaagaagccattgctgccatttgaacccagcgcaagccaacctctgagacccaccttcagcaagctcaggcggaagcccactgcagctacctagcttgctgccctttttactacagtcccatgtatagagacaggaagatattatcacaccttctatcaaatgtagatatatagataaggtcactattacaaccattc

SEQ ID NO: 19628 - DNA, 1861 bp, Oryza sativa
  ref <308>: DATABASE ACCESSION NUMBER: AK069976
  ref <309>: DATABASE ENTRY DATE: 2001-12-06
ttctttttcgccacccgatccggcaacaacaacgtacgtaacctcctctctctctctctctctctctccccttccagccgcgcgcgcgcacgcacgccgccgtcgtgacgtcgccgtcgcggtcgccgccatggatccgacgccgcagtcgcacccgatcctggcgtacgtgctgtcgcggctcccgtcgctgctgccggtgtcgccgtcgctgtccaccccgcgcgcgcgggacatcgagcagccgtccccgcgggcgccgtcgggcgccgcggagttcgacctcgtcagccgcatgccggggctccgccacccgtccgtcctctccgccatgacgcgcgccgtcgccgacgtctcctcggcgcgcgacgcgctccgcctcctcggcccccgccccgaccacgagctcgtcgactccgcccgcgccttcctccgctcccacgccgccgaagaggccgaagaggaggaggaggacgagaaggtggcgaagagccgggaggtggtgcggctggacgaggcgcacgagtcgtacggtggcttgctgcgggaggcggaggagaggctggatcgcgtgtaccggacggcgatgagagggagggacatgcaggtggtggccgcggcgcacggcggtggcggggaggaggaggccggggtggtggacgacgaggtggtgcgggtgctccgggacgcggaggaagggaaggcggtggagcgcctcctcctcgccgaccggcagctccgccacctgcccgagcagctcggccggatccgcggccttctcgtcctcgacgtctcgcgaaatcagctcaagaatgtcccagatgccataggcgggctcgaacacctggaagagcttcgcctcgcttccaacgcgttggtctccctcccggactccataggcctcctcaccagcctcaagatcctcgacgtctcgggcaacaagctgaggtctctccccgacagcatctcaaaatgcaggtcgctggtggagctggacgtgagctacaacgtgctgtcgtacctcccgacggggatcgggcaggagatggcgaggctggagaagctgtgggtgcacctgaacaagctgcggtcgctgccgtcgtcggtgtgcgagatgcggtcgctgcgcctcctggacgcgcacttcaaccagctccgggggctccccgcggggatcgggaggctggcggcgctggagtcgctcaacctcagcagcaacttcagcgacatgcgcgacctcccggcgtcgttcggggacctgctcggcctgcgcgagctcgacctcagcaacaaccagatacacgcgctcccggactgcttcggccgcctccagcgcctcgagcggctccgcctcgaccagaacccgctcgccgtgccccccaaggaggtggtggccggcggcgtcggcgccgtcaaggagtacatggccaggcggtggcgcgacgcccgcgccgaggaggagcgccggggcagcgccgtcgccgagagccccagggtgtcgacgcccaaggagtggctggtgcgcagcgtctcgtcgctgggcagctgggtgtccgacgtcacgaggtacggcgccggccaggacaaggcagcggcggaggaggaggaggacgcctacctccagcagaatctgtgatcggagattacagcatttgcttgctccggtgctttcatccgtatgtacagaagaactactgcagaccgtcgccgcgtcgttcgtttcgcatcagccgtgtgtttgtgtgtgtttaccttcgctgattccttaccatttgccatttttgttgttgttgttttaaccgttttgctgtttaaaacttttaaacccaggttactggaccacagtgcctgtgtgtttgct

SEQ ID NO: 19629 - DNA, 3344 bp, Oryza sativa
  ref <308>: DATABASE ACCESSION NUMBER: AK069977
  ref <309>: DATABASE ENTRY DATE: 2001-12-06
gaccggggtttcagatttctctctcttcctctaccacctccgccgctgctcgtcgtcaccgacctccaaatccgaaccaaaattctctcgccattgcggggattggagctccaagggataagctctgcctgccctaggcgccgcatgcctctcctcctcttccccatctcccctccctgcgtgcccccgccgacgagtaccgggagctcgagcgggagatgctcgaccggaggctcgcgcccgcgctgccctacgtcaagtcgctcttcctcggctggttcgagccgctgcgcgacgccatcgcccgggaccaggaggtgcagcggcggaagcgggtcaagcacgtctacgccaagtacctgctcctgctgcccgcggacaaggtggccgtcatcgtcatgcacaagatgatgggcctcctcatgtcgagcaaggatggcgtcgccagcgtccgtgttgtccaggccgcgcactgcatcggcgaggctgttgaacgtgagttcaaagtccagacattctttcaaaagacaaggaagaaaagtgcaggtgaaaatgatttggcattagagaaggagcaggccaaatgccgaaaacgtgttaagagtttggttaggaggagaaagttgactgaagcacagaagattgtgcaacaggagattgaattggaagaatggggcacagaatcccaagtgaagttagggacccgcttgattgagttgttactggattcagcttttgtacagtcaccagctgaccaaacaccagagagttctccagatattcgaccagcatttaaacacgtacttcgacaacctatagtagaaaatgggagactgaagaaaaagcactgggtgatagagtgtgaccctcttgtgcatgaggggtttgaaagcactgctaggcacgtggagataccctatcttcctatgcttgtgactcctaaaaaatggaagggctatgatacaggtgggtacctttttcttccctcatatattatgcggacacatggcgtgaaagatcaaaaggaagccattaagagtgttccgagaaaacagctacggaaagtatttgaggcattagatacccttgggagtactaaatggagggtgaatagaagagtacataatgctgttgaaactatttggagtcgaggtgggggcattgcaggactggttgataaggaaaatattcctctacctgaacgaccagaaacggaggatccagatgaaatacagaaatggaagtggagcttaaagaaggcaaagaaagctaatcgtgaactgcatgctgagcgatgcgatacagagcttaaactatctgttgctcggaaaatgagagaggaggatggattttattatccccataatcttgattttcgtggccgtgcataccctatgcatgcacatctaagccacctaggttcagatctatgcagaggtgttctagagtatgctgaagggcggccactaggaaagtctggcttacgctggttaaagattcatttggctaacaaatatggtggaggaattgaaaagctttctcatgaggacaaggtagcatttgtggagaaccagttgcctgatatatttgattcagcaactaatcctgttgacgggaattgctggtggatgaatgctgaggatccttttcaatgtttagccgcatgcatggatctttctgatgccttaaaaagttcatcacctcagtgtgctgtttctcacctacctattcatcaggatggttcatgcaatggtttacaacactatgctgctcttggaagagactatatgggtgcagctgctgtcaatttagttcctggagacaaacctgcagatatctactcagagattgctgctagggtgctggatgttgttcgggaagactcgatggaggatcctgcaactaatccaactgcctcattagcaagggttttagtcgatcaggtggataggaagcttgttaagcagacagtgatgacatcagtttacggtgtcacatatattggtgctcgtcaacagataacaaaaagactacaagagaaagggctcattacagatgacaaattgttgtatgaagtgtcctgctatgctaccagggtaactttggatgcattaggacaaatgttccagtctgcccgtggtataatggcatggcttggtgattgtgcaaagatgattgcttcagaaaaccaccctgtcaaatggacgagccccgttggtcttccggttgttcagccctacaagaaatataagaactacatgattcgaacttcactgcaatgtctggctttacgacgggagggagatgcaattgcactccagcggcaaaaggcagcttttcccccaaattttgtgcactctcttgatagttcacacatgatgatgactgctattgcatgcaaaaaggctggtcttcattttgcaggggtgcatgactcgttttgggtgcatgcatgtgatgttgataaaatgaatcagatactgagagaacaatttgtggagctttacagcatgccaattcttgaaaatttgctcaaggagttccagacatcattcccaacactagaatttcctccctgtccttcacaaggggacttcgatgtgagagaagttcttgcttcaacctacttcttcaactaagcttaatggaaaagttttgcacattagcacatacgcagcaagtcagtaagttcggcagtagctgaatagccagccatattgctgataccatggtgatttggtgccaagtacgaaatgtggcataagcatcagagaagagcaacacaccgttgcaactgctgggagcctggaacagtatatgggtttttgtcattggcaaatcagttccccagattgccgattttggaggaagctaaaaagttccaagaaacctgagctgaaacaaaacccagtacttcctgctgatgtttttagattcatgcaggatctactaggatttcagttcagggaattcaccatgctacacccagccaatgaaggcgattttgcgacataacaggttatcaactacagaatactgatcgatactagtcctgctgaccaccctgaccaatttgatcataggcgacagttgaaccataatttcactgtctatacatgtaacattatcttttggcctcttagggctataattatagccgattgctgtatcggtgcggtgacctggtaataatgtgtagaataaagtgccaaagagaaatgtatactagtgtacatgattgctggatgctgttgatagcaagcaacctgaaagagagaaatgtacatgaaaacggctcgatcttgtcgattcgttcaaatatctgcttccttaggttcattgcc

SEQ ID NO: 19630 - DNA, 1182 bp, Oryza sativa
  ref <308>: DATABASE ACCESSION NUMBER: AK069978
  ref <309>: DATABASE ENTRY DATE: 2001-12-06
gagaagttccgtttctaataaagggagatctattgcctcctcttttgccctccaagggggaggaggatcagggagaaagggagggccaaacaatacaaaaagaattactgcaggaaccctagggattataattagcgagttaacggcaaattaagatgccggtgtcacgtggcggcaaggccgcttcgtcgaaggccgaccccttcgactcggactcggactcggacctggtcccgaagaagaagccgggggcgtacacggcgcccagcggcgcggcgaaggcgcggtacaaggacgacttccgcgactcgggcgggctggagcagcagtcggtgcaggagctggagaactacgcggcgtacaaggccgaggagacgaccgacgcgctgggcggctgcctccgcatcgccgagaacatcagggaggacgccgccaacacgctcgtcaccctcaacaagcagggccagcagatcagccgcacccacgagaaggccgtcgaaatcgaccaggacctctccaagggcgagtcgcttctggggagccttggagggttcttctccaagccatggaagcccaagaaaacaaggcagatcaagggtccagcccatgtctcggatgattccttcaaaaagaaggcgagccacatcgagcagagggagaagctagggctgagccctagtgggaagtcggctaatcgcagctacgccgagcctaccaccgccatggagaaagttcaggtggagaaacaaaagcaggatgatgccctagatgatctcagtggtgtgcttgggcagctcaagggcatggcttgtgacatgggttcagagcttgataggcaaaacaaagcgctggatgatctgcaaggcgatgtggatgaactcaactcgagggtgaaaggagcaaaccaacgtgcacgcaagctaatcgagaagtaggctggaaacatgggacgatcagctttgcctaattgccttgatctgcagtgcattggggaaaatgttaaaagagtcgtcctcgctggcacagcttctgcttatcaattaactgggttttgttttgtattaccgggggcatatatattttttctgtttcttaattttcacgatggctgttttcttgacgatcaaagttgtatactgtatgtacatatatgagaaagagaaattacatattgttgacatc

SEQ ID NO: 19631 - DNA, 1711 bp, Oryza sativa
  ref <308>: DATABASE ACCESSION NUMBER: AK069979
  ref <309>: DATABASE ENTRY DATE: 2001-12-06
gtataactgggtgttcgccggtgagaccattatacggcgtcggcatggcttcagacacagaggatggtggagaggtgcaacctacagagacgaccaccgatgactcctcgtcgcccatgacggtggagaaggaggagcaggcggcgtcgactgggatggagatagtgaaggcaggaaatagtaatgctcaagaaactgggggtctctctctaaattacgaggaagcgagagctctccttggaagactggaatttcaaaaaggtaatgtagaagctgctctctgtgtgtttgatggcatagaccttcaagctgccatccaacgattccaaccatcacttactgataagacgacatctaagaaaggccagacgaaatcagaatcaggcatagaaaatcctgctacccttgttcttgaagccatttacttgaaatcattgtcccttcaaaagctaggaaaatcaacagaagctgcgaatcagtgcaagagcgttcttgattcagtcgaaagcatgttccagaatggtcctcctgacatcgaacagaagctacaagaaactatcaacaaatccgttgagcttctcccagaggcatggaagcaagctggatcacatcaagaagcattagcttcgtaccgacgcagtcttctcagccaatggaatcttgacgatgaatgttgcacaaggattcagaagagatttgctgcatttctgctgtatagctgtgtagaggggagcccacccagctcgggatcacaagttgaaggttcttttattcctaagaacaatgttgaagaggccattctacttctaatggtagtactgaagaaatggtaccaggggaagacgcattgggatccatcggtgatggaacatttgacatacgcattatcgctttgcgaccaaccatctcttcttgcaaagaatctagaagaggttttgcctggaatatatcctcgcaccgagagatggcacactctatctctttgctattatgcaattggtcagaaagaagttgcactaaactttctgaggaagtctctgaacaagcatgagaatccaaatgatataatggcattgttgttggctagtaagatatgcagtgaggagcgacatctagcttccgagggcgtcgaatacgcgagaagagcgatcaaactttctgaatcttcagatgttcatctgaagagtgtgggactccatttcttggggaattgtcttggcaagaagtcaaagactgtctcatcagatcaccaaaggtctctcttgcagaatgaaactctaaagtcattctcagagtcgattgctcttgaccggcacaatccagacctgatatttgacatgggagttgaatatgctgagcagaggaacatgaatgccgcactgcgatgcgcaaaggaatatatcgacgcaatcggtggatcagtctcaaaaggttggaggttgctagcattggttctttctgcacagcagagatatcctgaagcagaagtggcaacaaatgctgcattagatgagactgcaaagttggatcaagggtcattacttagtctaaaggctaagccgaaggttgctcaatcatcacctatggaagcagttgaagcataccgtgcccttcttgctcttgttcaagcccaaaagaattcctctggatctagcaagactgatgcagagggacagaatgacagtgtaagtgagtttgaaatctggcaagg

SEQ ID NO: 19632 - DNA, 1423 bp, Oryza sativa
  ref <308>: DATABASE ACCESSION NUMBER: AK069980
  ref <309>: DATABASE ENTRY DATE: 2001-12-06
gctttctctcccctcgtttctctctccctctcttgatctgtgtgcgtcttgcgcgcgttgtttgggcgagagctctggcggctgcgcgcgcgggtgttctcttcgtggcgagatcggcgttgatgcgcggcgcggcgtggcggtggtgggcgtgcgtgcgatgaggaagctgtgcccgaacctggaccgcaacgtcgtcggctcgccgctcatcccctgccccgtcccccacgaccgcgccttcagccgctccatccgcgactcctccatcgtaagccaccgctcccctgcccgcgtcgcgcgcgcgcgcgtccatgcatgctccgctgccggttggttcttgacgcgttcatccccctcctcgtgtgtgtgcgcgcgtgtgtggtcagcaagcgtcgacggccaagtacatcatgcagcagtacatcgcggcgacgggcgggcaggcggcgttgcaggggctgcagagcatgtacgccgtgggaaaggtgcggatgtgcgcgtcggagttccacctcggcgaccagaacgtgaccgccgcgcagggccgcgccgaggtcggcgggttcgtgctctggcagaagtgccccgaggtctggtacttcgagctcatcatggccggccacaagatgagcgccggcagcgacggcaaggtcgcctggcgccagtccgccgccgagaactcccacgcctcccgcggccctccccgccccctccgccgctccctccaggggctggacccgaggtcgatcgcgaacctgttctccgacgcggtgtgcatcggcgagaagatcatcaccggggaggagtgcttcatcctgaagctggaggcgagcgcggcgacgctgcgcgcccggagcgcggcggcgttcgacatcatccaccacacggtgtggggctacttcagccagcgcacgggcctgctcatccagttggaggactcgcacctcctccgcatgaagtccggcaagggcgcccgccgcagcgagaacatcttctgggagaccaccatggagtccaccatctccgactaccgccacatcgatggcatcaacatcgcccacggcggccacaccgccgtcacgctcttccgctacggcgagggctccgtcaaccacaagcggaagctggaggagacgtggacggtggaggaggccgacttcaacctgtacggtctcaccaccgactacttcctgccgccctccgacctcaagaaggacatcgacgagaagcgcgccggctgacccgcccggctagaataagatcccatgcaggcctgaattttggtagaggtggccataggtgtatggggtttgttcttgattccttaacattttttttcttcttcttttcttgtctaattgcaaagtaattcaaccatgatccaggaataaaattacttaaaagggttcatttttttagg

SEQ ID NO: 19633 - DNA, 1889 bp, Oryza sativa
  ref <308>: DATABASE ACCESSION NUMBER: AK069981
  ref <309>: DATABASE ENTRY DATE: 2001-12-06
gcccttccattcttcttccaaccggccaacgcgtcaaccctagcgatcatccagcggcggcaaccttacaatggcgtcgctctctcgcgtgcctcctcccgcccgcggaagccgccgccggccgcccccgtccagccccgtccccctctccccgcggcaggagatgctcctcgaggcggcatccgacggcgacctcggcttcctcaagcgggtggtgaggtcgctggacggagggaggggccgccccgcggaggcggtggaggccgtgcggaagtgcggcgcgggcgcgctgcacctcgccgccggcgcggggaagctggcggtgtgcaggtacctggtcgaggagcttcgggtggatgccaacgccatctacgaccaaggtgaaacacctctggcttatgcagtcaatggtgcaaatgtagctaccgtgaggtaccttcttgaccatggtgcccatccagaaaaagctgataataaaggattcacccctctccattttgctgctgaagaaggatattgcaatgtagtggagctcttgcttgctaaaggggctcaagttgattcgatgtctgttcgtggtacaccactacatctggctgctactaatggacaacatcgtgtagtgaagattttattggaccacaatgctgattgcaataagattgtatctgctgtctacactcctctcctcgtcgccatttatggttcatcactgaaatgtgtaaagctgctgattaaggctggtgctgatgtaaatggtgttggtaatataacccccttaatagcttctgttggctcaactgagatcatgaagtgcttattggaggccggtgctgatcctaatgtccctgatgaattcggcaggatgccaatagaatttgctgtgcgatgtggtacattgaaagatgtcaatatcctatttcctttgacatctcctatgccgactgtacctgattggagtgtcagaggaataatccgtcatgtgaacacactgccagggcaaaaggactatgagagtggccttgaaaaagaagtggctggtttgaaattacaaggagttgaggcactgaagaggcaggattatcttgctgcatcagacctatacactaaggcgctttgcctcgacttcaatgatgcaaccctgtattcaaacaggagcctctgctttcttcacatgggtgatggagacaaagcttatggggatgcctatacttgtaggatgatgcggcctgattggccaaaggcctgctatcgccaaggagcagctctaatgctgctgaaggaataccaaaaggcgtgtgatgctctcctcgatggtttcaaaatggacccagggaactctgagattgagaacgctctaagggaggcgatggagtccttgaagatatctgatggtgctaagctgacaacctgaatgaagcgtctatactcgagagccacagcctgcaggctgttgcgtcggcgtgcggggaccgacggccaccgagctagacctctccgtccctgtgtgctacggcgagcaaatgtgtgccgaactctcagcatgtcatattcctgcacctgcagttgttgcgtgttcataacagctggatcgtggaggtcacaaggctgatcaatttttatcaccttcgttttgtaatatacgagacatttgactttcttttaagttaactagggtttggtccggccggatgaaatctatgccgttgattgccgattcgacgatcccacggctgagaaagggctgccacagctggacggttagatcggctctaccgcgagatctcagccacagctggacggttagatcggctctaccgcgagatcgaacggacgatgttggtgggggaaccaatatgtaattaataaaaacatagggtcttttttgc

SEQ ID NO: 19634 - DNA, 2064 bp, Oryza sativa
  ref <308>: DATABASE ACCESSION NUMBER: AK069982
  ref <309>: DATABASE ENTRY DATE: 2001-12-06
ggcgctcactccctcctcccacccaccttccccccttctccccttccccctcacacctttcgccttcacctacacacaccggaatccgagatcccggtgaccgcgtctcgcacgcgtccccctcccttccccgccgccggatccagcccccgcgcgctcgccggagtcgccgccgagctaaaccgcgcacccgtcccccgcccccgcccaggccgagcccccgggtctccgcgcgcacgtgggggggacggcgccgacgccgacgccgcgccagatctgagagatccgcaccgacgccccccatcctcgccttccccgaggcgtcacgccagatcccccagatctggaatggtggtggtgttgttgctgctgctgctgccgtaggtatgcttaggtgagtccgtgatcctcgggactcggtcgccgcggcccgcgggtagtgggagggaggcaaacctcgtcgtcggcggcggcggcgtgaggtgctgcggagaggtggtcggggaaggaagatgcagcggaacggggtggtggaatgcagcgtgtgccggtcgcggctggtggtgccgagcccgcggagcgtgtccagggcgtacgacaagcaccgcagcaagatatcgtccaagttccgcgcgctcaacgtcctgttcgtcgtcggggactgcatccttgtcggcctccagcccatcctagtgttcatgtcaaaggttgatgggaagtttcagttcagtcccatcagcgttaactttttgacggaggttacaaaagttgtctttgctatcgtgatgctaataatccagtctagaaagcaaaaggttggcgaaaaaccacttctggcacgttcaaccttcatccaggcagcccgtaataatgcactactagcggttccggcccttctgtatgccatcaacaattacctaaaatttatcatgcagctgtacttcaatccgtcaactgtgaaaatgctaagcaacctaaaggtgctggtcattgctgttcttctgaaatttataatgaaaaggagattctccgtaattcagtgggaagctcttgctctacttcttattggaatcagcatcaatcaacttcgtactgtaccagcgggcaatactgcatttggccttcctgtcactgctattgcgtacatatacacactgatttttgtaactgttccatcattggcttctgtctacaatgaatatgccttgaaaagccaatatgatactagtatatatcttcagaatttgtttttatatggatatggtgcaatattcaacttccttggcattcttgggactgccttattccaagggccagagagtttcaatattcttcgaggacattcaagggctacgatgtttctcatatgtaataatgctgcgcaaggcattctttcttcattcttcttcaagtatgcagacacaattttgaagaagtattcgtcaactgttgcaacaatttttactggtctagcttctgctgccttcttggggcataccctgaccattaattttctactgggcatatcagttgtgtttatttcaatgcaccagttcttctctccactcgctaaagccaaagatgacaaaccagctgaattgttagagttggaagatacacagaatcatcggtcatctgaatcttcttttgtaaatatgactgctggcgctgctgaagatgccagccataggattggaactgatgagaggcaaccactattgccaacatgaagtatttttttgaggtagtgtagaggacaattctttttgccatccaacttggaggcagcagagtttatatagcgtggcgagtgaaataaactattgtacactgtaaaggcaaagaaagaaacatcgatgtatttttcccctttgtcatttttattatcttttgtgatagggagggttgtcagctgtggcctaacgagtgtggcacaacattttttggataggcaaattccacatgaatccccagatacgatactagtataaagcaattttttccctggatatgtatactcaaatgtatcaatgagttactgttgttatatggaacttttgtact

SEQ ID NO: 19635 - DNA, 2068 bp, Oryza sativa
  ref <308>: DATABASE ACCESSION NUMBER: AK069983
  ref <309>: DATABASE ENTRY DATE: 2001-12-06
gtctccatccacctattctcgccccaccctctcctcctcctcctcctcctccgcacccacatccaggccgtcccgccgcggctggatgagggctcatcgatcccttgccggccgccgcgaccgcggtgcgtccatggagcttgcgcgccttggcctctcttctgtcaccgcgatgtctcgccgtggagcttgaaggccgccgttggttcggtcactgctagatgaactccatgtcatacaacaagctgtccataacgaatgacagaatggatttcaatacccgtggaaatgcagtccccaatggcaaattagatcggaatcagtcaggtgtttcagccaatcgatcctcagcctccaaaccaacagcacgctccaagaagaaaccggatcaagctgacaaaacaaccccaaatccagcgcagaattcagcatcatcagcaacaagatccgaagcagcgaccgtcacgacgaccacgaaatcgccggcgatcagcgtggacagaagcagcatcgcgagaagcaacagcctggacagcttcagctacggccaggcgaagcggcacaccggcggcgacagccggtgggacgccgtccggtcggccagctccgtggactgccccctcggcctcgtccacttcaggctcctcaagcggctcggctacggcgacatcggcagcgtctacctcgtggagctcagggacaccgacgccttcttcgcgatgaaggtgatggacaaggagtcgctcatcagcaggaacaagctggtcagggcacagaccgagagggagatcctcggcctccttgatcatccgttcctccctacgttgtacacgcacttcgagaccgacaagttctactgcctcgtcatggagtattgctccggcggcaacctccattcgctccggcagaggcagctcaacaagcatttcaacgagcaagctgcaaggttctacgcatccgaggtgttgcttgcgctggagtacctgcacatgctaggcattgtgtacagggacctcaagcccgagaacgtccttgtccgggacgacggccacatcatgctctccgacttcgacctgtcgctgcggtgctccgtgtgcccgatgctggtgaagtcgtcgtcggtgcacgcgggcgccaacggcgtcgtgaagggcctcgccgccggtggcggcggcgacggcgagggcgtcggcgtcggctgcatgcagccgtcggcgttcttgccgcggatcctcccaaagaggagccgcaagacgtccaagtcggacctcgggctcctccacggctcgccgctggagttcaacgcggagccgacggacgcgcggtccatgtcgttcgtgggcacgcacgagtacctggcgccggagatcatccgcggcgaggggcacggcagcgccgtcgactggtggacgttcggggtgttcctctacgagctcctccacggcatgacgccattcaaggggagcagcaaccgcgccacgctctgcaacgtcgtcgagcagccgctccggttccccgacggcggcgcgttcccggcgccggcggcggcgagcggcgtcgcgcgggacctcatccggggcctcctggtgaaggaccccggcaagaggatcgcgtcgaggaggggcgccaccgagatcaagcagcatcccttcttcgagggcgtcaactgggcgctcgtgcgcagcgcccacccgccatcggtgcctgaccccgtcgacttcagccagttcggcgtgagggagaagccggcggcggcgccgacgaaggtggccaagccggcggcgagcgattcctcctccggcgacttcgagtatttctagctcccatctgtgagtatttctaggaactgaaaaatacatttagatacagaaaaaaaaatatacagtctattgattctttgttactgttgtattgctccttaattacagtacacccatacatgattcttgggatcctggtatacacatgtacaaacaatgtgatagcttgttgctaacaatgattaatgaactgtaaaatattctgttacactactgacagatgcagatgttcatttctttagctgacc

SEQ ID NO: 19636 - DNA, 1501 bp, Oryza sativa
  ref <308>: DATABASE ACCESSION NUMBER: AK069984
  ref <309>: DATABASE ENTRY DATE: 2001-12-06
gcgttgaccatcttccatttcttcccctcgccaaggcgaggccgcgagaggggtttcgaattggcgccaaccattccccccgattccctcctccagctctagggtttccgcctctctctgcgctacgccatggcgggagccaccgccgccactccgatggacatcgacgccgccgcgccgccgccgggggcggccgccaagggcaaggcgcctctctcctccactcccggcggtagggccgcgccctgggtcgagaagtaccgcccccaatccctcggcgatgtcgccgcccaccgcgacatcgtcgacaccattgataggcttacaaatgagaacaggcttccacatttgttgctttatgggcctccgggcactgggaaaacatcgacaatactggccgttgcaaggaagttgtatgggtcacagtatggcaacatgattcttgaactcaatgcatcagatgagcgtggtattgatgttgtaaggcagcaaatccaagacttcgcaagtgcccgcagtctctctttcggagcaaagcaatctgttaagatggttctattggatgaagcagatgccatgaccaaggatgcacagtttgcattgcgaagagtcattgagaagcatacaaggagcacaaggtttgcgctgatatgcaaccatgtgaacaaaatcattccagcactgcaatcaaggtgcaccaggtttagatttgcaccccttgatggcactcatgttagggaacgtcttaaacatataatacaatccgaggggcttgatgtagatgacggtggtttgacagcccttgtgcggttaagtaatggtgatatgaggaaggctttgaacatattgcagtcaacacacatggcatctaagcaaataacagaggaagctgtgtacctttgcacaggaaaccccatgccgaaagacattgaacagatagcatactggttgctgaatgaatcattttcaaccagcttcaaatgtatatctgatatgaagatgagaaaaggactggccttggttgatatcatacgggaggtcactatgtttgtgttcaaaatacagatgccatctgatgtacgcataaagctgattaatgatctggctgatatcgagtaccggctaagctttgcttgcaatgacaagttacagctgggggcgctgatatcaactttcacgggtgctcgcacggctatggttgctgctgcccactaatttcagcaaggtgatgatcattttgttgcccttcactgccacttcaatctggaaatgacgcggcaatgctcgttattattataagcatgtggttagcgtaaagcttaaaagcatggcgaggagaaattttatctgtagggtttgtctgctcgacgtgctagcttctgggactcgggagtgccttgtaattgaactgtaaccgaattctatcgggtgtaaccgtgtaggtgatgcatgatgcgtgtaacgttttatgcagtagaaaatgtattcacagttccagctc

SEQ ID NO: 19637 - DNA, 1489 bp, Oryza sativa
  ref <308>: DATABASE ACCESSION NUMBER: AK069985
  ref <309>: DATABASE ENTRY DATE: 2001-12-06
ggtcttctgctcctagtcacacttgacagttcagcttcagctcctcccccaccatctccctcctcgccgccggcccccatttctcccgcgtccacttcgagcggcggcgcgcgtgccgtaccgatggctatggtcccctcgggctcgggcggtgggccgccggtgattgcggaggtggagatgaacggcggcgccgactcgggcgccgccacggtcagggccaccgtcgtgcaggcctccaccgtgttctacgacaccccggccactctagataaagcagagaggttgatagaggaggctgctgggtatggttcacagttggttgtgttcccagaagcttttgttggcggctatcctcgtggatccacatttggctttggggccaacataagcattggtaatccaaaagacaaggggaaggaagaattccggaagtatcatgcggcggcaatagaagtgcctggcccagaggtgacacgcttggctgctatggctggaaaatataaagtatttttagtgatgggagtgattgaaagggaaggttacactctgtattgctcggtgctcttctttgatcctctaggacggtacctaggtaagcaccgaaagctcatgccaacagcattagaacgaataatatggggatttggagatggatcaacaattcctgtttatgatactccacttggaaagatcggagccctaatttgctgggaaaataaaatgccactgttgcggacagcactttatggtaaaggtattgagatatattgtgctccaactgctgattccagacaagtttggcaagcctccatgactcatattgccttagaggggggatgctttgtcctgtcagcaaatcaattctgccgtagaaaggactatcctccaccaccggagtatgtattttctggtttaggtgaagagccttctccagacactgttgtctgccctggaggtagcgtcatcatttcaccatccggagaagtcttggcaggtcccaactacgaaggggaggcgctgattacagctgatctagaccttagagaaatcgtgcgagccaagtttgattttgatgtggtgggccactatgctcgacctgaggtcttgagcttggtagtgaatgaccagccgcacctccctgtgtctttcacttctgccgctgagaagacgacagccgcaaaaagtgacagcactgcaaagccctactaagcaagataatcagagtcaatcgcaaaactgattactgtcactagacggtgaatcattggctccgatcgttcatgcttgacgtgcctgtcatccccttgcttgtaaattgcagtccagaacaaacttctgaggtctgtagaacttgccccttttatgctgtgtatctatcaaggtaggtgtcagatcaaacttggttcccctccatatcaaatatgagtagtgcatgaactggcactacgatggtttcactgtcacacatgtggttattttacgttcc

SEQ ID NO: 19638 - DNA, 2722 bp, Oryza sativa
  ref <308>: DATABASE ACCESSION NUMBER: AK069986
  ref <309>: DATABASE ENTRY DATE: 2001-12-06
ttggtgaaaaaaattattcccttcgacccaacctgttcttacgttcgccttcaactccgcgatctccagtggccaattaggcttgcgtctcttcctcagatttggctgcagaatttgaagcggtcttccacctctcaatcccatcgcctccctcccctccccttccgccgcttcatctgaatccccaaggatctcgtccacgcttctggcccgcgcctcttcccagttttggttgctcgaatttcagccgagctggtgttccgagcgatcgattggagagcaaaattggattttgatttgcgagctgagctgtttgagtaaaagcgagtgaaaatgatggagcaggatggaaggtactgaggttggggtgattcagtaaattatttcgttggctggcaatgcagtgcttctgccctggggcgaagatgaacaggatcgaaaaggcagcccggtcatcggagatcagcaagcactcatctacgaatggcgagatcaagcagcacatcaacaatattgatactgaagaagctgactttcccctccaggagggaggttcgcttaaaagaggcaagagcattgctaggaaaggtagaaaaccaacatggacacgctgaagaagcactacgagtgttcagtggaataaatatgcctgcattaattcctaaggtgaaaatgtctatcattagaaaagtggacctgcaaaaggcccagttacattccagctctccttcattgccttttcatgctgctattctgctactggagattatatatttcaaagctacagcacttcgcaatcttggaaaaatcgaagaagctacaaaagagtgcagtagcatattggatgttgtggaatctgcactacctgagggtttgccagacatctttggtgatgactgcaacctgaaaccaacactatgcagagctgttgaattgcttccagagctatataaattagggggttttcattttgaagctatctcttcatacaggagggctctttggagtaactggaatcttgatgaaaagacaattggtaggatacaaaaggaatttgcggttcttctcctatatagtggctgtgaaacttgctctccgaatcttctatctcagttggatggctcatttgtacctcggaacaatttggaagaagccattcttcttttaatgcttctattgaggaagttcaatcttaagaggctcgagagggacccaaccgtgatgcatcatctgacatttgcattgtccatgtcagggcagttaaaaccactagctattcagtttgaagaattattacctggagtattacacaacagagagtggtcgtacaatgttgctttgtgctacctagcagaagaagatgatctaatcgccctgaatctgctcaaaaggatattggtgtctggagaagattccaataatctcaaagaacttctcctagtttccaaaatttgttgcgagaacagtgtacaaggtgaagaaggtactttgtatgcacgcagagccctaactaatctacatggaggttgcgatcaaatagaggttactgctgaccttttgcttggcatttccctttccaatcaagctagatttgctacgaccaacacaaagagagcctctcagcagcgtgaagcgttggaagtgctcagtatttctgaaaagaagatgcatggcatagattttagggtactatacaatctcagccttgaaaatgccaagcagaggaaattggatacagcagctcgttatgcaaagaaacttttgaaattagaggctggatcagaactcaagacttggctccttatggctcgaataatgagtgcccaaagacggtttgaagacgctgagtccattgtaaatgccgcgctagatcagactggaaaatggtttcaaggagatttattgcaaattaaagccaaaatgcaggctgcacagggtaaatttaagaaagcagttgaaacatatacccagcttcttgctgtcatccagctaaggacaaaaagtttcaatgctgggatttctgtgttaaagggctctaaggatgatagaagtctggaaatagagacgtggtatgatctggtccttctgtatataagaatgtcacagtggagggatgcagaactttccatatcaaaaataaaagctatcagcccatactctgccttggcttttcatgctacaggaaagctacatgaagcaaaaggttttctaaaggaagctcttcgagcatactcaacagcattggaccttgaacctagacatgtaccaagtttgatatcaacagctattgttcttcgacggcttggcgagagacccttgcctgctgtaaggtgtttcctaactgatgcattgcaattagacagaacaaatcatattgcgtggttgaaccttggcttactatacgaagatgaagggggcagttcagcacttgaagctgctgaatgttttcagactgctgctcttcttgaagaaactaacccagtagaaccttttagatgacacagattgtactcaaattgaatgttttagggagattgctatagtacaaagtactttcacaacacagtttctaaacattttttccccttctggtgcattctttttgtgcttcaccatcccaacatttaggagaggagagtgtgtaaagtgcattaattacaaacacgtacacgtgtacaattgttaccccatatttttgacataatattgagattatagcatg

SEQ ID NO: 19639 - DNA, 4126 bp, Oryza sativa
  ref <308>: DATABASE ACCESSION NUMBER: AK069987
  ref <309>: DATABASE ENTRY DATE: 2001-12-06
gacctcgcaccattcctctctctctctctctctcccccctcgccctcgagccctcgatctccacatctctctcgcgcgcgctctggtggtctctccacccccccccccccacgcagcgcaaacccccccgattccccccctcgcttcggccaccagcggccgcccagcccgtcgcgcgcttccgccgcgccgccgcggagatttttttttgtgcgcgcgcgcgctctccccgagggggggcgggaacggggtcccgtgccattgggagggggatgccgggatgtggcgggcggtgggtccagggaggaggaggagaagggcggtggtgaggcggtgaggcggcggcggcggcacgcgcgcggccagaggaggcggggggggggggggggcggcgatgtcggacgcgtcgtcggatctcggcggcgcgcggcccggggccgtggagcgcgacatcgagcaggccatcactgctctcaagaaaggagcatacttgctgaagtacgggcgcagagggaagccaaaattttgcccatttaggctttccaatgatgaatctatattgatatggttttccgggaaagaggaaaaacagctgaggttgagtcatgtgtccagaataattcctggacaacgaacggcaatttttcagaggtatccacgaccagaaaaggaatgccagtcattttctctcatatctcatgatagatcattggacattatatgcaaggataaagatgaagccgaagtgtggtttgctgggctaaaaaccctcataacacgtagtcatcaaaggaaatggagaacagaatcgagaagtgatatgctttcctctggtacaactagtcccagaacttacacaagacgaagctccccattgagttctcctttcagcagcaatgacagtgtccacaaggatggtgttgaaaattaccgacttcgtagtccatttgggagcccaccaaaggtcggtctggagaaggcattttctgacattgtgtcatatgcagccccacccaagcccttcttcccatcggattctaatgccggttctgtccattccgtgtcttctgggcagtcagataacacaaatttacactcaaggggcatcccaatggatgctttccgtgttagtttatccagtgctgttagttcatcaagtcatggttctggtcatgatgatggtgatgccctaggtgatgttttcatatggggagaggggactggggaggggattcttggtggtggcaattcgagagttgggaactcctcaggtgtaaacatggattgtcttataccaaagccattggaatttgctgtaaaacttgatgtacagaacatttcttgtgggggaaggcatgccacacttgttaccaagcagggagagatctactcttggggtgaggaatcaggcggacgtcttggtcatggtgtagattgtgatgtgccccagccaaagcttattgatgctcttgctaatatgaacattgagctagtagcatgtggtgagtaccacacttgtgcagttacgctctctggggatctgtacacttggggaaatggtacttccaattctgggcttttaggccacgggaatgaagtcagtcactgggtacccaaaagggtcaatggaccattagagggcatacatgtttcagcaatttcatgtggcccctggcacacggctatagtaacttctgcaggacagctattcacatttggagatggatcttttggagttctaggtcatggagatcgacagagtctttcagtccctagagaagtggaatcccttaaagggctacggactgttcgagcagcttgtggtgtttggcacactgctgctgttgttgaagttatggtcggcaattctagttctagcaactgttcttctggtaagatttttacatggggtgatggtgataaaggccgtttaggacatggtgacaaagatacaagacttgtcccaacatgtgtagctgctttggtcgagcctaacttttgtcaaatagcttgtggtcactgtatgacggtggcgctgactacctctgggcatgtatatacaatgggaagtcctgtctatggccagcttggaaatccacaagcagatggcatgcttcctgtgcgtgttgaagggaagctacataaaaactttgtggaggagatctcatgtggtgcttatcatgtcgctgtcttgacttcaaggactgaggtgtacacatggggtaaaggtgcgaatggtcggttaggacatggagatacggacgataggagttctcctactttggttgaagctctgaaagataagcaagtcagaactgttgtttgcgggattaacttcactgcagcaatatgcattcacaagtgggtttctggagttgatcagtccatgtgttctgggtgtcggttgccatttaatctaaggagaaaacgtcataattgctacaattgtgcacttgtattttgtcatgcctgcagcagtaagaaatctctgaaagcttcattagcaccaaacccaaacaagccttatcgcgtatgtgatagctgctacagcaagctgaataagggtcctgagacagatagatattcttcagcaaagcggggatctgttatacaggggttcaatgattctgttgacgaggagttggagacaaaatcaaatgcccagttgtcgagattgtcatcattggaatccttcaagcacatggatagcagaacttcgaagaaaaacaagaagtttgagttcaatagcagtcgtgtttcccctattccaaatggcagttctcattggagtgggctcaacatctcaaaatcctttggttcatcaaagaaatttttttcagcatcagttcctggatctagaattgtttcaagggcaacatcacctgtttcaagaagagcaagccctcctcgatccacaactccaacacctactttgggtggtctaacctctcctagagtggtggatggtgtgaagccaatgatagcataagccaagaggttctaagtttgaggtctcaggtggaaaatcttactcgcaagtctcagctactggaagctgatttggagagaacaactaaacagttgaaggaagctatttcaattgcaggggaggaaactgcgaagtgcaaagctgcaaaggaagttatcaaatcattaactgcacagttgaagggcatggcagagaagctacctgaaggagcaggactggtgaagaacagcagactgccaccgctgccaggaatttctattccaactgatatatcagttgcatctgagagtttgggtagcccaagaagttctggagaaccctgttcaaacggttctaatggtttgcttgtttccaatggaccaacttcagttagaaataagttgagtcaccctgaaattcccaagaatggaacaaggctacccgattcagattctaagcatgaatctgaatgggtagagcaagatgaaccaggggtgtatatcactcttactgccctacctggagggactcgagatctcaagagggtccggttcagccggaagcgtttcagcgagacacaagcagaacaatggtggcaagagaatcgggcacgggtatacgagcagtataatgttcgagtagtcgacaaatcggttggcagtattgataatgatgtacatcattgacataagaaatttgacttggtcagtcactacaaagctctcaaagctctcaccgttgagcatgggtgctgacgcggctatgatattttggttaggcccagaagaggaggggcctgctgtttgaaaaatgtgggcttgcattctttttacacgattctttcctcttccatttcccttgtgtggaatgtagagtgttcaagcagaagttatgtaaatggttagtggcagctggctaatctgtcctgtaaatgcataagcaagtgcatcaattttagactatgatcttcctgattttcctttaattggcaaatataggtgcaaaatctaagtgatgatgatgaagaatatttggtgctaattgtagattgagatgcaaagtagctttgaaagatttaagctttgttctggctgacttgagtgcctgttttggcgaaaatttcatgccaattactctgctcccccagattgaacgtcg

SEQ ID NO: 19640 - DNA, 1437 bp, Oryza sativa
  ref <308>: DATABASE ACCESSION NUMBER: AK069988
  ref <309>: DATABASE ENTRY DATE: 2001-12-06
ggcccacctcctctcgccccttctcgccgcctccgccgccgccgccgccgacgaggaggaggccgatgggctccgaggaggagccgtcgcagatgcggagggcgctggtggacgcgctcgcgggggccatctccggcggcatctcccgcaccgtcacctcccccctcgacgtcatcaaaatccgcttccaggttcaattggagcccacaacctcgtggggtgtacttcgaagggatgtctatggaccttccaagtacactgggcttttgcaagcaagtaaagatattctccgagaggaaggtttgccgggattttggagaggaaatgttccagccctattaatgtatatgccatatacagctatacaattcactgttctacacaagctgaaaacatttgcttctggttcatccaaaacagaggatcatttgcacttgagtccttacctatcgtatgtaagtggggctatagcaggatgtgcagcaacagtaggatcatatccatttgaccttctcagaacaattcttgcatcacagggtgaaccgaaggtttaccctgacatgaggtctgcatttcttgatataatgaaaacccgcggtttccgaggactttacgccggtctaactccaactcttgttgaaatcataccatatgctggcttacagtttggttcatatgatactttcaaacggtcgatgatgacatggaataggtaccgatattcacatcttaactcaggaagtgaggatgattcagtatcaagcttccagttatttctttgtggatttgcagccggaacattttcaaaagctgcttgtcacccacttgatgttgtaaagaaaagatttcagattgaaggattaaaacgacatccaagatatggcgcccgaattgagagcagcacatacaagggcatgtaccatgccctaaaagagattgttgcgaaggaggggtttggaggcctttataaaggacttttcccatctttggtgaaatcggctcctgctggtgccgtgacatttgtggcatatgaatacatctcagactggatagggagcaaagctggagtcgagtgagttcttggatgaaggagccattgagagatacaacatacaatgatgagagaacagtgtccactcttaattgttttgtgaccgcaaggtcgaaagttaaaaagtgcatacaatcccttgagagctgatacttggaaagccttgcatagaattagctactcttgtcatttctctgcctttttgccccattgacctgtgttgttgcattcgttgagatgtaacagtgaggatgagtaaaactaaggaaagtgtagagcttgtgacgcttgatgaaggccggggagcggcaggcatttttgttaagatgatattatctcactcctatatgtccctcactcacataatgcagttaatgtgaactgtt

SEQ ID NO: 19641 - DNA, 1459 bp, Oryza sativa
  ref <308>: DATABASE ACCESSION NUMBER: AK069989
  ref <309>: DATABASE ENTRY DATE: 2001-12-06
gtgagagaaggaatccgatcgagcgtttcccgagcagtagcgacagaaaatggctgtgacgatggacaacgtcatcaggttcatgttcatccttagcgtcgtctacggcgccgcatatgccaaaaagtctgaggccaaggtcgctagtgctcctggcctagcagcggcggtcaacacggtcttcgacatcaccgagctcggcgccgtcgctgacggcaagacagatagcaccaaggcggtccaggatgcatgggacgcggcgtgcgggttggccgggtcacagaaggtggtgatccccaagggagaattcatgaccgggcccctcaacttcagcgggccgtgcaagggctacgtcaccgtccagatcgatggcaccatgtttggctccaacgacatccccaagtacaacaagggcaactggatcgagatcctccacatcgacaacgtcctcgtcaacggctccggcaccctcgacggccagggcgccgccgtctggaaagacgaatgcaagatcttgcccaacacgttggtgctggactacgtgaagaacgggaccgtgtcggggctcaagctggtgaacgccaagttcttccacatcaacgtgtacatgtccaagggtgtgacgatcaagaacgtgaccatcaccgcggtggcgaacagcccgaacacggacggtgtccacatcggcgactcgtcggagatcagcgtgtcggacgcgaccatcgcgacgggggacgactgcatctccgtggggccggggagctcgcggatcagcatccaggggatcacctgtgggcccgggcaggggatcagcgtggggtgcctgggcaggttcaaggacgagaaggacgtgacggacgtgacggtccgcgactgcgtgctccgcaacacctccaacggcgtccggatcaggtcgtatgaggacgtgctgtccccgatcacggcgtccaggctaacgttcgagaacattcggatggacggggtggccaacccggtgatcgtggaccagaagtactgccccgagaaggactgccccgagaagaaggggagcaagacggtgaccatcaagaacgtgacgttccgcaacatcaccggcacctccaacacgccggaggccgtcagcctactctgctctgaccagctgccctgcagcggcatggagctgctcgacgtcaacctgaagtacgacggcaaggacaacaagaccatggccgtctgcaccaacgccaagggcatctccaagggctcgctccaggccctcgcttgcctctgatctcgatccatccatcgtcgaccggcgttatatcatctctctatctatcgtcgtctgatatatgtataattcgcttatatagtatgtactagaaacacaacggggctttgccgagtgtacatgcgccagcccaattgggccaaatagaggtattacctgttacatttatatgaacaggagtgaatg

SEQ ID NO: 19642 - DNA, 2361 bp, Oryza sativa
  ref <308>: DATABASE ACCESSION NUMBER: AK069990
  ref <309>: DATABASE ENTRY DATE: 2001-12-06
gtaaaatgtctttcatgcttcttcttcttctcctgctctccctcatcctcaaccttgcatccccgaccaccgccgcttccggcgacggcaacggcgaccagttcatctactccggcttccatggctccaacctcaccgtcgacggcgccgcctccatcacaccggacggcctcctccagctaaccgacggcgcagcctacctcaaaggccacgcgttccacccatctccggtgcgcctccgccgcgacgtctccacgtccacgacgacgaccaccgtccgctccttctccgtcaccttcgtcttcggcatcgtctccgtctaccccgacttcagcgcccatggcatggccttcgtcgtctccccgacaaccaacctctcctcctccttgccggccaagtacctcggcctcaccaacgtccagaacgacggcaacgccagcaaccacatgctcgccgtcgagctcgacaccatccagagcgtcgagttcagggacatcaacgccaaccacgtcggcgtcgacatcaacggcctccagtccgtccgcgcctacaacgccggctactacgacgacgtctccggcgagttcaggagcttgaagctgatcagccgccaggcgatgcaggtctgggtggactaccatggcggcgagaagaagcagctcgacgtcaccatggctcctctcagaatggccaggcctgtcaagccgctgctctcggtcacccacgacctctccacggtgctcgccgacgtcgtctacctcggcttctcggcggcgaccggccgcgtgaattcgcgccactgcgttcttggctggagcttggggatcaacggaccagctcccgccattgacatcgacaagctgcccaagcttcctcgtgctgaacccaagccaagatccagggtccttgaaattgttctaccaattgtcactgcaacgattgtgctggttgtgggtggcgccattgttatggtggtgaggaggagatcgaggtacgccgagctacgggaagattgggaggttgagtttgggccgcatcgattctcgtacaaggaattgttccgcgcaaccgatggatttgcggataagcatctactcggttcaggaggatttggaaaggtgtaccgaggagtgcttcctaaatctaaattggaggttgccgtgaagaaagtgtcccacgaatcgagacaagggatgaaggagtttgttgctgagatagttagtattggacgtattcggcaccgtaatcttgtgcagttgctcggttactgtcgacggaagggtgagcttcttttggtgtatgcgtatataccaaatggtagcctcgataaatatctgtatagcgaggaggataagcctatactgagttgggctcaaaggttccgaatcattaaaggcatcgcatctggtttgctctacttgcacgagaggtgggaaaaagtggtagtgcaccgagacatcaaggcaggcaacatactcctcgacaaggacatgaacggacagctaggtgactttggcttggcaagactatacgaccatggcacggactcacaaaccacacatgtggttggcaccatgggatacctagcaccagagctcattcgcacgggcaaagcatcccctctcaccgatgtgttcgcgttcggcgtgttcctcctcgaggtcacctgtgggcagaaacctatcaaggagaagaaccctcaaggtagccacatagcgctggtcgactgggtgctcgagcattggcgcgacggttcactcatggacacggtggacgggaggctccacggcgagtacgacgccggtgaagcggcgctggtgctgaagctgggcctcctgtgctcgcacccgttcgccgcggcgaggcccgggatggggcaggtcacctgctgcctcgccggcgaggcgccgctgcctgagctgacgccggcggacatgggcttcgacgtgctggccatgatgcaggataagggattcgacacgtccgtcgtgtcgtatcccgatcttatgacgagctttggcaccatctccagcctctcaggaggaagataactcggctttttgtatataagtttcatacaagttcatcggtcacgaccagcagttgtggattaaaattttttgaacgtttttagataagctagaataatttttgaactaatttaggccaactctagacttgcagtatagtagacagagcaatgaaagcagaggactctgttttccattggtatcatcaatgaaagatgcagagtctcatttagactgaagaaaaaaattggagtagtcaccctctttgctgaaattatagactgaaacattcatctgttcaattcaaatgtcatacaagaaattgatgccc

SEQ ID NO: 19643 - DNA, 1560 bp, Oryza sativa
  ref <308>: DATABASE ACCESSION NUMBER: AK069991
  ref <309>: DATABASE ENTRY DATE: 2001-12-06
gactcctcactcccattccgccgcgatggcctcgccgcgccaaaaccctgcaccggcgccgccgccgccgcctccggtgatcctcactgacgacctcctggaagagatattcatccgcctcgacacccccgccgacctcgcccgcgcgtcctcctcctgcccgcccttccgccgcgtcatcactgacccctccttcctccgccgctaccgcgccctctacccgccgccgctcctcggcatcctcccccgggacgcggatgccttcctccccgccgagccgccccaccgcagcgcccccgccgccggcgccgtcgacctctcctgcgccttcctccccgaccgccacacctggcgccgccgcgacgtccgcgacggccgcatcctcttctcccgcgaggaggagtactacgcccccgacgacgacggcgcggacgtcctcctcatggatctcgcggtctgcgaccccttctcagggcgctacgccatcctcaccgaaataccgcaagacctaatcgaccccctcgatctcgagggccagagcttcctttgcttcgagcccttcctcgcccccgccaccgccgccgacgacgacgaggacgaggtcggcggcgcctcgttccgggtgatgtacatggcgcgcggcctgaccaagctgatggcgtttatcttcccttgggaagctggggaatggcgcgccgtggagtacgatggttgggctgctctgatcaacgggacatcgacttggctcgccgagatgttctggcgattccatgtacatggcaacatctgctggcttttggattgggcgaacaagctcctgatcctggacaccacaacaaatcagttgtccacaattgagatggttcccggcagctggaagaaagacattgtattcctggagacagaggaaggtcagcttgggctgttcgttctcatcaacaatttttataccagctttgacctctattatgctatttggcaagataatgataagggagtgaagcaatggcgtgtaatagaggctatccagttgcccttaaattattggtatgaaaatctcctggggattgatgggggttacgtgctcctgcaagggattccaaagggttcaaaatcatcatggcaggcctcttcgcgtcaaaatggatcatcacaggcctcagaatcttcgtcagaggtgccggagcatgtttgtttttcggtggaggtcaagacttttcgggttgagaggttttgtgggactaaccatgccatcaaaactgctaacctgtttaccagttacccaccatcgttgtcgccaccgcgcttatgaaatggaattctactattctgctgctgttcgttggggaatagccgtgatctgtggtcctgctgcgtctgcactcgcgctaggctagtctagttcacctttgcctgcttttgctaagtacttcacgttacctgtcaaacacttgttaagcactaatccatggctaggtatatttaccagacttataatacactttcgttgtgtttcgatctaagctacttgctaggtactagctagcttattatgttatc

SEQ ID NO: 19644 - DNA, 996 bp, Oryza sativa
  ref <308>: DATABASE ACCESSION NUMBER: AK069992
  ref <309>: DATABASE ENTRY DATE: 2001-12-06
gctcagacaccaaaggaacttgttttttgtatttttcttttcggtagctactttctacatctctcttatttggatcacgtattatcctttttcattccacgaccgacgaccaatgttccgacacctcgccgccctgatcctgtccgccgtcgtcttggcggcgtccacaagctccggcgtcgtcgatgcccgtcctgtccacaccggcccgtaccacgtcgtcatcagaaccgccgccaagcccagccgtcgcctgatcgggctcggcggcaatgccgccatatgccaagaggtgcactacaaggcgctgtgcggcacgctgacgacgctgccgggggtgatgacgccgcagcagctgctggacgcggcgttgcgggtggcggagtccaaggccatgatggcggagaagcggctggccgacgtgatgaagtcgcgcgcggtgaaggccgaaggcacgagcatgtcgtcgacgctcgacacgtgcaagggcgcctactcgtcgctggccgacgcgctgcagaaggcgcgcgacacgatcaagagcggcggcagccacgacgacctgatgaccgagctgtcgtccgcctccaccttctccaccgactgcggggaagccttcgacgagttcccggacctcacgtcgcccatacccggggcgcagcgccacgtcaaccgcctcgtcagcaactgcctcgacctggctgccaccatcaaagaaaactgatcgatggcgtggacgcacacgtgccgcgccggccggccgcgctaggtttgtaggctgcttctggctgcaggcgagcgtgcaaggctacaacgacacgtactgcatgtactgcgcacactctgccttttcatgtacgtatacgtgtgtactagcgtacatggtgtctgtatgtacactggtcatggggagaatggggagagcatgcagtgcgtatgtttttatcaatatttctcgcagcggcatatataggcgtcttggtcttggagattagc

SEQ ID NO: 19645 - DNA, 1387 bp, Oryza sativa
  ref <308>: DATABASE ACCESSION NUMBER: AK069993
  ref <309>: DATABASE ENTRY DATE: 2001-12-06
gtctgctactgttcttgccttcttgccctccacactgtccacgtctctccaaactccaagactccatcgccatcaacaacgcggcgaccatggcgtcctccgccgccgccgccgcggcaacggaccgcatcgccctcgtcaaggccttcgacgagacacgcaccggcgtccgcggcctcgtcgagtccggcgtctctgccgtcccggtcatcttccgtcaccccgacccctacgcctccgtccccctcgctccacccggcgtctccatccccgtcgtcaacctctccctccccgcgccgctcgccgccgaggccgcggcgggagccgcgcgcgactgggggttcttctacctcgtcaaccaccacgcccttgtcccctccggcttcaccgccgggctcctcgccgccgtccgcgccttcaacgagctccccgccgcggagcgcgccgcgcactacggccgctccgtggacggcggggtcagctactcctccaacgtcgacctgtaccggtcgggcgccgcgagctggcgcgacacgatccaggtcgtgctcgggccctcgcggcccgacgcggagcgcatcccggcggcgtgccgcgccgaggtcgtcggctgggacgcgcacgccaccgccgtggcccgcgccgtcatggcgctgctctgcgaggggctcggcctccggggcgagacgctggaggaggcctcctgcctcgaggggaaattgatggtgtgccactactacccggtgtgccctgagcccgagcgcaccatggggatcgtcccgcacacggaccccggcgtgctcaccgtcctcgcgcaggacggcgtcggtggcctgcaggtgaagcacacgaacgaggatggggagagctactgggtggataccaagcctgtgcctggcgctcttgtgatcaatgtcggggacctattgcagatcatgtctaatgataagtacaagagtgtggaacaccgggtagtaatgaagtcgcatgaagaagccagagtttcaagcgccatcttttacaatcctggcaagagaggcgactctgttttttatggaccattgccagatctgatttcttcgggaaacccaccaaagtacaggaattttactatgtctgagtttctgggggccttctttaaacgagaccttgcgagcaaagctctcatcgagcacttcaaaatataaagttattcaaatgttgcagataaaaaggtttaaacttctgtgaactttgtagatgtcgatactgatagtgtgatgttggtgttctacttcttaatcataaaagcctcatagagtgttcttcaaatagataaaaggtttaaacttctataaactacattgatgccgttgccgataatgtaatgccatggttctacttgatc

SEQ ID NO: 19646 - DNA, 2630 bp, Oryza sativa
  ref <308>: DATABASE ACCESSION NUMBER: AK069994
  ref <309>: DATABASE ENTRY DATE: 2001-12-06
gaggagggaaagaggagaggagggattgattttctttctcctcctcttcttgttcttcttcttgttgttccactcttattgttcatcatcctcctcctcatagctgaccaaatctctgctgtgacagcaatctctgctgcttggttctgcctcccatgaggagcacaccatcagtgtgattacaaagcaaggaaccctcctaccgcgtcgctgagctgatgaaggagctctgacgactcggatgcattcttctgccatcaatcaattgatccaacaaggcaactcgatcggaatttgagtttggtgaactctgtaattgattccctgcaagtatccatgcctttgcagcaatcttgctaattgagttgtcaaagctgcatacatggctacttactactcgagccctggcaatgaaagggactcgcaagctatgtacccagcggattcaggcaattcatcatatcctgtgccatcagcaataggaaacatgttatatcctggcaatgggtcttctgggccatacacggaattcagtggcattatccagcatcagcagaatttcatggagctgcctggccatccaactgcgatctctcaagattcatcgtcacgggaacctaacatggtcgcgtcgtacatggatcagcgctcttttggacctgccaaagatatgagaaatgagatgttgatgcatctgatggatggagcacataatgctggtgctgatctcatccacaatgacactcatagcagcgcgcagattgagtttggcctattgaacaaccacaattcgatgagcgttgcaccagcaccaggccaaggattgtctctgagcctcaacacgcatatcctggcgccttcgtatccatactggtctgcgaaaacagagttgctaacaccacactcttaccatggtgatgacaacagaatgaagaatatgcaatctgaggcctcacaggcaatcagaaactcaaagtatctgaaagcagcacaagaattgcttgatgaggtcgtcagtgtttggaagagtataaagcagaaggctcagaaagaccaggctgaagcaggaaaatcagataacaaagaagccgaggggggttcgaaaggtgagggggtatcttccaacccacaggagtctactgccaatgctgcaccagagatttctgctgctgagaaacaagagctccagaataagatggcaaaacttatggccatgttggatgaggtggaccgaaagtacaaacactattatcatcaaatgcaaattgtagtctcatcttttgatatggttgctgggtctggagctgccaagccttatactgcagtggcccttcagacaatctcaaaacatttcagatgtctgaaagatgctatcaacgatcagatcaatgttatccggaagaaacttggagaggaggagagttcatctggcaaagagggaaaattaacgcgcctccgttatattgaccagcaattaagacaacagcgcgctttccagcagtatggtttgttacagcaaaatgcttggaggccacagaggggactgcccgaaaactcagtttcaattcttcgtgcttggctttttgaacacttccttcacccgtatccaaaagattcagaaaagctgatgctagcgagacaaactggcttaacaagaagtcagatttcaaattggttcataaatgcccgtgtccgcctgtggaaaccgatgatcgaagacatgtataaagaagagattggggaggcggatctcgactcgaactcctcctccgacaacgtaccaaggagcaaggacaaaatagcaacatctgaagataaggaagatctgaaaagctctatgagccagacttatcaaccaagccaattaggtgaatccaaagccaacatcgggatgatgagccttggtggggcaccagccggcttccacaacgaaggcaaccaggatgacagcttcatgaacctaatgctgaaggaccaaaggccgggcgaagccgaaggcagcctcctccatgatgccgtcgcccatcattccgatgagaacgctcggttcatggcttaccatttgtcggggctcggaagatacgggaacagcaatgtgtcattgacacttggcttacagcatcctgacaacaggctttcggtacagaacactcatcagccaggtttcgccggtgctggagaagaaatttacaactccaccgcttctctcggtgtcgctgcagcttcctcttcggactacgaatccacgaaccaaatagatcaaaggcaacggttcgaaccatcgcctctaatgcatgattttgtggcctaagatgctcaaaataccaaaaatatatggaggcaagatttgcctggggggagcatttgtaatttgtagtgccagaataacatgcctcagaaagcatggaaattgttagctgtagttgcatttggtacagaagaggggggtatagcatgaaatgtaatataattaagtttagcaggtgggggtttatagggggtaaagaatcctgtaaaaatggaatacatcatacatgtaaaagattatgattttcagaaccattctgtaaaaaaaaacacacctgtaatgactacttatcatccaggtatatgttgttcagcctattgac

SEQ ID NO: 19647 - DNA, 1916 bp, Oryza sativa
  ref <308>: DATABASE ACCESSION NUMBER: AK069995
  ref <309>: DATABASE ENTRY DATE: 2001-12-06
gtttctcttcctccttccttccacctcaccccaaccccaaccccaaccctggccccgtcccgcgcgtacggaggaggggcccatgcatgcatgcgggtgaggtgacaaggacgcggccacggggatcaccggcgcaccgaccgggatgttgaaggtgaggtggttgccgttcaagaagacccatctcgcccgcagcaacgcctccgacgcgtcctcccccacctccgccgccgccgccaccgccaccgccgtcaccacccaccgcctctaccaagtctggaggggcaggaacagattcctgtgcggcgggcggctcatcttcggcccggacgccagctccatcgtgctcaccgtgtcgctcatcatgacgccgctcgcgctctttgtcgccttcgtctccttccacctcgccgccctcatcgggaagccgctcggccaggccgtcccggccgtcgccatcgccgtcggcgtattcgacgtgatcgtgctggtgatgacgtcggggcgggacccggggatcatcccgcggaacgtgcggccgccggagcccgaggacatcggcgtgtcgtcgccggcgttcggcggcggcgggtcgctcccgccgacgcgcgacgtgtacgtgaacggcgtggtggtgaaggtgaaatactgccacacctgcttcctctaccgcccccctcgctgctcccactgctccgtctgcaacaactgcgtcgatcgcttcgaccaccactgcccctgggtcggccagtgcatcggcaagaggaactacaggttcttcttcatgttcatctcgtcgacgacgttcctgtgcctgtacgtgttcgtcttctgctgggtgaacctggcgatgaccgcgaggcagttcggctgcagcatggggcgcgcggtggtggagtcgccggtgtcggggatcctcatcgtgtacacgttcgtgacggcgtggttcgtcggcggcctcaccgcgttccactcctacctcgtctgcaccaaccagaccacgtacgagaacttccgctacaggtacgagcggaaggcgaacccgcacaaccgcggcgtcgccaagaacgtcgccgagatcttcctctcgccgatcccgccgagccggaacgacttccggtcaagggtcgccgtcgagcactactacgccgccggcgccggggcggcgtcggggcagtacttctactcctactcgatcgggccgctctcgtcggagtccaaggcggccagcttcaacacgcgggggagcctcagcttcgacatggccacggcgagcttcgacctcggcggcgtcggcgtcggcggcggcgtcggaggatactccgccaagcgcaccagcgtcgacgtctgctccaactcctccgacttcggcgacatctacggcggcgagcagcagccgccgcggcactccatcttcggcggcgacggcggaggagggaggacgagcgtcaggaaggccgacgacgtcccgacggagttcgggcactacggcgccgccgctgccgccgccgccggcggcggcggcggccggcctcgcgggagggagttcgaggccgtgtgacgtcgccgccgccgtcgtctccaagtgcgttggcgccattttcttgggagctcgacgatgcaacgcagctaattaatcgatcaattaatgtagcgaatttttctctgtttttttttggtgatcttgtgcttccgctgctcgtgtgttgtgtagtagctttggttgatcagcttcctcatgcttgctaatggagtagtggtttccatagcattctagtactacttgcttaacttgatttagtgaaggtgatgtatacacacacaaatgcacacacacatgggtttaattttgtgtaattaggactgtgcatatatataaacggtgttcatgagttatccaaacattatcttttggc

SEQ ID NO: 19648 - DNA, 1502 bp, Oryza sativa
  ref <308>: DATABASE ACCESSION NUMBER: AK069996
  ref <309>: DATABASE ENTRY DATE: 2001-12-06
gatctcgatgccatggcgcctgcaagcgaccggaatggccacgaaggccgccgccgcgtgctgctgctcccgctgccataccacggccacatcaaccccatgctccgcctcgccgccgcgctgcacgaccgcggcctcgccgtcaccgtcgtccacacggagacgcgcgcgcccgaccgccggagcctccccgccgggtgcgagctggtgaccgtgccggacggcctcccgccggagctggccgcgtccggcgacatcccgtcgttcgtgttcgcgctgaacaggaactgcgcggcgccgttccgtgacctcctcgccggcgcgctccggcaggaggaggaggaggaggacggcggcggcgtcgcgtgcgtggtcgccgacgtcgactggttcgcgccgctcgccgcggcgagggagctcggcgtgccggcgctggcgctgatgaccagcagcgcggcgaggttcagggtgtacctggcgtaccctcggctgtgtgaaaagggatatttacctgtccaagagtcaaatctggacatgccagtggacaagcatccgccgttgttggtgcgagacctccacatcatgatggacacgtctcggcacgtcgcctacgccagcctgctcgcccacatcgtcgccggtgtccgccaatcctctggtctaatcctcaacaccttcaacgccatcgagcgcaccgacgtcgagcagatccggcgcgacaccgccatcccagtgttccccgttggccccctccacatgctctcgccaccagcgacggtggcgacgcagaaaagcagcctgctcctcgaggaccgcagctgcctggaatggctgaacacgcagctcccaggctccgtgctgttcgtcagcttcggcaccctcgtctccattgacgccgacgagctcttggaggtggcttggggcctcgctgccagcaaccggccgttcctgtgggtggtccggccaaggctggtccgtgggcgcgactccgtcgagctccccagcgagctgctcgaggagacacgtggcagagggaggatcatcaggtgggcaccacaagaggaggtcctgagccaccccgctataggcgcgttttttgacacactgtgggtggaactcgacgctggagagcatatccaggaccgtgccgatgatatgcaagccatgtggcggtgaccagttagggacggcgaggtatgtatgtgacatgtggaaggtgggtgttagggttgaggtcgaggataagctgaccagagggggaatacaggcagcgattgagaggttgatggatgggatagagggtggagtagttagagataggatgagagagatgggtgatgtcgtgtcaaaatgcactacgaaaggtggttcttctgatttagccctacaggacttggttgactttatcaagtcgtcctagaaattatttctagcattaaaattttagtgaacatttttctgcgacaattattcttatgaatttatcgcatttggtaattggc

SEQ ID NO: 19649 - DNA, 1141 bp, Oryza sativa
  ref <308>: DATABASE ACCESSION NUMBER: AK069997
  ref <309>: DATABASE ENTRY DATE: 2001-12-06
ggcacgagcagaggactcgagacccacgcgcatcctccccggccgccgcggcggctcggcctccgccactcaccagtgagcttcgacagcgagggtttgcacgggatccccgggtacgatggcggcggcgacggaggagcagctgcgaatcacgggatccgtcgtccctggagtcggggaagtggaagaggtcgacgaggccacagaggggggacgacttgggcgaggcgacgacgacgagatcctgcggttcatggactctgtggacggctacctcctcctcatggattcactgtcctccgttctccgcccggggtggcttgatctggcaagtgcccgtcactcgatgggtacatcacgtgtttcgagtacactcttcgatcacaaagagcaatctgcagctagcaagctgcaagtggttgattctgcagactcgcagtcatcagagccaaacccacattttatcctgtcaaagtggtgcttgcaagaaaaatccaactccaatgacgctgtcggtgtgcgagatactactaagccaaaattaaggtaccgagggtcagcagcaacgccagatggcagccatgattcagatgcaactccggcagagtctgctactagtgtggacactagtagccatgttcagaaggcaagatcaaaagcactatcaacctttggagcactggtatctccaaaactacgatcggcccagatgtcctttgaaacagcacttgaattaattgtggaattagcaaattctaggtcagacatgttatctagtttctctcaaataaagggggagtgactgttgattcagccacgcgtgcaacacatcatgttcagaagcatttccgtgctgctgtttgatctgtcatctatataccaactacttcactacggtaatcaataattccatacatcagaccttcattatgggcaagacttttatctctgtagatttgtccgatgaattttttcgtgctttgcagtgtgccagagctaatgagcaaacggaacgttgctattctcatcttagtttttttttttttttttaacaaacagcagcaattgtagaaaactttatttagatgttgatatgaatcgagatgcctctggtcataaacatatttgctcttgtaccttg

SEQ ID NO: 19650 - DNA, 1553 bp, Oryza sativa
  ref <308>: DATABASE ACCESSION NUMBER: AK069998
  ref <309>: DATABASE ENTRY DATE: 2001-12-06
gagagggctcgccacctcgccgcaagctgcggccgccgtcgccgccggggtcggcggcgcagccgagcctcgactgcctcccgtcggagatcctggagaacatcgtcgcccgcctcggcatccgtgaggccgtccgcacctcggcggtctccggcgcatggcgccgccgctgggagacctccccggggctcagcttcgaatgggaccgcggcgaggttgaccccgccatcgtcgccaccgtcctcgcgcggtactcgcgccccgtcgcctccttccgctccgggtgggtcgagagggagcactccgccgtcacggatgagtggctcgtcctcctcgccggaaggagcgtcgagtccctcacccttggcttcgcggagttcgacgataggcggttccacaccatccactccgccatgttctcctgccgcgagctcaccgagctttacctcgagaactgccgcctcccggccgcaccctcgggcttcttaggtttcccaaatctaaccacgctaagtctctcaccatggttaatcttccagagcatggggagagtaccttggaggcgatgatctccttgtctctgttgcttgagtggctggatcttaggagtgtttgtactgatggcaaccagatggatgagtgggtgattcgggcgccgaatctcaagcatttgactattgaatcagattacgattatttatggagggtagaggagctcccttctctccagacggcaactgtcaaggttgatgatgattctactgatcgtgattttgttcagttactcacatgttttgcccaagtcagcatgcttgagcttcatttgctggcaactgaggataatgctctagatggactttcatgttctttggagaaactgaagagcttaacacttcatgcaaacttccgcagtgtgtctagcattttatgtatattttctttactcatgaggtgccccaacattggagttctggacattgagattatgggaagtgagtttcctcagaatgatgagatagatgcagaatttttcaatacactggaaaccaatgatctgttcactaatctagatgacataaccttgaggaatgccccatgcttgtcaaatgatatgcactttattgagtttgttctgtcaagagtaaggctacttagtaaattttgggtttttcgagatgatagtaattcattgtcaaagcctagtgaagaagcagttattgagatagcaaaatatagaagagcttcaccaaaatccagagtcttctttaggagcatggaagattattacatttgagtgacgagcactattgatgtggatctagataacatcttttacatggaccgtggtcaagtacactttccatattactttctgagagccgctgggaaaccacagcttaattgttaagtgttcattactggacataaatccggtaatattagttgtgggtgtcaaatttgcataaagtcttgtaataccaatcttcctggaagatcaaacaatgtttacagtaattttcgagtgattatcctaacaccaaatagttttcaag

SEQ ID NO: 19651 - DNA, 610 bp, Oryza sativa
  ref <308>: DATABASE ACCESSION NUMBER: AK069999
  ref <309>: DATABASE ENTRY DATE: 2001-12-06
gctggtcgcgggtcgccgacgtcctttgcgccgagccatggagaggatctcttgaggaggagggggcggttgacggcgggatgcggggaggagcatccggctgcgttgaccacaccctgattcctccctcgaaggatctggcacggatcaggcctcccatcgctgcctccctcccacagcggtggcgtcatgatctgtgatgcacgatgataatgaggtctgcactcgtgccggtcggcagcaggcgctggagaccctggccacgcaaagcaggcatggggatggcggtcaggaccgatggatggatggatgtcaattcgtggctgtgggatgcctctctagatgttcgtgggtgatggatatctgtcgatgggagacctaaggatctatagtgctttgtcggctcaacatcgatatgtggcactagcgccgtcttgtttgttggattcgtgcatgtaatagtaatttagttactaagagacattaagaatcatcggtgtaatagtaacttggttactaagagatttttttggcaatatcaatatgttatgttgagattggtgtaatagtaatttatttactaagagaaatcttgtgatgatatatatgg

SEQ ID NO: 19652 - DNA, 1482 bp, Oryza sativa
  ref <308>: DATABASE ACCESSION NUMBER: AK070000
  ref <309>: DATABASE ENTRY DATE: 2001-12-06
gactctggcgcgtcaggccaaacgcctccccttcccgatgcacactgtagctacttgcaacttgcgcaaggagtatccccgaacgcatatttcctttccttcgtctacctccagcagcatcagcggcggcggcagctggatcctccctcccgagactgagagcacggcaagatttgcaaaattgcaaggcgagtagttgcgtgagactgagtttttgagtgagcgagttagccatgctggtaaggagcgcctccacgccggttctcggcgcgctcctcccgtccgggagccactcgccggctgtctcctccccggccgtccacttcttcgccgactcgtcgccgacggtctcgtaccacccgccgaccatctcctgccggctcacgccaggcggctccgacgcccacgaccgctccctcggtggcctgcgccgcgcttgctccgatgggaacctcgccgctctaggcgccagcggggacgacgaccaccaccaccacctcccgccgtccggcaagtgcgcgccgcgctccaagccaacgacgctcgagacgatccagtcgttcacgcaacgcggcggcgcttccacggacgaggaggaggaggaggacgacgacgacggcgaccacgaaagcgcggagcaggagctgagctttgggaagttccgcttcagcggcagcagcacgttcgcgcaggtcgagcacccgctgttcctcgccagaggcctcgggatcgaccgcctcggctcaggcttgctgagcgccgacggcggcagcggcggttccgacggcggcggcggcggtggcgccggaggcagttacctggtgacctccgacaacggagggaatcgctctgacatcgagatgcattacaagaagatgatcgaggaggacccatgcaacggcctcttcctgaggaactacgcgcagttcctgtatcagattaaaggggatagccggaaggcagaggagtactactcccgtgccatcctcgccgacccgaacgacggcgagctcctgtcggagtacgccaagctggtctgggacgtgcaccgcgacgaggaccgcgcctccagctacttcgagcgggcagcgagagcctccccgcagaacagccacgttctcgccgcgcacgccgcgttcttgtgggacacggacgacggcgacgggccggagggtagcagcagcgacgcgctgggctacgcggggttcgccgctgctgctgctcactcgtccttggcttcggcaacaacctgatctgaacaaacgaacaaccttcctgttgtctctgaaactagcatggtgtagtattggtagtctcgcgttcatttcagtactagcttcccaataattggagcgctaaatggctggtccagtatgtgtgtatactgctgttgtaaatcaccaagcggaatcaagtttacgacgtatgaatgctgcagcactgatctgagcttcgtgtcactataacctgtttagttcttcc

SEQ ID NO: 19653 - DNA, 950 bp, Oryza sativa
  ref <308>: DATABASE ACCESSION NUMBER: AK070001
  ref <309>: DATABASE ENTRY DATE: 2001-12-06
gattgttcttgttgggaggaaggagacgaggcgcgcgaggcggcgagagggaggaggcattctagcatatacagatacagagccaggggaggtatggaggagggccttgcacgagcacgacgatgccaatagaagctgtggcggtcgcttctttaccgatggcgtcgcgcagcgccgccctgtgcttctcctccgccgccgctgcccggagccggagcaggagccggcacggcaggatggccgtcagctgcgacgccggggcctcagatctgctctattcctctctggctgccaagctgcttggccctcccaccagcttcgatgccggcaagctgacggtagagttcgcccacagccacgggaacagcagctccgggttccccagagcttacaccctcacccactgcgacttcaccgctaacctcaccctcgccgtctccgacaccatcgccgccgaccgccgcctcagggcggacgacgtcttcgccgagtggaagcagcagcaacagcaggagggcatggccctgcacgtgcactgcttcgtcagcggcgccaacctcctgcatggcctcgccgccggcttcaggtgtgggtgcacttccactccagctccaacgctaagtacaacaggctcgagtgctggggtcctctcagggaggctgcaaacgccgagacgacgcacaagaggcatgcgctggagcaactgcacaacgcaatcaccaaaggcacaagaaggcgtaggaggaagtggtctagcccggacgccatcttcagcgccctgctcgcccttctcctttgatgcatatggggaaccccacacattgtctttttttttgctctgccttgtgcgcatcaattccaattctttcatccaccggacacttgacatgtatgtatagtatgtacccactccacgatcaacaaaatgagaaacgattgcctttccaagc

SEQ ID NO: 19654 - DNA, 3065 bp, Oryza sativa
  ref <308>: DATABASE ACCESSION NUMBER: AK070002
  ref <309>: DATABASE ENTRY DATE: 2001-12-06
gagccagctgggattttagtcagatggggtatttgactaggttttacgagtaaagacccctcccgccgccagctacattgatttgatccctcgttccctcgccggagtctcctgccttcttccgtcctcaacagcggcgccgcctgagatcccgctctccaccacgccattgctcgccgtcgtggcggcgggcaggagtggtcggatgatgccgaagatggagggcggtcggcggccggatgacggccaagactggaggcgcgtgcaatgtgcatcgccggaatcgcgttcaacagcaaccgacgctccagaggcatcaggcctagaagtgacaacaggttcgcgaatcgtaaaccctcgtctcgggtgtgcttgctgtattcaatttgagggggtaactgggaatcacatagtcaggaaatgtatgaattattaaattttgtacagccttagaaagttctgacctttatggctgaaattacaggaagtttaagttgattatggtggattttcgatgaaatcacatagatgggattgaaaggtagcaaatgcagtaggttatagccgactcgtttttgcttaatttcgatccacttctctagattatgcttaagtttataatataagctttactgttgttagttttcatgtttcacggtgcacaggacagtatgacacacactctcttttcaaaggttcttagcttcataatcaatctgtccagtcatctgttctcttgaattgtttgatacatgtgcagtgaaaaatctttatggctatgagaatgtgcatacggatgttgtaatcttcagaaatgttcagatagatgacctgatgtgtttcaaaaatcatgtgctttgtaaagaactggtttactgtttgcctgtatcattgaaagaaactgacttcctctagtctggtttacttagtagcgccccatccttcttttttttttttaattttcaccaggggggagagtttccccacctgaattttcattgaaagggattgttaaagttacatgggagtaagaagaataaaagcagttacagggatgaaagggcagaagcgaagcaacgcttccactgtgaaactatgggacatacatcgcttttcattcgttctgaccagagggacgcatcttgaatacatcggcgaaggatccgctggagggaggggggttcttttctgaataccacatcgtgccggtgattccacaaacaccaaaagcaaaggaggtagaagcacttgaattctaccattgggattatcggaggcggcttgagctgaaataagagttgtgctgaggggatatttggttgaattcggaccgcagaccagaaagttgaagcaaaaggacagtgtaagaagaggtgatcttcgtcttcatcctagcagaggcacagctcgcatgtagcagttgacaatattgttttcttgtagaggtttgcacatgtgggcagcctgttttttcccatgagccaggtgaagaactgcactcttggcggagctgcattgttccagatgaaatcccagttggcacagttaggtagatcggaggaggaaaggaattgatatagggagctggaggacaagatctctgaatggccatttggggagtagatccgctgatccataccatctgagagctccagttgttggatgatattctgcactactgctaagtcttcttgggcagctgaggagagacgaggggtgagtcccaggggggcaattctgtacattggcaattctaatatgatcaacatgctgcagtgcctgtgcttccatgaggggctgtatccctggcaggctgcccctggcttgtgagcatctggcggtccggccatctgggcaagcggcaacaggaaagacagtaatcaagcaaaataagatgaacctttggcatggaagccgaagcacctgcggatcacacaaaggtagtcctgggcaaaaagcaagaggcaggtgctcaaggatatgcacaaagagcagcttcaggcgcagatcaatggaagggcctgtttggtacagctccaactcctaaaattaactccaggagttgagtctggagtggagttgtggagctacctaaacccagctccacaactctagcacattttgtgaaagagctccacctaactccactcccaggttttgatggagctgaaactggagctgtgccaaacaggcccgaattatccctgtaactgtaaagggtcattgtcagcttgtaccggtggctagtaattacaggaatcaaagtatctgcaaaatgcctgattacaggatgcaaatgcatttttccaatcagtacatgatggctaatatgtttcatataaggaacctggtactgcccaagaattacctcatcagctgctccacaagagcaaggctatggacatgtttgcacaaatgttacaggtagacacataaaaaatggagccatgggctaaggaagcgcatatcaggctgttacactcctaaaatggagccatgggctaaggatgtgcatatcagggctgttgcactcctctctgatcagatttgtggaggagtggataggttctcatctagcttgacttctccctacaacatgaacacattttttgatcaactttggtggtttggttgatcacccaagtgctggtcattttgtcattaatcattatggggcaccaacatcttttggatggcctgtgctagttgagggtgagaaagtcacagcatgcaggtcaagtggatgtggtgctattattgggtgatgttgctttgtgatgccctgggttccagttgttgctgctgatctacgggatgcagcttggggttgtatgctgtgagtaaatgatgccgtgtgcatgttgccatagccctgaagtgatgttgctagtggaaatgcactgtatgatgttggctagacataaaactaaaccttcagtttaatgtgtgttgtatcgatgaatggtaaaatttgggctgagaatgaggccatgtggtcgcccgatgttgctagcctggagagatgtgtgattgtgagatatttaagaatctcttagttattgccg

SEQ ID NO: 19655 - DNA, 2066 bp, Oryza sativa
  ref <308>: DATABASE ACCESSION NUMBER: AK070003
  ref <309>: DATABASE ENTRY DATE: 2001-12-06
gcgaggatttggagttgaattgtggggagggggacctcgcgggtgttgccggtttggagcccaagatagggttatgagctgcttcgcggaccgccgctgctacgccgccagccgccgccaggacggcctcctcgtgttcatgttcttcatctcgattcccatacgtactagtagcagtagtagtaataattgtaattccagtagtagtattagtagtaatctcctgtaagcggagttcctcctcgcggctgcgtgtacggggacgggaggaccttcttcctcttcgtgttcatcttcttcttcttcttcctctcttccttcggcttcggcgctggcggctatggatcccaatagcctcaaaactggaggcctcttgcttccgaccattgagaggcaatgtgcttcgcctccatccgtcatcgtgatcggtgggggaatttcaggggttgcagcagcccgtgctctctccaatgcttcgtttgaggtgactgttttggagtccagagatcgcgtaggcggtcgtgtccataccgattactctttcggatgcccaattgatatgggagcctcatggctccacggcgtttgtaatgagaactccttggcaccattgattggctatcttgggctgaaattatatcgcactagtggcgacaactctgttctgtatgatcatgatttagaaagttatgcactctttgataaggctggccatcaggtctcaaaggagacagttgctaaagttgaagaaacatttgaaagaattcttgatgagacagttaaagtgcgtgataagcaggaacatgacatgccccttctacaggcgatttcacttgttcttgagaggcacccccatctgaagttacaagggatagatgatcaagtcttgcaatggtgtgtctgtcggcttgaggcatggtttgctgcagatgctgatgaaatatctctgaaaaactgggatcaggagcatgttcttaccggtggccatggtctgatggtgaacggatactatcctataattcaggctcttgcacaaggtctagatatccggcttaatcaaagggtaaccaaaattgcccgccaattcaatggagtgacagttaccactgaagatggaacaagttactctgccgatgcttgcatcattacagtaccgctcggtgtgctcaaggcaaacataatcaagttcgagcctgagttgccctcatggaagagctctgcaatcgcagaccttggtgtcggtatcgagaacaagatcgccatgcacttcgatacagtcttctggcctaatgttgaggtgctgggaatggttggcccaacgcctaaagcatgtgggtacttcctgaacctccacaaggccacaggcaatccggtcctcgtctacatggccgccggtagatttgctcaagaagtggaaaaactgtcagacaaggaggccgtagatctggtcatgtctcacctgaagaaaatgctacctgacgccactgaacctacgaagtatttggtttcacgctggggttctgacccgaactcgctgggttcctactcgtgcgacctggtcgggaagccggccgacgtgtcggcgcggttcgccgcaccggtggagaacctctacttcgccggcgaggcggccagcgccgaccactcggggtccgtccacggcgcctactcgtcggggatcgccgccgccgatgagtgccggaagcgcatcctgatgcagaagggcatccctgacctcgtccaggtcaaggcctacgaggagatggccggagtcattgctccccttcagatttgcaggacctgaaaaaactgaacctgctccaccctgccattgtcatggaatctggattgattcaattgccatgcctatgccctggaatcttgatgattcaatcactcatacaagttcaagttcatgtaggggattaactgcatgaatcaaaattattaattaataattatgtaattgtcatgttattattgaataaataaatcgagatcatgcttgagatctttgtactgggacacagtttcaattaattaatgctagtaacaaccttggagcg

SEQ ID NO: 19656 - DNA, 2363 bp, Oryza sativa
  ref <308>: DATABASE ACCESSION NUMBER: AK070004
  ref <309>: DATABASE ENTRY DATE: 2001-12-06
ttggcatgccaacttcacagcctgctgcaccttctcattcatatatggaatcttccaattctcacatgtctacggcacattcatattcatcagctgaggttccagacaatagggctccatatgtcactgccaattctaatgctttcccccaagaaaacagaaggggttctgatgctccaatgtcccctaggtcccagcatggtcctaacagtttctctcatgatactgctggaggttcaaatgtttctagaccttactcccaatatggtgcaacagttccagatacagatacagcgtccaggagggaagagttcaatcactctagggagagaaaatcttcagttagtggttccaattggaatatagaattcaaggatgcaacatctgcagcacaagcagcagcagagtccgcagagatggctagtattgctgctagggctgctgcccaacttgctagtcgtggaaacctttctgcggagcaaaatactggagcttttgagtcacctgcttatacccatgaaactacacccaggaagcaacaagctgaacatttaatgaaggatgggcagaggagttctaatgagcagagttcaggggcttatgatccaagactcatctcaagtaatgatgctaggaaggatggggggagaacagaaacaagccgtgtaggtagtcagaatatgccaactaattccttgggtcaatccccaccatatagccctcatattcacagtgatgagtatgacatgccaactgatccgcatcgttctcattcacccgatcctcaatattctgatgattcatctgagaaagaaagcaactttggaagacctgaggatcatcagtttaatttacctggagaaagattgtccgaggctcaacttggtgggcacaacatcaaggacacggaaagcaagcatgctacctttgatcaagagaacacagacaactactacagcaactatagctcttcccatggtacattcacccatggcagcagtaccatttgggacagtcagaatgataaagctggacctgattcttcagctgttgtttttgatcaatatgattctgatgtcggagaagaaaatttattggatcctttctcttcaaagcacactgaagaacccactgttgaagatcacaagggattctcaagtgcagattggggtcaacagcatagaaatgaatctccagttaatcatagcagctcaacactattttcaggaacagaagcaaacagaaaagatgtttcctcacctcattcttatgataatgtgccacctacatttgactcggatggtgttagttctgatgaggaaatgaccacaggcatgcatgcaaggtctttaaggtctcattccagaggatccgatttttccgagagtagagaaaatataatttctggaaaggttgtccatgatgttaatgaaaatattgaagatcatgtatccatgtccaggaagaattaccttaattcatctggttctaatgcattcaataaggagcgctacagtgaaagttcacctagatctgattactcatgggttaatggggaattggatcgtacaaaaatcagagatcttgaagaagaaagagtgccacataaattggaaggtgcatcatcattgacaacaggagaaaataagaatcagctgttttctttaggcaggcaaacttcaacatcatctgctgactatgatgaaggcgatccaggcttgaactttggaaggctaactcctggactaagaaacaaactccggcaacctcctccgtacataaaggattctgggaatacctcgttgcataaggttcctaccgccattgaaaaatcagtgcactctgaagaggatacctcgtttggaaatacaagaaatacttctacaggtatggccaggagttcgttcggtgcagattacaacagtgaacttcatgaccaaaatcaaagtgttggagcaagtgtggaagctagatcaaccatgaggaattactatgggtcagaaggtgatagagggaagttatctgagcaatcttataatgctccaagttctgtgatgaataagagttctggaggtgtaaattccagtcaagatctgtaccatgaaaagccaggtgctggagcccgcaggggaactacaacaaaaactgccaaaagttactttgattcagatgatagcgaggacgaattggcacaacgcaaggaggtccagacaaagtggtctagagagcagattcaatcacgcaggactcagatgacatcagatacaaagaaagaaaccggtgtccgagttggagtgcagcatgctgatgaaactgaggcgaaatcacctgctgggtcattttctaggtttactgaacaaagg

SEQ ID NO: 19657 - DNA, 1664 bp, Oryza sativa
  ref <308>: DATABASE ACCESSION NUMBER: AK070005
  ref <309>: DATABASE ENTRY DATE: 2001-12-06
actccttggtccaccccgcgccggatcttgaagctatggcgcgcgtcggcgtcgagaaggagtgagaggagtgggagtaggaaggtgagcagcgacatggtgcgtgggtcagcgcgggaagggtccacggccaccaaatccggcagccctccgcctcctaggcgatagatcggacggccctgttcctcctagcgctggataattcgtgtggatgtccatggcgatgtgatgtcgccagcgcagcgtagctgctagtctcgatccatgtctcagcgaggtagggaggaggcactgggttgacgaggaccgaggacagcgcagcccggcggtggctgcttccgctgcccccaagtagtgagttttctttggatttttgggaatcgggtgttcttggtcgatttggttttttccttaattttatttccattatttgatttgtttttttatgatgtgtgcgaagagcgctgaagctgatgatctgggcatccggcagataaagctgttgcggaaccagcggtgcgcacataatttcggaatcgcatcccccatgagagtaggccgacatggaggatttctgcagctacctcatccttcgccactgcatgttcctcccgatctctctctcccctctctctggcgaggaaacagtcatggaaggtcctgctttgatgtgaaaaattatttggttgatcttgagaaaaaaaaatcccagttcatgtgcatgctctttgtatttcgcttgctgcatttttttttagtgaattgaacttcgagccacctttgattaccattgttacaatttggactaggctaaagctaaatttttcaatttgggcaaagtatctttacatgatgtttcaatttggactcccttcttcttcctccaactctcttcccccaatctccccttcaatctgtaaaatcttccaaagaattcaaagggtagtttgcattttcaatctcgactacctagtgcttgtggcttaatttcaaggacagcggaaggtgcacaacaagtattcctactggtagcaactagcatacgaagaagctggccggcaatggcagacagttgctgctactttctgaactgacgataagaactaagtcaagtagcagatagccacgctctcaagctcatgctcgacctcagctagtgctacatgttatgctgcacgcctgcgctaaatttccacatgtgtcgctcgagcttcaacaagttttgcagcgctcaagctccgccttcgtagtgccgcctgcatttgagctcgaaatcaacttcggcgggtggctaccctgtgaaaggttttgcttcttgccttttcatgcactgcacctgatcgagaaagagaccttgagctgtacggagaaaagagaggaagaaagggagttggaggaagaagaagagagtctaaattgaaacattgtgtaaacatacccggttcaaagtgaaaagtttactttttcactggtctaagttacagtacaggtaagaaaaaatagcccaagatgcaatttactgttttttttctttccagttccagttctcgaaggctagctgttggcctgttgctgggtgctactgctaccttcttctcatgtttctcgagaaggttattgccttccttatgttccgttctataatatatcttccggttattttg

SEQ ID NO: 19658 - DNA, 1223 bp, Oryza sativa
  ref <308>: DATABASE ACCESSION NUMBER: AK070006
  ref <309>: DATABASE ENTRY DATE: 2001-12-06
gagccatcgatcaccattaattcatctccatcgacaaagctagctaagcccagtcatggccgcctctcccgcaatgccgtcactcctcctcctcctcctcctagccgttctcgtctcggcggccgatgcctacgactccgccgccagcgccaacaccaacgccggcgccatccccgaccccaacatcttgtacatggaggccatgtgccccaagacgacggacgtgaaggcgtgccagcaactggtgaagaacatgccgtccaacatcgtcgcggggaagaaggacgccaggagcatcgcccgggggtgcatcgccaccgcctggttcgtggcgagggacggcgccaaggactgcaccgccgccgtggacgagtgcaaggacaaggtcgaccagtgcctcgacagctgccgccacgccttcgccgccgtgaacgacgccctggagccccagggcaccggcgacgacgccgtcaaggtccccgaggacgagaagctcctcgccatccacgccagcctcacgcagctgctccgcggccccaccggcacgcgccgcccgcccctctgcaacacctgctgccaggacggctcgtgcacggaggagaagaagcgcaacgtcgtcgcgctgttcgtgcaattgtggagcttgctggatttcgccgacgcggtgctcgaggacctgtatcctctgacgaagctgccaggggacaaggccgcgggatcagatacctctgcggcggcggccggatcaaccgccgacaaggagacctctgcggcggctggatcaaccgccgacacggcgacctctgcggcggccggatcaacctccgcaaaggagacatctccagtagccggatcaaccgccgataagacctatgcagcggccggatcagctcctcctgtcgtcgacactgcgcctgctcctcccgtgacaacttatgattaattacaaacattcggtatttcatattttggaggatgctataggaactttaaataactcttccaaaatttttaggacaccaacgaaaatccttacaaaattttgactaatcaacgtttctaaggagtttaacaaatttctatacgtgtaactttttcttacatatctgagtaggtgcattgctgagggcagggtgcgccttccgtggttgtcattcgaaattgtctttgtaacctcgtcaatttaatgaagtttagaatcaaaatgatgagccttttatccc

SEQ ID NO: 19659 - DNA, 1135 bp, Oryza sativa
  ref <308>: DATABASE ACCESSION NUMBER: AK070007
  ref <309>: DATABASE ENTRY DATE: 2001-12-06
gacgctctctcccactccgccactgctccagctccccctccccgcaaggcggcggagatcccaaggtcgtcgggggatggcggcggtggcggctacatctccggcgctaaccctcgctgtcgcggccgcggtgatagcggccgcgtgcctcctcctctgcgcggaggcggtgtggctggacttgccgcagtcggggaccaagtgcgtgtccgaggagatccagtccaacgtggtggtgctcgccgactacgccctcatgtacgagtcccacccctcctcccaccccaccgtcgccgtcaaggttacatcaccatatgggaacaccttacatcacaatgaaaatgctacggttggtcagttcgcattcacaacttcagaagcaggaaactatcttgcatgcttctggatagatagcgcagagaaagggtcaggaatatctattaatcttgattggaagattggaattgcagcaaaggattgggatgttatcgctaagaaggaaaaaattgagggtgtagaactagagcttagaaaacttgaagtggcagtacaatccatccatcagaacatgatatatctcaaagcaagggaagcagagatgcgaacagtgagcgagaaaacaaacgctagggtagcctggttcagtattttgtcactaagcgtctgcattgtggtttcaattttgcaattgtggcaccttcaagggtacttccagaagaagaagctcatctaggttagctcgcttgagctgtaccgtgactccaaaattgcaaatgttgttacattggggaaaacagttttgtcatgttagttcgaacttcacgctagcgaggagctgcttgtactttatgtaatttaaccatggttcagtttagatgtgttgtgcattatgattgcaaataggtgataacttaaatctccctggaatatttgatgccttcaggacatagattacaagaaattcatcgtcttataatgggatgcaaaaattgtggcttatgtggtagtgggcggtggtttttcttccatttgctttagctattacagatgtcatgtaagtgtcatagtatggtccgatccttgtaccagtaaaccggcttagatggaaacaccgatatgagaaggccaattatct

SEQ ID NO: 19660 - DNA, 1442 bp, Oryza sativa
  ref <308>: DATABASE ACCESSION NUMBER: AK070008
  ref <309>: DATABASE ENTRY DATE: 2001-12-06
ggcatcctctgcgtctctccctcctccctctgcagcgccgagccggaggaatcctgaccggaggtcggcctcgccctcccctcctcgcgcgcgcgccgccgccgccgggaaggccggctggcgaggtagtcgaaaaatatcgcctctgaaggtcagcactgaggcatgggggagtgcagtgagcacaggtgttgggacgagctactaccggacgcactgggcctcatctttcgcaaactctcactcaaggatgtgctcaccgtggtgccgcgggtttgcaaatcctgggggcgggtggttgcagggccttactgctggcaggagatcgacatccaggagtggagccagcagcagagcaagccggaccagctcaagcgcatggttcgcatgctcgtcgcccgaagcggcggctcgttccaccgcattagcgtgtccggcctgcctggcgatccattgttcaccttcattggggaccatgcacggtcacttaaaaccatggagcttccaaggagtgatatcagcgactccttagtggaaaatgttgcgccaagattgtccaacgttacattcttggacataagcagctgtactaagatcggtgctcgtgctctagaagcattcggcaagcattgtaaatccctgatcggacttcggcgagtcatgcaccctacagatgttgtcggtagggccagtcaacatgatgaggctcgtgctattgcttgcaatatgccaaagctccgtcatcttgagatagggtacatgctcattgcaacgaaggctgttgttgagattgcctctcagtgtcatgatctcaaattcttagatctgcgtggctgctggaatgttgacgataaactattgcaagagagctatcctgggctgaaagtcgttggcccctatgtggacgactgctatgagaacagcttctgggaggagtgttccgatgactcggatgattccatctattgggagctcatggatgatgattattatgcggcggggagcgatgacgagggcatatgggacgatggtcaaggtcttgagggcttagaagtaaggttttatggtggtggatttagtgaaagccatgctggttttgattggccgccatctccatgaaagctgcatcaagatcttcagaaaagtgcctgtgtattcctgctgcttcctcttatgtgcttcaagttttaaacatcagcttccttagtactagtatgtgcttgtatttgtgtcatcccctagcttgcagatatttgaagccaactatctggtagtataaaatgtttggtgtttatacataaaaaatagcaacatggtctggtagtactgaaacaatgttgctacaaatttgtttcagtactagtaatttatttcagaggttttccatgcgcctgtaatcctgtactagttctcttttatactgcggttctatgacttctact

SEQ ID NO: 19661 - DNA, 2141 bp, Oryza sativa
  ref <308>: DATABASE ACCESSION NUMBER: AK070009
  ref <309>: DATABASE ENTRY DATE: 2001-12-06
ggcgactcctcctcctcttctcgtcttgggtttctctccctcctcctcgccgtcgcgtcgccgcggaggcggaggcggagagccaaggccgcggcggtgcagccgccctcccctcctcccgccgccatggtgaggccgacgcaggacgcgatcgacaccttcgtcggcatcaccggcgccgatgaggccgtcgccgcccgcaagctcgaggaacatcatggtgacctaaatgaagctgtgaatgcctatttcaatgaaggagataggaccagcaccagagccaatgaaaatcctatacctaccggttatgatgacatggagttggatgaaccatttggtcctgttcctacatttcacatgcctttgggcaaccctttttcacttctggatcaaggttttttagaacgagctgctgctgtgtatggtgagggacctcatattacacaccctagggaggtgaggcggatagatgttgaagttaaggacaacaatactccagcaggtagttctggtcatggtcctgttattgaagatgttactggacatgagttttcacatgggccggaaattcgtgggactgttctgattgatgaagatgatgatgatgataacttgccatctgctcaagatactcgtctcccaagcaatccttcaacttcaaactattctgtaccaagagctcctccaattgctaatgttagtgactacaacaatgacatagaagaggagatggttcgcgctgcaatagaagcatcaaaaagggacgcagatggactgacaaatggtctaagaagtggagaacgtgaaaatgcatcacgtggcagagatgatgatgagattgctcgggcggtttctatgtccttggagacagcagaacaagagagagttctgcgccaagtgggagcgcatgtgtctgatcattctgatttatccgataaggaagacattgaaggagcaactgggacagtggaaaggcaagtaccaacttcagggaaagttggaacatctgatcagttggtagatgaagagaatttccaggatgatgacgttgaggaacattcttttgttagacaacactctaggcgtgtaccatctggaaatgatgagtccacagaagcacttgaaagggccaacagtcatccatccagtctcctccctcataacattgaaaacaatcagcagttcaatggagtttttccatcagagtggggtggcatttcttctgaagaacatgatgaagctgttatgcttgaagctgcaatgtttggtggaattcctggaagagcagcatatccattttctctcccgtatcatcaaaactcaagtcgctaccccacggttgctcatcctccgtcaccaacattaactgcacaacggttgttaagggagcagcaggacgatgagtatctagcatctctcgaagctgaccgagaaaaagaattgaaggcagagcaggaggctgagctccgcagattagaagctgctgctgaaagagaagctgctattgcaaagcaaaaacaagaggaggaagaaaagcgaagaaaacaactcgaggaagaggaattggagtccaagcttgcagccaaacaagcatcattgccaaaggagccattaccagatgatgtaggggccgtcactgttgtagttcgcatgcctgatggtcgtcgtcagggaaggcgctttatgaaatccgacaaccttcaggtcctttttgatttcatagatatctccaggactttcaaaccaggaacctataggctggtgaggtcttatcccaggcgtgcattcaccgactctgagtctcagatgtctttaagtgatcttggcctcaatagcaagcaggaagccttgtttctagagcagatttcaggatagggggaaaccgggaaagagttaattgcaattaacacaacagggattcacagaatttttttttctttttacttatgcctggcacatgttcgtgaaaatattagcaaggttcgcatgaaacttggcgttaaggtctcatgaccctcttttgtgttttggaatggtgactctcaagtaccgggtttcatgtgatactcaccctgcatatttgaacagtcagaactcagaatgtacatagactgctgctttcagagctaccgcaattcatc

SEQ ID NO: 19662 - DNA, 2064 bp, Oryza sativa
  ref <308>: DATABASE ACCESSION NUMBER: AK070010
  ref <309>: DATABASE ENTRY DATE: 2001-12-06
gagaagcatccgtcgtcgtcgtcgtcgtggtgctctcgcgccattggcgccaaccttaacaaccgcaatcgcaatgccaagctgcttcaccctcgactccgcctccgatgatggaagaagcactgcccagggccagggatggcccgccggagtcggtggcttcctgtccggcttcttctccgccggcgcggcgcgcgcggacggagggaagccgtcgccggtctgggacgcgcacggcctcgcggctagcgcgctgccggtgccgctctccaggctggacggcaagaagaggtacaaggtctcggatctcaccttcctcaactgccgcacccgcgccgccgccgccgccgccgcggaggcccccctcttcgacgcgctgcgccccggcggcgtctacaccagggcgcagctgcgcgacgagctcgacgcgctcgccacctccggcatgttcgaccacgtcaccctccaaaccaagccgtgcgtactgccggagaagttgcagagggagctgcaagggatggtgaagaggcagaggaaggtgagctccgggctgctcaagaggatggcggggcgcatcgagaggtggtaccacgacgaggggttccattgcgcgcaggtggtcagctaccacggcaacctcgacgccggcgaggtggtgtgcgaggtggtggagggggacatcaccaaggtggagtaccagttcctggacaagctcggcaatgtcgtcgacggcaacaccagcatccctctcattgacagggagcttcctcaacagcttcgtcctgggcatatctacaacaatggggcggggaagcaggctctgaagaatatcgattcgcttggtttgttctccactatagaagtacagcctcgccctgatgagacaaatcaagggggagtaatagttgcaattaagctcaaggaacatgacccaaaatcagctcaggtgatcacagattggagcattgtgcctggctctcaaggaagaccaactctggcgtccattcaaccaggaggaactgtgtcatttgagcaccgcaacatctgtggtctaaaaaggtctctcattggttctgttacatccagcaacttgctcaaccctgaggatgatctttcgttcaagctggagtatgcccatccttatctggatggtatcgacaaccttagtaggaaccgcaccttcaaaattagctgtttcaactccaggaaattgagtcctatattcgttgctggtcccaatatgtatgaagctccacctatctgggttgatagaattggatttaaagccaatataacagagagcttcacaaagcagagcaaattcacgtatggcctcatagtggaagagattacaacacgcgatgagaataacaatatatgtacacatggttctcgacaattgcctagtggcgccttgagcatgattggacctcccacaaccttaagtgggactggcgtagaccgaatggcgtttctacaagctaatataactcgagacaatacagagttcgtcaatggtgcaacaatcggtgacagatgtatattccagatggaccaaggtctcggcattggaagcaagaacccgttcttcaaccgtcatcagcttacagtgacgaaattcataaatttgaacaagcaagagaaaggctctcgcaagccaccaccagctgttttggctcttcatggccgttatgctgggtgtgtaggagatttgccaagctatgatgcatttgcacttggaggacctcattcagtaaggggctacggtatgggtgaattgggtgcttccagaaatcttcttgaggttgccactgagctgagcgtgcctatcaccgtgaagaacagacacacgcaggtgtatgcatttgctgagcatggcactgatcttgggagctccaaggatgtggaagggaaccctactgagtttttcagacgtgttggccatggctcatcctatggcgtcggtgtcaagcttggtgcggtaagggcagagtatgctgttgatcacaatgctggcacaggggccttcttcttgagatttggtgagagattctagtctaggtg

SEQ ID NO: 19663 - DNA, 2739 bp, Oryza sativa
  ref <308>: DATABASE ACCESSION NUMBER: AK070011
  ref <309>: DATABASE ENTRY DATE: 2001-12-06
ggttcgcattaaacaaacttgtttttttttttcttcacacggacttacccatcacccgttcgtccgccggaaaattcccctcgtctcttccatgttccatcaccgccaggcgctagcttttcacctgcaagatctcgaggtagagtggtagaccacagcccgccggattcttgcgagcagcttcccatcgccctgccttgatctgtgctggcctgcgtcccatccccgtgctgccgcgcgcgatccctcctggcctggggctggatttgtggatactttgtacaggtgttgagggttgcagttgcagatttgattatttccagatcgaggacggatggttgcggccaatgccaccgtcatggatagggttccttctgtgtgggatcggccattttgcatcaaggctagaggatgttgcacttgtgcagttaagctgaaatagcttccttgcaaagcatccttcttctaacccaaaaggaaatggaacactgatgttcccacacgatcgggagcagtttgccttctgctgagctggaatatatcctactttatatgataagatgtttgtaagtaagtttactcgaatagataaattcctagttctttcacttaattaaaatatggttattgttgatatgacaaagttatgcatatatatctgagtacagattttccaagcatgagtgttgctatacttaagatttggatttcactcctgtgcagtgagtacttcaccaatcatgttgtactacatgattggtgaagtacaaatcatatatgtacatcatgttgtactacatatatgtacaaattagaaaaaagatagtacaagttatttatattttttatgtatagcatatatgtactaattttgcacaagttttttgttagtacatgttttaacttgctctaaatatataaatgctgtcagcagtgttgtgtactggaggacatttcgaaataggtatagctacatccatgtttaactgaaacttttcgtttagttttaaagaatagaagtttattcatgcatatagtttttttttctcacacagctgcatatatatagtttccatagcggggtgaattaccgttatcacgctggcaaccattgggtatgtatgggtttccccaatatccactatcacatccacagaggtaaccaagatcaggtatatatcaaagtcacagccagtaatgtttagcaaggcattatcaagagtaaaagatctccctggggctttccaggacatgttataatctttggtacctggacttactgggattgcatgggaaaaatcaacggtgacatacataaataggaagagcctaggtggttgtgcggtgttgtcacaggtgagattgaagtctgggttcctgaagcagccagaaccaatgccgaatgggtagtcgaagctcaggttgccgcagctccgtgggcagccttccagagtggccgcagaaggaagaatggtgctgttgataccttgatttcctggcacgctggatgatctcacagttggattcactgcagaaaacaagacgaataggagcagaggaaccactgaactgaaggggctcatgtcgatcatctttatagtgcttagcattgttgccctagagaagtttcagagcttgagctgtgaaaatatgtgggagaaccggagaagcattgcaaatgagtacaatgggttttcatccatatctaggtcatggtcttgctgctttataagcatctggagtctggacagggccacaggggccactgggaaatgtaaaagtcagtgattgtcaatactgcaagaaaattgtcaaggtttactgcaagactacttacagcgatgagggttggtatcaggtatgtcacttcaatcagttccactattaattttacatgtgaaccaaaactttgctctctctttccacctggcttccattctttcaatcaccatcgttgactgactgggcaatatatggctctatattggaagcatcttctcacctttattcaacattaaagtagccaattgcagctagtaattgattcctggagtcctggtcagtcaacattctagctttctaagccattcaaaatgtccaaagcaaactcatgaatgtggcgagcacattttccaccatgccgttgatgctgacagcattgggaactgagtgccaaccagcgtaagtttctaacccatggagcggggagtcgaacagtttgatcgtgggagtctggatctggcttagtgttcaagtacatgattttgacaggatatagtgactgaagtgtgaaactgtctttcctggagattacccctgcattgctcatccagtggaggaaacagagttcactgcttgttacttgtgaagtcgatgaaggcagttgatggtagcagttcaccaaggtcaggcagagtgactgacccagcggctattcagcaatccgtgctaattaagtgattgtaataaagctctccatttcctggaaaagaagttacgaaagaaaggtgcaactgaaattggttaaggttcttcgaatccggtggaacacctgcctacttcaaccactggtttagaacctatgctaacgaactacattctgctgatttgattatgttctaagcttttcgtcgagatggcatcaattactttgcatccattcaacgcaagagtatgtacaaatatactgtcttgatgtccgttgctgttttgatgtgcctaaattaaccgacttactcc

SEQ ID NO: 19664 - DNA, 2731 bp, Oryza sativa
  ref <308>: DATABASE ACCESSION NUMBER: AK070012
  ref <309>: DATABASE ENTRY DATE: 2001-12-06
ctcctcctggctactgctaactgttcatggctgctgttactgatgctgctgcttgctaatttacttctgctgtatttcacggatattagatttgggcatacttactactcactactgattaggatctcactgatgcagaagtaaatcttgtgcccatccattccattgaaaaataaagagtaaatatcagagaaccccatgtacatatgcttgtgtttcataaaccccagtgtctaagcacctggtttcaaaatacccatgtaaatggatcaaaggttcaaaaaaccccatctctaagcagtttggggcatttgaacttgccaacatggttcatgcatgatccactgtcagtggcagcattagtagctattgtggaggcgtggtcaaggcgagtgcgaggttgcaactttaggcgagatggggtgctcagccattatatcacttctctttctcccctatctcattcatcatctcccattagggcacctgctcaacgatgcggacgttgccactgaaggctgaagacaaaggatcgcagtaggctgtatggccgcgggaggcgaacagctcaagctatatggttgatatggcaggtttctttgcagtatttgttggagattatgttctagggtttatttgatttgggggcacggcaaatgctagattgatccttttctttatgctcgttttctaagagttttgatttgggaaacagaacttgcgtctgagttggtgtcttaagagtaccattttgaaacacaagcacatgtacgtatgcctttttgtttgttgcagtgtgtttctggaatgcagctcttttgtacttacatgagctaatatgacatcgcctaaagcaattaagcaactgcttttttgcctcattgtaaacctatcaggaatggtcagttcgtcattgtttattttcttgatgttcctgtttcctaacactatgaagggatgagtgacaattttaactttcaaggatcaattatgcaactagaaatattgtgatcggaaggagttccaggccagggcactgtgatttgcttctaaacagacattatggctttcaagcatcaaaacaaaggctcattcattctctatgcatgaaaatgattggtccgtattttcaaccatactaagatgctctcagtgaccttaagaggttcaaatggcaacagtgaacaagctgaaattacagaaatgccggcttcccaattcttagtgaagatgtgagtatcccagcgtaccatattaaagttacttctgcatgggcacatgaagctcatactgcttggtcatacaagtgctaatttctgcagtattattacttttgtcatatgcagtgcttcttacttatgacaatcgatgttctgtgattgtttcatgcattatatatgttcagcaaaatctgctcttctaatgactgtagttgtgcccctacagtgtcatctacattgatggttcattacttcattgtccaccttaatcttacaaattccagccagaaagttcacttttaggatctcagatttaccttataatgcgagattttaggttcacatagattaagactaggaagttcatgctttatttcaactttttaagtcatggtctgcaacagtaggagcaatcctttgctggtaatggttgctttatgaaccttttttaaaagaaaaactctatatgtctgcaatctcaagcttgaagcatttactctctttgtaattcttgcactttcaccgcctgctgaccatatgccttctcatttttctccatgtcttccatcatgatatcatgcatgtcatgtactgatgtgcatattttcccccaaataaaacatgaacatttcaaagtttacacaaggttttgctagcttccacttatgtttagtaattagtacaatttgaaagtttccttggcgcagcataagtcaattgaagttcgctgtcagcaagcttttactccatatcgatttcagtcaatttatatcttccatgtattatggtagagaagaatagtatccatataacttgctcctgtaagttcataaccaataactcttgctaatgacattttgaaaggttgtttttaactgtatatgcaaaattttgcggtcacagtttgttgtcacctatatgggtatatgatagcagaccacatattcggaaatatagctggctactctcaaaagtaaaactcaatgtgcatctttcgttttgccattccgcaccttttaacactataatcctttgttgtcgctataatatcaaatggaactttaccagtggcctgcaaatgagattattataagatactccctccgtttcgcaatgtaagtcattctagtatttctcacatttatattgatgttaatgaatctagacatatatattcattaacatcaatataaatgtggaaaatgctagaatgacttaacattgcgaaacggaggaagtatatatttattatttatcgttttattattcttttatttttgacaggtaacaagccttttaacttcttcagttaatcaggaccaagtgcagctttggtagtttctttggattggccatcaagaatcacatgcacattcgcgtatgcatgtggagttccaaaaccaatgttgcatgattacgtaccgatctctgtaaatcaaaatgatggcataccgagtttggtgttatgtatacattgtcgtgcatgatcgtatacagatttttgccgtatc

SEQ ID NO: 19665 - DNA, 3230 bp, Oryza sativa
  ref <308>: DATABASE ACCESSION NUMBER: AK070013
  ref <309>: DATABASE ENTRY DATE: 2001-12-06
gtttggatctgcggcggaggcgggcggcggaagcagaggtggttgtgctctgctccggcccgacggactccacgaaggcggcgggggaaggagatgacgcgggggagcggcggagcttggagaccgcggagaggaagcctctcggcagcggcggcttctcgccttctccgcgttgagggccacgaccgccgaggccgagccgtcgacgccgccggcaattcgtcgcggtgcagagtgccgacgctgatctatcctcggcgaggcggcgaccgggacgactccctcgacttctccccatccggccggcgatcgccgtgagaacgtacgtatccactactagtgttttaggagtagtttatttattacgaacttagtatagttactggatctgagaatttcagtatttcacttcttgattcctatttcagccttgcaatttacttgctccagcaatatgaagtggaaaacaattgattttgctcttatataagccggttgtttcaagccgtgtcaactctacagaaaatcctaacccagccaatgttcatcatgttgatccgattgaattgcaaattccagtgctatattttagaagctcaaccatctataacgaataacttagcgtgtgtttggttcgacggatttggtgggttgggctggggccatctcgtgttttaggtgtttaattgggttggactggatcaaaaggaaatattatgcatatatttattcgtgagaaaactggtggatatatccaaaagggatcgttccatccctttatattcctcaaaccaaacaaagaataggactcacttcatccctcaaaccaaacagaaaataggatcatcccatcaaaaaatcagggatggacctaacccatccctctccgtccacaaatcaaacacgcgcttaagatattggcttttaaaatgagtgtttcatttacctctatgctttgaggtgatacctgactatcttatagaggagattgctgggttaagtggaacgttcaggcagtggtcacttgattaaagtacagtatatcagaaaatagcgtatgctattcttcgacctcccggtgatcgcctcagcgtgtcacagttgtatgctactcttcttctaatatattgatgtgtaaagcttttgcgcgttcgcgaaaaatatcagaacatagtgaatacagtagagataataaatcgacagtagagtcattaatctaatctccatgctagaagtatatcccattttacaccgacggctgtatactagatacacttaatacttgtattgtagaaacaaatgtagagtcaccatctccgccaacgccaacgaggcaacatctcatgttctcaacagtaactaacgtacacagtgctggcctggtgctgggcccccatgctaatgagaacttcatggatagaacggaagcatagattgaagtgctttggttaattcctcttcagtgggcaactcctgcatcaaattgagaagattgtagcaggagtcaaactcaacacttgaagggtgacaggaaaattggaaatgcctgtggttgctgcgagtctagctggcaatactataaaaagtccacaggattgtatacagtagaaaggtgtgatcgtacacagggctcacatttttggaccaaaaattttgaaattctccacatgtcaggtttactgggtctctaactgtgggaacgtcacatcagaatcgcaaatcttctccaacccatccaggtatgcaaagcttagataccgtaggcatgggaatgtcggaaccgttgacttgttcatgttgtgcccaaaggcttgcgtgatactgttgcagtaacttacctctaaatgttgaagtttggacaaatacattgtacaagagatgttttttagccggtcgcagaaggacaccctcaaaacagagaggctgggaaacatatcatgtggacttagtcggaagcacttaatatgttttaacatttttagattaaacaactcgatcttcttgagagcctcgaaacaataattcggtgcttcagcgcctctaaaaatttctattacgttcatgtcgctatctgaaacctccaggtaatttaaagtagttccaagcaagttgtcttgaaaaatactttccgacagccggaacaatgcacatgactgttccattttccgtagagcaactagccttaacgggaggttacagcattggcttagtaattcatactggaatgagccttcaataacaatatcgacttctttcaagttatttatggcacccaactcagatacaagaatttgagtttaatgaggaatccaagacacttgggcacttcagatattgaaaagttgtatgacaaattgaggtactccaaatttgttaaggagcatagttcttctggtatattctcgagtttgttccagctcaaatcaaggagctatgaggaaaacatcgtcggagatggagatctaatggcataagaggcgctggagatggagttataaggcgaagagactttcacatatactacctccgtttcagatgggatcatcagaacacatgggagcgagcgagaacgagatggaatctgccatcgagggggatccgctgcatacatcaaccggctggaattgttttttttttttttcaccatcgatcaagattaagtttccgacggagatgacaccaatcagggaaaggttcgtttgcagatgcagagcaagggaagtggtgccggactatcctcgccaagcatactgccccgctaccacaaggatgtgcctgcaaatccctatcccaacaagtgcaaccccataagtctgtggcatgtgacatgcatcaaccgtcgaaaagaaacacggaaagtcaaggtcagtgtaatggaactctgggatgccataaatcccaacatcaacaaaattattagccgtcaacattatacggattgatgaagagattctgaagagacagatactctagagtttttcctgaagcaacgcactgctgggtgctggcattgctgctccattctacaattccaatgacatggtaatactgaagacagcatgtgatggcgcttctagccaaattaaggtgctagctggtcgttgttccgtcctttagactgtggtagctagctgttccttgcatatgcggcccaactaaagatcaatatgaagggccaacactcgtatagagtatttttcagtagtactgaagcgaagtttcgcattgcc

SEQ ID NO: 19666 - DNA, 2112 bp, Oryza sativa
  ref <308>: DATABASE ACCESSION NUMBER: AK070014
  ref <309>: DATABASE ENTRY DATE: 2001-12-06
gctccccccttctccccttcctcccttctttgacttcccctttcctcctccgtgcgcacgctctcctgattcatacagcatttcgtcggggatgacgtcgacggcgtactcccggccgtcgaagctgccgggcggcggcaacggcagcgaccgcaggctgccgccgcggctgatgaggggcctcaccaccaagatcgagcccaagaagctcggcgtcggcctcctcgccggctgctgcctcgcgctcctcacctacgtctcccttgccaagctcttcgcaatctactcccctgtgttcgccagcacagccagcacatccgctctgatgcaggactcgccgccatcctcgccggagacgggacccattccgccccaagaaactgcagctggcgccggaaacaatgacagcactgtggaccccgtcgatctccctgaggacaagtcgctggtggaggcgcagcctcaagaacccggcttcccctcggcggaatctcaggagcctggcttgccggcggcgctctcgaggaaggaggatgatgcggagagggcggcggcggcggcggcctcggagataaagcaatccgagaagaagaacggcgtggcggcgggtggtgataccaagataaagtgcgacgagaacggcgtggacgagggcttcccgtacgcgcggccgtcggtttgcgagctgtacggcgacgtccgcgtcagccccaagcagaagaccatttacgtcgtgaacccgtcgggcgccggcggcttcgacgagaacggcgagaagcggctccggccctacgcccgcaaggacgatttcctcctcccgggcgtggtggaggtgactatcaagtccgtgccctccgaggcggcggcccccaagtgcacgaagcagcacgccgtccccgccgtggtgttctccgtggccgggtacacggacaacttcttccacgacatgaccgatgccatgatcccgctattcctgacgacggcgcacctcaagggcgaggtccagatcctcatcaccaactacaagccgtggtgggtgcagaagtacacgccgctgctccgcaagctgtccaactacgacgtcatcaacttcgacgaggacgccggcgtgcactgcttcccgcaggggtacctcggtctgtaccgcgaccgcgacctcatcatctccccgcacccgacccgcaacccgcgcaactacaccatggtggactacaaccgcttcctccgcgacgctctggagctccggcgcgaccgcccgtcggtgctgggcgaggagcccgggatgcggccgcggatgctgatcatctcccgcgccggcacgcgcaagctgctgaacctcgaggaggtggccgcggccgcgacggagcttggtttcaacgtgacggtggcggaggccggtgctgacgtgcccgcgttcgcggcgctggtgaactcggcggacgtgctgctggccgtgcacggcgccgggctgacgaaccagatcttcctcccggcggaggccgtggtggtgcagatcgtgccgtgggggaacatggactggatggcgacaacttttacgggcagccggcgagggacatgcagctccggtacgtggagtactacgtcggcgaggaggagacgagcctgaagcacaactactcgcgagatcacatggtgttcaaggaccccaaggcgctccacgcacagggatggcagacactcgccgcgactatcatgaagcaggacgtcgaggtcaacctcaccaggttccggccaatcctgctgcaggcgctcgacaggctgcagcagtaactcgtctatcccaataatcgcaggcagctcatggcacacatcaatgtatatgccgggacgagacgacacgacgaggaacaagaacggatactagtatattgtactgctgcttgaaagagatgatgatgatcttaaccggaggagaaccatcagttgttggcgaggcggtggaagcttttcgcatattggtaattggttgggttgtccattttgggtttgtaacaatttgcataggcattacacaccaaagatgttcgatttttttgttcttcttacacttcttcacttcgccagcccattcaacactatacattcttttct

SEQ ID NO: 19667 - DNA, 1754 bp, Oryza sativa
  ref <308>: DATABASE ACCESSION NUMBER: AK070015
  ref <309>: DATABASE ENTRY DATE: 2001-12-06
gcgtcgccgaccttctccttatacacccgacctcccccacctcgcctccgccgcctccacctcctcctcctccacctccacctctccaatggcgacgactccagcgcccgtctcgctctcggccgcggcctccaccgtgccggcgcgcctcctcgtggggcggggcgccgcggcggcgccggtggcgaggcggcgggcgaggatggtggtggtgcgggccaagatccgggagatcttcatgccggcgctgggctccaccatgacggaagggaagatcgtgtcgtggtcggccgccgagggggaccgcgtcgccaagggggacgccgtggtggtcgtcgagtccgacaaggccgacatggacgtcgagacgttccacgacggcatcgtcgccgccgtcctcgtccccgccggtgagtccgcccccgtcggcgcccccatcgcgctgctcgccgagtccgaggacgacctccaggccgccctcgccaaggcccaggagctctccaaggcccacccgcagcaggcgcctccaccctccgatgccgccgcgccgccaccgccgcctcctccacccgcggccgctccggcggctccggcgccggtggcagccggcacgaagggcattgccaccccgcaagctaagaagctggccaagcagcatagggtggacctagctaaggtggctggcactgggccgttcgggcgaattacgccggccgatgttgaggctgccgccggcatcgagccgaagccgaaggttgtgcctgctgcttctgctgctcccgtgccgctgtctgctccggcaattggcgccgtgccacaggccgcggagcttcctccggtgcccggtgccacggtggttccattcactggcatgcaggctgcagtgagcaagaacatggtggagagcctcgcggtgcccgcattccgtgtgggatacccaattgtgaccgataagctcgatgagctatatgagaaggtcaagtcaaagggggtgaccatgacagttctgctggcgaaggccgcagctatggcacttgcgcagcacccggtggtgaatgctagctgcagggatgggaagagcttcacttacaacaccaacatcaacatcgcggtggctgtcgcaatcgatggtgggctcattacacctgttctggaggatgctgataagttggatatatatttgctctcacaaaaatggaaggaactagtcaagaaagctcgtgcaaaacagctccaaccaaatgagtacagctctgggacatttacactgtcaaacttgggtatgtttggtgttgatagatttgatgcaattcttccacctggccagggaggcataatggctgtcggagcctcaaaacctacagtggtggctgataaagatggtttctttagtgtcaagagcaaaatgctggttaatgtcactgctgatcacagaattgtatacggtgctgatctggcagcattcctgcaaacttttgcaaagattattgaggatcctgagagcttaactttgtaagatttccttggaagtttcaactatcttcgctaatcattagtttgattcctatggaggtctattgtcgaataccatttttgtatctttaatcactcatcgggtattacttttcggttgtttgtactatttttccttctgaatgttgggtactgttggagagatgatactattaagttatggaaagcaataagctataactgtagaatagtttggtaattataatttttcgtaattcggt

SEQ ID NO: 19668 - DNA, 854 bp, Oryza sativa
  ref <308>: DATABASE ACCESSION NUMBER: AK070016
  ref <309>: DATABASE ENTRY DATE: 2001-12-06
gctcgtgctctctttgaggtgggttggcttctcctccccctctttaccttttcctcctcggttcggttccgtggttcgtctagggtttagtgggttgagatggcggcgccggatgtcgagtaccgctgcttcgtcggcggcctcgcctgggccaccgacgaccgctccctcgaggccgccttctccacctacggcgagatcctcgactccaagatcatcaacgacagggagacggggaggtcacgtgggtttggcttcgtcaccttctcctccgagcagtcgatgcgcgacgccatcgagggcatgaacggcaaggagctcgacggccgcaacatcaccgtcaatgaggcccagtcccgccgctccggcggcggaggcgggggctacggcggcggcggtggcggctacggcggcggtcgtggaggcggcggctacggaggaggtggcggcggcggctacgggcgccgtgagggcggctacggtggcggcggcggctacggcggcggccgtggcggcggcggcggcggctacggtggcagccgtggcggcggctacggcggcgactccggcgggaactggaggaactgattggtggggcccatcgtggccagttatccttagctatccgtgtcagaatcatcttatcatcgagtcgagtcgttatcgtgtccagtggctctctcgagtcgagaagccctctatccatccatccagtgttaggtgttcttcgtccgtgatgttaccatgaattgagttcgctttggttatggtgtttgaactgcttgttgctatctatcggaatgaaatgaaatagaaaacaaggagaaaaaaaagagttcgaaagttttgttcgc

SEQ ID NO: 19669 - DNA, 1014 bp, Oryza sativa
  ref <308>: DATABASE ACCESSION NUMBER: AK070017
  ref <309>: DATABASE ENTRY DATE: 2001-12-06
gacagtcaacactacactccacagccaggcaaagcaccgacgcacgcgccccttctcttccctctccgtggcggcatggcggcgtgccccctcctcccgctgctccagctctagccctccctccacaacatcctggacatggatcctctacctttggctcgccggagcaatggggccaccagactgccagcgatgagtccgggggcatccagatccagcgccacctcacccatggcagctgctccggtgcgacgatggccaggggccgcgctgccctcctcatccctccactggttagtgaagaagttgggtgaagaaggacccgggcaagacttacatgctagctgcctctccatgattggagccatgttccaagaagtcattccaaaattgcaatgtctgttccagtactgaaccaatccagctcggctccatttcaagccatcataggcatcacctcaaagacattctactcactgcaaagccagggagccatttctttctctcaagttggcatgcgttcctttttcttagttaaatcataaattaacaggcccaacttaattatcatggaataagccacagcaattttacccacctaaggtcactctgtgcattcatttcaggacaatgacaagcattgggatagacaaggcagtagattctcaatcaattggtgctgtctagtaggtgaagagtgacaccgaagcaggatttgcaagtcaactggctcatcttcatattatttgaggtgttgtcggactgcctgcaatgccattcgtcaactcttttctcgtttccctacctccttggttatctaaccttaagaagtaatattcaaatttcatctcagttgtagatgtctatgaggttggcattgctattgtaattcacattagattgttgtcaaatcgattaattgaacgtggatgtcaatgcattggaatccattcttccattgtatgtgtgatcgcctatggtgtgttattaagctcctactattctggtgtaagc

SEQ ID NO: 19670 - DNA, 1786 bp, Oryza sativa
  ref <308>: DATABASE ACCESSION NUMBER: AK070018
  ref <309>: DATABASE ENTRY DATE: 2001-12-06
gatcaggcatcagcagcagcagcagcaacaacatttggccgctctgaagattggtgacggagaatgtccggcggctccctcctcaatagcggcggcatggcggactacggcggcggtggcggcagcggcggcggcctcacgttcccggtcgtggttacctgcctcatggcggcctccggtggcctcatcttcggctacgacattggcatctcaggtggtgtgtcggagatggagtcattcctggagaagttcttcccgggcttgctgaaggggacggcgcacgcgagcaaggacgtgtactgcatctacaacagccaggcgctcacggcgttcacctcgtcgctgtacgcgttcggcatggtcgggacgctggtggcgagccgcgtcacccggcggaccggacggcaggccgtcatgctgatcgggggcagcatgttcctggtcggcgcgctcgtgaacgccgccgcggtcaacattgccatgctcatcatcgggaggatgctgcttggcctggggctcgggttctcgggccaggccacgccggtgtacctcgccgagatgtcgccgccgcggtggcgcggcgggttcatctccggcttcccgctgttcatcagcgtcgggtacctcatcgccaacctgatcaactacggcacgtcgcggatccccgtgtggggatggcgcctgtcgctcggcctcgcggcgttcccggccgccgtcatggtggccggcgcggcgttcatcccggacacgccgagcagcctggtcctgcgcgggaagcacgacctcgcccgcgccgcgctccagcgggtgcgcggcaagggcgtcgacgtcgacgccgagttcaacgacatcctcgccgccgtggagcacgaccgcaggaacgacgagggcgcgttccggcggatcctgcggcgcgagtaccggccgtacctggtcatggccatcgcgttcccggtgttcctcaacctcaccggcgtggccgtcacggccttcttctccccgatactgttccgcacagtcgggttcgagagcgatgccgcgctgatgggcgccgtcattctcggcctcatgaacatcttcggcatcgtcggctcgggcttcgccatggaccgctacggccggaggctgctcttcatgatcggcggcgcgctcatgttcacctgccaggtggcaatggcgagcatcgtggggtcgcagctggggcacgggagcaagatggcgaaggggtacgcggtgacggtgctggtgatgacgtgcgccttctcggcgagcttcagctggtcgtggggggcgctgtactgggccatccccggcgagatctacccggtggaggtcaggtcggcggggcagggcgtggcggtggcgctcaacctgggcctcaacttcgtgcaggcgcagtgcttcctcgccatgctctgctgcttcaagtacggcaccttcctcttctacgcgtcgtggctcgtcgtcatgaccgccttcgccgtcgccttcgtgccggagaccaagggcgtgccgctcgagtccatgggccacgtcttcgcgcgccactggtactggggcaggttcgtcaaggaccacaagttcggcgacgtgtcgacctaaaatttgcaccgcatatgccgatgcggaatgtttggctttgatctcagaaatttagttagcgtgtgtgctctcgatcgtagtataaggctaaggtggacgactttgggtaaattaatcaagaatgggcaatgtatgccactgaaatgttagatcatgctcaacggccacagccgtgcagctgcac
